United States Patent Application Publication US 2004/0214272 A1 - sequence listing, part 10

SEQ ID NO: 38544 - DNA, 1200 bp, Zea mays
  Clone ID: MRT4577_135155C.1
gcacgagggtgtaatggaaaagcaagaggtccaactaactgaagattcattgcgcaggatgttagttgccttttgtgagcaaacagagggtcaaaagttgctggaagatttaccagtgcaggcgatgttggagactctcacaaagagatacgagaaggaattgatacacccaattcaaaacctgttcagtggagaattagcccgtgctatgcttattcagattcaaaagcttaaactggaccttgaatcgggactactggaaatggatcagattctaagggcaaatgctataaactttgctgttcttgcagcgcttcctgcttttggtctttcacttctgttgcttgtgttactgcgagcatgggttcagcgtgaccatggtgctgagggaagaggtaatattgcacgatgtcaacggaggctgcttcttgttgatgtagagagaaggcttatggagtttcaacattacagggataatggaatggaggaagaggcacggtgcaagtttggcttagtactttacacgcttgatagactctgcaaagctgttgagtcacacgcaaaagaaacaggcgaatggttaagcttgagacaagatatttttgatctgtcgaagctcgacatgggaatgccagataagatgattgtcgtttcacggttgaagtggatgtataactgcttgcttccattctcatcgagccgtttgccacgcctctagagcagtgagcaactggacgtcgtgtgttgcattttggataaagattttgacacggatacctggaactctatgtcggaaggatggttctttcatgcccacaagatgttctgtagattttagcagagctggatgaagcatatcggaagggggcagattgggtggatgcagtatccatcgagccctccgttgacaattcttgcattgctaggcatgttgatttggattggctgttgcaccgaatggtttgcgtcgatgggctacatctacatgtgtgcgagcattgtaccctttggccttgttccacttgcaattccaattccaatggttgttccatatcccatactagttcataagtcataacatgacaacagaatgctcttcttttatctattccgcagagatgggtacaatcttatttaactgtttcatttgaaaaaaaaaaaaaaaaaaaaaaaacaaaaaaaaaaaaaaaaaaagcggcc

SEQ ID NO: 38545 - DNA, 617 bp, Zea mays
  Clone ID: MRT4577_135156C.1
aattcggcacgaggctagctcctctctctgcttctgcttttgcctcactcagcctgctgcaagcttttgctttggtttaggtgcttcttttgcattcctttactgttccccccccactttcgctcgctttgccacgcacacgaaaagctcctgcctttaccttctcggaccttatctccgccccgtagtgggatttggtgggagctgcgctgcagctgcttgccccctcgcgtttctttgctcaattgggggggtcacagcccgcgggtgtcgcgcgtgctcgtgggcggaattcggtgttcttgcttgcgcggtcctcgtccccgtccccttggcgcgattgcggttgcggacgctcgctgcagatcttcgcgcgactccgggagcgccggagatggactgcgggccgcccgaccagctgccgccgtcgtcggcgccggcgtgcttcctcaacctcaactgggaccagtccatggccgccgccacggctggcgaccacctcgacctggtctcctccccggcgtccaactcgacgttcggctgacggcctcgctctccacgggatctcgccgcacccgcagtacggaggcactccgctcagctcgccccgcaagctg

SEQ ID NO: 38546 - DNA, 216 bp, Zea mays
  Clone ID: MRT4577_135157C.1
acgcccaacacactaggcccgcaggagcggcgaccgcgaggcggacgacccgccggccgggacgcccgatatagaagaggagaccgaccctagccaggccaagacgagaccgcaggcgaggaggaaggacgcagagaggagccgacagcacagaaagggaaaggccaagcgccgcaccggcaccacagggagcgaggaaagaacgcgggggagaag

SEQ ID NO: 38547 - DNA, 1050 bp, Zea mays
  Clone ID: MRT4577_135158C.1
ttcctaccttttcccctctccacctcccgcaagcaatcacggtcacggcaccgcccccgcacccactgccctctagcttcttcctccccgctttcatggcaggaaaggctgaggcgatgatgcccataggccatccagtttgatccatgccatcctgaacctctatacatactgccccagcccgggcactcgcgatctctacttctctaccgccgctgtgcctgtgctagctcctctctctgcttctgcttctgcttttgcctcactcagcctgctgcaagcttttgctttggtttaggtgcttcttttgcattcctttactgttcccccccactttcgctcgctttgccacgcacacgaaaagctcctgcctttaccttctcggaccttatctccgccccgtagtgggatttggtgggagctgcgctgcagctgcttgccccctcgcgtttctttgctcaattgggggtgtcgcgcgtgctcgtgggcggaattcggtgttcttgcttgcgcggtccacgtccccgtccccgtccccatcccttggcgcgattgcggttgcggacgctcgctgcagatcttcgcgcgactccgggagcgccgccggagatggactgcgggccgcccgaccagctgccgccgtcgtcggcgccggcgtgcttcctcaacctcaactgggaccagtccatggccgccgccacggctggcgaccacctcgacctggtctcctccccggcgtccaactcgacggcggctgacggcctcgctctccacgggatctcgccgcagccgcagtacggaggcactccgctcagctcgccccgcaagctgaacctctccatgatgggccagttccaccactacccgccgatgggccatctagaccagttcctcgccgacccaggcttcgccgcgcgcgcggcgaggctctccggcttcgacggccgccccggtgggagtggctacggcggcgccgtcccgggacagtttggcctccccgacgccggccccatcggcggcgcattgagggagctggagctcgggaacggc

SEQ ID NO: 38548 - DNA, 489 bp, Zea mays
  Clone ID: MRT4577_135159C.1
aaacaaaccccccctaaaaaaaagagaaaaaaggttcgggcaaaaaaaaagcatacaacaggggtttttactttgggggccaaaaattcggggtcacactggagaactaaacttgacgggggcccgggggaaaataaccttttgggctaaaaccgctcgggggggccaaactccactttggcggggccaccggggggaacgctaaaaccggcgccaccgaaaagggaattgatctcctccaaggttttgccgctcgtttcgggcccccagaggggcacaaaccccacccacagggccgaaacgggcggaaacgcgggaaacgcccccccgacggtcacggggcgggaaatggagaggaaaaaaatggccacggggcccctggccatgcgggtgagcgcaaaaccggggggcaaggcctgggcgcccaaccggagggggtaaatctccgagcccacccacctggggggggggccggtcccccccgaaaaa

SEQ ID NO: 38549 - DNA, 2236 bp, Zea mays
  Clone ID: MRT4577_13515C.1
ccggccgggcagcggctgcaccagccattgggtacctcaaaacgccaaaaatttccccacctctagacgccctttcccctccccccgagatcccatccatggccacctcccgcccccggatctggcgttgagcccgccattgccggatccctgccaggcctccaccccgccgtcgcgctcccggcccggttctattgggcgcggcgtggcattccctctcttctttgtgcgctcaccggggggtggtggttgatctgtactggcgggtgcagcgcgccttgcgatctctagctgttgctgcgggaggaccggccgcctcgtcgccgttgccaagcgcgctcttttaaagcccgaagattcgccccctccgcgtgttcgtgtcgccgagaggaggtcggacttgtcggaatggtcgtctaattggggagatttgatgtgttattggtgccgccggatctcgccgacatgtggaagcaatttataggaaagctatcgtggaagtcaatgaaatccagctctggcagcggggggtcgccgccggcgccactatcgtcgccgcgggagaatggagcctcaccgcgggagaatggggccacggggaagcctaacgtctcgcctcggtctcccgcggctggcgccggagccggagccgaggtgaggtccagggaggacgcctttgtccagaaagttaacatttgctgcgcggtgtacgacttctccgaccgaggcaaggactcgccggagaaggagcggaagcggcaaatgctcatgtccctcgtcgactgcattggcgccgccgaggagccgctcacggagacgatgatagcagcgtgcgtgcgcatgttcgctgctaacctgttcagggtcttcccgcccaaagtccggtctggcacctcggcttcggagaccgaggaggacgagccgtttttcgatccgtcctggtaccacctgcaagtcgtttacgagtttctccttaggtttgtgacctcaccactcgtggatgctaaggtggctaggaagtatgtggatagccctttcgtctccaagctgctcgatctgtttgattcggatgacccgagagaaagggactgcttgaagacaatattgcataggatatatggcaagttcatgggaaaccgaccgttcatccgtaaggctgtgagcaacatcttctataggtttgtgttcgagacggatcaccacaatgggattgccgaactattggaggtctttggcagtgtgataagtgggtttgcaaagccattgaaggaggaacataagttgttcttatggaaagcattgataccacttcataagccaaaatcaatgggagtgtatctgccacagctgacatattgcatcacacaatttattgacaaggaaccaaagcttgctgggactgtgatcaggggcctgttaaagtattggccagttacaaatagtcaaaaggaaatgatgtttttgggggagttggaggaggtgctggagttgactgacatggctgaatttcagaagtgcatggtccccttattccggaagattgctagttgcctgaatagctctcattttcaggttgcagagagagccttgttcctatggaacaacgagcacctattcgacatgatctcccaaaaccgccaagtaatcctaccaatcatatacccagctctggagaggaacacccgctggcactggaaccagtcggtcctcaacgtaacgatgaacgtgcggaaaatgttccgcgacatggacgagaggctgcttcaagcctgccacgacaacttccaagaggaagaggagaagcgggccgtgactgaagagcggcggaggctcatgtgggagcagctggagcgaagtgccgctcgcgggtaccaccagccgccggcgatcgctgccgacgcgagcagcttccccgcgccctcttcatcggctcgtcttgtatccctcaccgtgacatgagaacacatgagaacacgaggttgcaaccagatgttgctctgttttcgccgcttggtagctaaagctagatgatggagttgcttgcttcgctgggggatgcacgcacgaaggcattttgttaccttctgtgtatgcataaccccccttgtcaaagtctgtaattaatagctgacggtttgaggacaaagggacgttttggatttttgcaatggcgtattcttgaaatggacatggtgctctcttcctgctgcctaaaaaaaaaaaaaaaaaagcggcc

SEQ ID NO: 38550 - DNA, 851 bp, Zea mays
  Clone ID: MRT4577_135160C.1
aattcggcacgaggcgacgaggtagcgctcggcggggagcacgtgcgctacggctaccgcgacgtgcaccaggacgtggactccttcgagacggagctcgtcgagagcctcgccacgttcatcaagctggacgcgctgttccgctgcagcgacgccgccggcgaccagcagcgggacagcagctactacgagcgcgagaacgcgctcacggtcatcgggagcaacccgctgcggcgccacctggccctgggctacgacgactcccactcccacgacgacggcgcgtcgtcagctggctctgaccgcgtggacggcatagagctcgccgcggcggcgccggcgccggcggtcgttaagaagcaggtgaggttcgcggtggctccgcccaggagccccggtgtggacgagaccgtgttggaggagctgcacgagctgtgcgaggcgcgcgaggccggcacggcgttcatcctgggccactcgcacgtgaagaccaagcccgggtcgtcgatactcaagaggctggccgtcggcgtcggctacaacttcttgcgacggaactgccgcggcccggacgtggtgctgcgcgtgccgccggcgtcgctgctcgaggtgggaatggtgtacgtgctgtgaccagaacgtggcggtgatgggtgactgcgatctctgcgtccggttttcgctgcgtgaactacggatctctctgctctgtgatgtgctattcctattatgcacatctcgacttgcccatgtataaattgtaacgagatgcgatggtaacagaggatgccctgacatttcccaaaaaaaaaaaaaaaaaaaaaaaaaaaaaaaaaaaaaaaggtagagaa

SEQ ID NO: 38551 - DNA, 595 bp, Zea mays
  Clone ID: MRT4577_135161C.1
actagttctagatcgcgagcgggccgcccttttttttttttttttttttttttttttttttgaaaatttgatctctaccacttcggtagcagcacgatgcggagaggctgggaatccaaaaaaaaaaaaagaaaacacccaacaacacacacctcgcctcgctcaccccagaccccagttttatggcttcttctaggctacaaaaggcacctagaagacgaacagtccagtttcagcgggattacagacaaacaacgaaaacaagttcgtccgatcaccacccaatctccctcccccctcgccgttcacgccgacagctcccggcgcagcttgcaggagaagagtcggcacgcgtccatgctgaggtcgacggcggccgccagagcgacgaacgcggcggcgtcctcggcgcacccgacgtgcgccacgccgatctccacggagggcctgccgcgccggccctccccctgcacggcggccgacatcacgaagccgcccgggggccagagcgcgtggcggtttaactcgccgttgccccgcccgggggatccggccgtggtcaggtcgatggcgaaccgcccgccgcgggccgtcg

SEQ ID NO: 38552 - DNA, 641 bp, Zea mays
  Clone ID: MRT4577_135162C.1
ctctctcatcgcatctgtcatgtcagatctccagccagagctctccgcaaaactacctcaccgtgaaactccaatgttagccttcatccatcaggcactggacactccacatgatcctcactgcagaactccaagtcatgaccatcttgagattcacagcatggtcctggcccggagctgttggtgtctgtattacctctatgtggtcaatgcctatactgtctagctactgtttgttgcactccgctacgttactgcctccgtgctctacctcaaggcccatcactacagcatcatcatcaccctgcatatgcctttgctttgtgcttggtatgtcacccactccactccagtgacctattcaatggaacaccacgccaggctgtgccatggtcgtagagacaagtgaaatgaccattatcttgcttcatctttgacgtcagtggtctatgggggtcacttgatggttcggatgagaaagtctagtctgcccctctcatccacccattcttgattctctcccccatgtagcatttgaagagagggttgtcatcactgtaaaaccaagtccagctagttccaaggacagtggactttttgtgttgcaatccaatgaatattttgctttatttgatcacatg

SEQ ID NO: 38553 - DNA, 235 bp, Zea mays
  Clone ID: MRT4577_135163C.1
ttgttgtttttaattgtcatgtttggcgtgattattgctttatgacaaaatgcaagcccaggagcgcgcggaagacagaaagaccgcgcctgtattacagcacgggaataggcacaagaccaacaaaccccataataagaacgcatcgtgcggaaaggattcacaccaaggccaaacaacgacaggggactaaacaaatctaaccagagaaagaggctctccctacaaatcatgc

SEQ ID NO: 38554 - DNA, 729 bp, Zea mays
  Clone ID: MRT4577_135164C.1
cccacgcgtccggggttctaagggacctgtaaatgcttgtgccctatattgtgtgcctccacatattggggagcttgaagcatcgacaagttactagtcattgcttacttatataagaacatatttttgatttgcggttgtcaagttggccttgccccacagactttcgtatgctgcatatgcaactgttcactttctaaagaaggtgctatttcagccgtacgtttgttcagttgcgggcatgcaacacatcttcagtgtgagtctgagcagaccaggtcatccaatcaggaatccaaagagggatgccctgtttgtctctcaatgagtgatacgcaagctcgaagcaaatcacctatgtttgagaatgggctaatgaagtattctggggctgaacatgaagtgtcacatggcatgtatcagattcatgaagttgatcatgctgagagatctcgtgggcttcaacagatgtcacggtatgaaatactgaataatcttcagaaagcgcagaagtcctttcatatagaaaccgtacctccattgaaacttgcaccgccagctatataccatgagaagatacagaagaggaccacttcggttggtgaaactagcaaacattctgttagaagtcagaaaccccagaaaatttggcaaatgaaggagaaaaaatcaaaagaggctgggagtcatcatccacaaaagtcaagttttctacgttaatagaagaaa

SEQ ID NO: 38555 - DNA, 360 bp, Zea mays
  Clone ID: MRT4577_135165C.1
gttttgggtccgaccgcacacccggggttgcccctcaaggtgtttttaggagtaggacggtgtcgacgactgtagcaaaatggttcgtgcggatcgcacgagggacaatggacaagatttacaggttcgggccgcttagaagtgcgtaacaccctacgtcctggtgagtatatgagcgtggttacaagagggctttctggatagagggcgcagagaatttacgtgggtggctaagtaaaacagggtccctatcttctgaaggggtgccccctaggccttatatattcgaccgcggggcagttcatgtagatatgataacaacaagttgtcaaaagatagcgaacctgctgagtttatccc

SEQ ID NO: 38556 - DNA, 234 bp, Zea mays
  Clone ID: MRT4577_135166C.1
attggtacctcgagccggcccgcgactggtcaggcgcgaggcgagcgttcacgcgccccgcgcctgctggttgcggcggaggggataatatccacgatcagagcggggccagccagcgcgggcgctgcggtcgacgacggtctctgtgcgcgcgcgatggtggccgcggcgagggtggtgtcgggggtgaaggcggagggtctgctgcggggcgcgtgcgcggcgctggccgcg

SEQ ID NO: 38557 - DNA, 495 bp, Zea mays
  Clone ID: MRT4577_135167C.1
cgggaaacaaaggccacgcggctgggatctagcacgcgagcgagcgagagagccgcacacctatctggcaagcgacgccgcggcctcgatcggagtcggaggcgaacacccccatggcggcggctggcggcggcgcaggagggaaggttcagcgtgcccgaggcggcgcccttcaccgcggtgctcaagtacgccgcggaggagttcaaggtcccgccccagaccagcgccatcatcaccaacgatggaattggcatcaacccccagcaaagtgcaggcaacgtgtttctgaaacatggttcggagctgcgtctcatccctcgcgatagggttggagctgtagtcatgtcttccggttagaggatatatacagtccaatgcataatgagcaaaacttgagagaaataaagctttgatgttggccttgcttggctgtaggatgttgttacaaggataataagcgaaccttaccgtacctgcccgggcggccgctcg

SEQ ID NO: 38558 - DNA, 601 bp, Zea mays
  Clone ID: MRT4577_135168C.1
cattgggtacctcgaggccggccgggccttttttgggctttggctttttgctgcaacaaaaggcgacgccgctgggatctagcacgcgagcgagcgagagagccgcgcacctatctggcaagcgacgccgcggcctcgatcggagtcggaggcgaacacccccatggcggcggctggcggcggcgcaggagggaaggtatccttcaagatcatcctcacctccgaccccaagctccctttcaaagtgttcagcgtgcccgaggcggcgcccttcaccgcggtgctcaagtacgccgcggaggagttcaaggtcccgccccagaccagtgccatcatcaccaacgatggaattggcatcaacccccagcaaagtgcaggcaacgtgtttctgaaacatggttcggagctgcgtctcatccctcgcgatagagttggagctgtagtcatgtcttccggttagaggatatatacagtccaatgcataatgagcaaaacttgagagaaataaagctttgatgttggccttgcttggctgtaggatgttgttacaaggataataagcgaaccttaccgtaaaaaaaaaaaaaaaaaatttgcggcc

SEQ ID NO: 38559 - DNA, 315 bp, Zea mays
  Clone ID: MRT4577_135169C.1
atagtgagtcgtattagacagtactactcactatagtgagtcgtatgatgcatcgagcttcgcaacagcgttcttttctctctcgtatctcttcacagtgcttcttcactccgagaccgggaattcacggatggtggatccggtactactgggtttgcccactggcttggacaatgtctgggctcatcgtgacacagtttggacacctataacaactcatcttactcggtgcagaaagtgagtacgacgagatgctgctatgtaatacatgattttggataccataacgattttctgccactcactccgccggtt

SEQ ID NO: 38560 - DNA, 396 bp, Zea mays
  Clone ID: MRT4577_13516C.1
agcacgtgcgggttactgtgctcaccaccccctgggtggggccgacctctggcagtaccacgcttaccaccataaagatgcttacgggacctggttctgcgctttctcggtcattggcaaatagaagaaccgataccactaccagtaggcttacggaggaactgacccgggagggtatggcggaactcactaccttggtggtgccgccgtgcagcaacatggctatggcatcataaccaccggtcatacactgaagcacagcgcataccaataccaacagtcggcgtatcgctgaaccgacaccagatgatacctggctccctacagtggtggctctcacgccgccattcagatgcacgggtacaggaaggacctgtaccaaagcgagactcagag

SEQ ID NO: 38561 - DNA, 1035 bp, Zea mays
  Clone ID: MRT4577_135171C.1
aattcggcacgaggttcccactcattaagataccaccgcctcccgccgcccgccgcccgccgccgacgagcaccgcagcctgacacagagccgcgggcgagccatcgcgtgcggcctcgcccgggatggcgaccatggagagcctgatcgggctggtgaaccggatccagcgcgcgtgcaccgtcctcggcgaccacggcggcggcggcggtgagggctccctctgggaggcgctcccctccgtcgctgtcgttggcggacagagttccgggaagtcgtcggtgcttgagagcataggagggagggacttgctgccccggggatctgggggtagagagaagtagagtgagaccgataaatgatagatatcagtcagaagaatagatcgatgtgtcacttatattaacatggtctgtgagactctgaggaacacaatcgaaagccgtcgtacattgtcaagtgaaagaggcaaaaagaaatttgcttaaccgtttctatgctcatgtgggaagcaaggagaagaaacagctgagtgcgatgttggacgaggaccccgctttgatggagaagagggatgccctggtcaagaggctagagctgtacaaatctgcaaggaatgagatcgactctgtcgcatggaaatgattggcttgtgacagccactggtggatcgtagaatgtacaaccgcagcagcacacgtatggattgcagtagaatgatcaattctttttttacatttgaatttaccctggaggccttgcacgtgattttcgcgagtcttttgccgaacacatgcttatttggccgtcttggcccactcacgcgattgtgttatgggaggatgttctggtctccagttgatataagagtatatatgtattcttttgttgattttactgccttgatggcctccatacttctattgggtggggtgccaggctggacaatctgtcagatgctacaaaatgaaattgtgggataggatgaccaactgtccatgatatggatgaatattaatgggtcagtatcttctg

SEQ ID NO: 38562 - DNA, 1546 bp, Zea mays
  Clone ID: MRT4577_135172C.1
actacttttggaggctgcccgcgggttcgccggccgcaggggacgccacgcgtaagagaaaagattcgcggcggtggagtcggagctcaactcatcaatagggtttgatcagcgctccgctcgtgctagccacccagcccccccgcgcccacttgcgacggcgatggcttcgccgtactcgctcagctgggccgacgcgccgccctaccactaccacgggagaccccagccagcgcccgactcacccgcatcctccgacggggccgggccccgctcgctctggatcggcggcctgctgccatggatggacgaggactacctctacggctgcttcaccacctcgcgcgagcttctttcccttgtcatcaaacggaacaagcagactggccaatcagagggctttggcttcctcaaattttctgaccataccgccgctgctcatattctcaagtcttacaatggtcagaagatgcctaacgctgttcaagatttcaagctcaactgggccacccaacaacctgctcccaagaaacttcctgatccagatttcaagctcgacctggccacacagcaggagaggcatgccgccgtcgattcctcatctgatcattccatattcgttggggacttggcctacaatgttacaggatacatgctacaccatgtgttcaaggcccgctacccatcagtgaagagcgcaaaaatcatctttgacaagttcactggcctctcaaaatgctatggatttgttcagtttggagatgtcgatgagcagatacaagcactgacagaaatgaatggagcctactgttctaccaggcctatgcggattggacctgttcccaagaagaaaagtattctttccgcagcaaacagtggactgagtcttatcacgatgcaaacaattcaaggctatttgttgggcaacttgaccaaagtgtgacttctgaagatctgatgcaagcctttagtccatatggggagcttgttgatgtgaaggcattaccagggaagggctgtgggtttgtcacgtactctaacagggcatcagcagaggaagccattagaatgctgaatggaagtcagctgggaggtaaagccataaaactttcgtggggttacccttctgctgacaagcaggctcaaaggaacagcggcggcgggttcggacgcgactgcttcgtttggtctcctcagtatccctacgcttacgctcagacatgccaaccgggatatggatattaattaccgatagcaagctgcccacagtgcagtgagatcgtgtgaagaaagatgtcagtcacaaggaacagctgctagggtgtagagggatttttggtccatgtttttttttctttttggaaattggttcctcctatggttgcataccgtgaagcatcggcatctggatccatacatgagaatgcaaacaacgattgaatgtacatttacacacatactgctactactatattaattactgtaccttgaaatttttgtctaccctatattacgcagcacgtccattaatttttatgggttggag

SEQ ID NO: 38563 - DNA, 228 bp, Zea mays
  Clone ID: MRT4577_135173C.1
cctcccttggtgggctaactccctaactcagctcatggcactcgcccatcagacgctaacgctcttacctaggattctgacttcgacgagctcagtcatcatctgatacaccgtatcttcactcaaatgcctttacaaataatctcgatcacacaaatctgttaatcaacggcttctctaccactctctataaccactattgcgaatcaaccattactattgtactac

SEQ ID NO: 38564 - DNA, 413 bp, Zea mays
  Clone ID: MRT4577_135174C.1
aacacctgggaagtatgcgtacaatgaacaaacaagacaaacaattacagaatcaggtcctgatggggctgtagttcttgggactccagttgcacctcctgtaaatggggacatgtatactgatatcagtcctgagaatgcggtgctgcaaggacagaggagattaagcaaaggcgtggattacttggttgaagcatcagcagcagaggcggaggcaatcagtgctacattagctgctgtgaaggccacgcaggttaatggtgagatggagcagttgccagacaaggagcagtctccagactccacatcaactagcaaacattcaagcctcatcaaactggacactgctctttctaacaacttggcagctccacctggggttcggttgcaccatagagccgtcgtggtcgctg

SEQ ID NO: 38565 - DNA, 571 bp, Zea mays
  Clone ID: MRT4577_135175C.1
tgatttcgcggttgtccaccttcctatcgcatgcattcaccagtaatggcatcccatactgtcatcgtgttactactactcatctagacacaaactcaaagcatcgatctggtgctgtcctctaagatggatataggcgcagccaccgccgacggcaaccagataggtatctacccgtaggaggagactccgaagccgccaatgaaactgatgaacctccgactgtccaacgagctcgatggtcgcaatcacgcctgcgaacagtctttggtgggggccgaccttggacgcccgattcatgacatctcgccttcatcaggaggaaatgatggtgctcctgtaatgcaccattaccacatagctgaaagtttccgtttctagaccgcgctacatagcgtagcccctcactcgcttcatacgtgacgtgatcagtctatgtcgcacacaaatttgtgctactgtgtgctctactgtaccttgtaatatgatggcgcgacaaactacccttgatgacttcctcttctcctcagatcgattattatcgctgtcgtagtatgcgtcatttgtctat

SEQ ID NO: 38566 - DNA, 469 bp, Zea mays
  Clone ID: MRT4577_135176C.1
ctcacgcggatggcccacacgtgcagacataggaaacttgtcatatggcctgtcggagagggacaagtgctaaagtaaatttacattatctagaatgagccccttagctaaaagctaatagtgttcagaatcgactgtatacatcttctgaataacagtgatcccgctgcgaaagccgaggcaatgctacggggactatactgacaggcgaccacaagactaatgacgcttcgacttataccacctggtctagacgctcgtctggaactgtaacataaaccggacatgcttgttgtcctgacttcttgatcctacaaacaacgggtgcatgatgatatcctccagctccaaggtcacgtgcaagacagagctgtgcggtatttagtgacagattcattgcaccagcccgaatgagatgagattccacatcctctagaacagcacctgatgatcgtgatcgctctactat

SEQ ID NO: 38567 - DNA, 281 bp, Zea mays
  Clone ID: MRT4577_135177C.1
gacggatccaactcccgaacagcatctgttctctcactcttgcacatcaatcattatttaggtgctcgatacctagcctatagccctagctagtagctagccactcagtcgcgtagtcatcaaccttctcatccgtacccatggccactgccgaggtccataccctgaccgtcgtggcgaccgacgaagcgccagttgtggagaccccatctacgaccgatcgtccagcccgacgaggctgcccccgtcgtcgaggccaatgtagacgaaccagctgcccc

SEQ ID NO: 38568 - DNA, 300 bp, Zea mays
  Clone ID: MRT4577_135178C.1
gcgctgtgtaggttcacttgcttgtatcacgacaacctcctccagtcggaatgcacgaggagaacgaccaggacttggcgtggctgctaatgctggtcatcctcgttcttgaccgacaacatattaataaacggcatgatggacagctcatggagattgtgcaccagtcggagcgtgttggccattctacctacgacgcgctgttctatgccgtgcccaagtacaagcaaatgacccgtctaatcttctccaagtggttgacgattaacagctcatttgcttcgagggccataacagact

SEQ ID NO: 38569 - DNA, 836 bp, Zea mays
  Clone ID: MRT4577_135179C.1
aaaaaatatttattctgtcacgggctaagaattatgagctgcaggaaccagcgacctgccatttgctttccctaagtacactttcccctcggcgctcgcgctccaccgccggccatcctcagcggaacaggaaaaccgtgctgtttccccgcgctgcttccggtcgatggaattcgctcgccgaggccgcggcgacgaggacatcgacgacatgcaccggttcatcgaccttccgccgcctcacgtggacccattgctggtgattagggaagcgctgctgtcacagcttcagaaggatcgtcttcgccaggagatcatccaggttgagttggctaagatagagcgtgccatggtcctgtgcaagtgcaacagctcacatcatggtattgccgctgatgatgtggaatggactaggcctgctcccttcaccttcagggagcagtccatgcgaccttggcgatggtcagtcagtcaagaatgttatgtcgatgtggatgaggttcatgatcgaaagcaaaaggagggaaggcacaggagtgtagtgttgaagtctgagaagcctgccatggaagatggtgaatgcttgagaccttgttgtaatggtaaggcaagtcaggcgaattcaaaagtcgaagatcagaaatcacaagaatccagtgaggtgggtgctttatcctttctgttttttaccctcgcccgttagttatctttcggcaatatttgctattatatcttcagaacgaggttaagctgtgacacatcaacagtttggcaggatttatgtatggggattaaactgaaagtttaggtttcttgcaaaaaaaaaaaaaaaaaaa

SEQ ID NO: 38570 - DNA, 250 bp, Zea mays
  Clone ID: MRT4577_13517C.1
ctgaacattggtgttaatcctgaatatatgaagcggaactttaaggcggaccagcttgttttatagagagtggtataaaaaatcgaggaaatcatgatgataaatgctttctgggtgaaaacggtatgcattgacaacttcaaaaaatataccaactggtaaaattaagggaaaaaactggggggccaaatgatggaggaaactaatatttatgagcttgcggttagtaccaccctttttaaaagggaaa

SEQ ID NO: 38571 - DNA, 617 bp, Zea mays
  unsure (1)..(617): unsure at all n locations
  Clone ID: MRT4577_135180C.1
aaactactaactagtgctcgcgggttcaaggctccttgaggatttacattattccctgttagggttttcttggggtagtacgtgtcccgaacacttagatcaccattgggtctggtgggtcctaagtttctttgtgactttacatttttcttttcataactatccgtttggagtgctatgatatcaagtttcttgccatcaagctcctcatgtgttcgggggccaaaggaggtcctcacggcattggtgctccggtggtgcgaacctatgacagtaggtcccacaatagtctcttatattataacccttgaacttgtctcggcagttgtcgagcataggaccttggtcagatgtcgacactaattctactagaaacgtgtctcacgatctaatatttggaatagatttaaaactaaaatgtttcagcatgccaattacatcccaacatttagctaaacaagtttatataaggaatacatatatttactttctttattttaagtaaaacaataaaaagtgttatgcctgatatatattacgngaaaaaaataattactacaaaatatgaaagacatgacataaaaaatctacttgctntgattaagtgcaaaggtgca

SEQ ID NO: 38572 - DNA, 365 bp, Zea mays
  Clone ID: MRT4577_135181C.1
accagcaggatggtttttttttttttttttttttttttttttccacggcccacccaaattttacttttttttgggtaaagctttttgtttaaacagggctccttgaaaagggtgggcctggcaaaaaaaaacaccccccctaaaaaacaaaatagatgttgtcaggggctaacagttcgtctttcaggggaaaattccaggggcttaaaactttggcggagaaaacatcaggggggacaaaaaattggggggggttttttgctttccacccccccagttttgaagtttgaacacccccaaactccccagggtgggggggcccgttcaaaaaaacctttttgacgggggacgccatgaaaaatttt

SEQ ID NO: 38573 - DNA, 323 bp, Zea mays
  Clone ID: MRT4577_135182C.1
tttttgtttttgtgcatgttgttccgggaggtgttggcgaagcgcacacaccaacagtgttagttgtctgatcgttcacacagcctaaaaattcttaacacaggcggtgcaacggataagcaactaaaggtacgtggtaggcataaaggcgcaattcggtctggagctgggcagctattggtgcggactcatgtgaaggtacagttggcgggcatgaacgccaggcactggggcgcgcctgctttacccaccaactttgacgataatgtctggtcgtacgacgtctgtcggctcatgctcaagctgcacacgctactagggag

SEQ ID NO: 38574 - DNA, 501 bp, Zea mays
  Clone ID: MRT4577_135183C.1
aatgtataaacctattttttttataatatatacacttttttaattgtagaacccgcggagggacccggaaaagcccgaccgggacacggaggcacacacacactcccagaaagggaagccactgaaaggaagggaaagacaagagcaaaggaagagacgacgaaaaaatggggtcgaccaacaattccacccaagaaaaccccccgaaacaaaaagggcaaacggggggggcccaaaggagggggcaaaaaaaaaaaaaaaccctggggcaaaagggccggtaaaaaacgggaaaaaacgacgggccaaacgcataaaaaaaacgggcaaaaaaccgggaaaggcggcacgggaaaaaggccccagggggagtccccgctcaacaatttaaactgcaaacaccggagggaccttaaccaaacgccccggaaaaaggtgaacgaaaagggccacacgggctggccccacaagggaaaaacccagatggacgaggggaaaagg

SEQ ID NO: 38575 - DNA, 249 bp, Zea mays
  Clone ID: MRT4577_135184C.1
caactggaacctgacgcacgagatcagcgcgctgtctgcagtgaggtcaaggaacgggatgtatccggggatcgagctgcacatcctcgccggcgacggggatctcgacatcgccaatattgacgataaggtcatcgtgaatatcgggtcacggtacgacgtcgggaaccgtgatcacctcagacttcgacgccgttgcgcatggcaacaactactgcgtttgggagacgcatggtcggacagttcgag

SEQ ID NO: 38576 - DNA, 332 bp, Zea mays
  Clone ID: MRT4577_135185C.1
accacacgtgcggagcgagagggtgcactcagagagtggcgactatctagttgacatgtgtttctttcttctttttcaatgactgaggcataaaataaagagtctgcttttgctaggctgtgaacgttctgtgctgctctgtggtcaacgagtgaaattgacgtaccatgtcaaggtcttggttcatgattgatccggctgttgctgctagtactctaacggactgttattaatttgcaatgggccggttgacacgctacagttgtggttgtgcgtgaatgtgctccgccatgttaaactccatgctttcaatgtaccagatgatgcatgct

SEQ ID NO: 38577 - DNA, 360 bp, Zea mays
  Clone ID: MRT4577_135186C.1
atgacggcccgttacaatgggccgaatcacacgtgggcctctgagctggacgaggccgcatggtgggatgacgacgtcgcaggccttcgtctggtgccggttaaagcgaagggtgtccctgcccgctttgtctccgttgggccagcgactgcagcgaaggcctcgagcgaagggtggcgtctttgccttcgccccaacagtatagatagaaaagatgaaacatgcaaggcgccgaagaaggagaagcaatcaatggtgaactgggtgaggcattaccctcaaacaaggatagaaaaaggcttaaaagggtatgttcgaagtaagcatgaaggcaagggcatagatgtcgcaagggtttaa

SEQ ID NO: 38578 - DNA, 1789 bp, Zea mays
  Clone ID: MRT4577_135187C.1
cgcctcccctggcagattcgccaatcacaatcgagcttccagttggaggagatcggctacgtttcctgtaggttccaatggtgcagcttccgggctccaagaagcggcacgccgagatggccacggcggcgaccgtgaaggcggaggtggagggtttgggctgcggcgatggttctcctcacaagcatgtcaagccaatgccgcagccgccgccgcagccgccacctcccgaggacttgccctttgatgtgcttgatggacctagcccattgggtctgcgactaagaaaaagtcgatctctggtggaccttattcaatgtaagctttttcaggataaatctgcccatgaacagtttgatgggcacaacaatatttctgatacacccatgaagaaagaggttagatctggggctccaacagctggtgaacggatgaaagcttcaaattttcctgcaaatgttttgagaattggtagttgggagtacatttctcactacgaaggtgatttggtcgcaaagtgctactttgcaaagcataagcttgtttgggaggtcctacataatggtctcaagagtaagatagaaattcagtggtcggacattattgctttgaaggcaacctgcccagagaatgaacaagaaggggtcttagatctagtgttggctcgcccgccacttttcttcaaagaaactgatcctcagccaaggaaacatacactatggcaggctgcatcagattttactgatggacaggcaagctccaaaaggagacacatcttgcggtgcccctcgagtttgttaagcaggaattttgaaaagctcattcaatgtgatcaacgtctacgtgaattgagccagcagccagctgccatattgcaaaacccaggttttgaacctaagcgatctatttttcaaaatccaaatgaatcgaaggactgccttgatattggtggcttgaagtttgaacataataaagctactttgcccaagttcactgctcccctctcaacacgtgtcttttcatcactgtccaataatgttggacgaccaataaacataggatttggtgctggacattttgggggcaatgttcctgaagaatcaaagaattgcaatcaatggaatcaattgatagtgcctggattggaggcactgcaaggtgatgaaaggagtgcaggtggtcctcctttgacaactaacgatgcaatttccaaaaaagcctgggaagatcttgttcaacaccttttcagcgacacaccgagtctgccagccttagatgataataatttgacgtcaagggttgactccctttactcgttgcttgagaaagacacagctccacccgccatgcgcgaccctgaatgcagtagtgatggtggggacatcggcgcaatccaagtggattctgatggctttaaggggaggctcgacccatcgcctccaggaatttccagaaacgattctctcgatgagctgcttctgaacctccccaaaatagcttctattccacagttcttgttcaacaggacagaagattctgatgaataaagcgcgcagtcaacttgtggtcttcaaccctaggactaaagcagcaaattgtgaatatgagcaatgagtcagcgacgctaggattctattctacttcttccccgtagataattcagtagattggtgcagcaaaaacgtctgctcattatttcactagctgagaaactccacatgcaacattggaataacattttgtttacgtttggatggcattttaaatactactcttttccttgtcggat

SEQ ID NO: 38579 - DNA, 469 bp, Zea mays
  Clone ID: MRT4577_135188C.1
ccggccggatccgccgtgctccccgcactcataaaatcccgccgccgccgcatcgagactcccaggtaactcattagcgtccaccccagccgccgccatgaagcgcaacccccgagtaacgagctcccgccgaaagtgccgcaaggcgcacttcacggccccgtcctccgtccgccgcgtgctcatgtccgcgacgctatcaacggagttccgccacaagtacaatgcgcgttccatcccgatgcgcaaggacaacgaggtgcaagtcgcgcgacgacacctacaagggacgagaggtacatgtgcagcaggtgtaccgccgtcactgggtccatccacgatgaccgcatcacccagtcgagaacgtgaacgtctccaccgtgaacgtgttcatccacccttccaaggtcatggttacaaatctgacgctagacaaggaccgcaaggatgctcctcgaccgaaaggccc

SEQ ID NO: 38580 - DNA, 214 bp, Zea mays
  Clone ID: MRT4577_135189C.1
ccccctgcgccaacgcgcgtggtcgccccgtccgaaatgagtccagaggaacgataaggccccgccccaggagtcggagggcaagaagcccgcaggtggcaagccgaagacaagaagtgcgacgaccggatagctgaccgacaaggcggacaacgcggagctgatcgaccagactaactacgagaagatgctgtctacaggagaacatgtacaa

SEQ ID NO: 38581 - DNA, 491 bp, Zea mays
  unsure (1)..(491): unsure at all n locations
  Clone ID: MRT4577_13518C.1
gcgacgcacgagggcgagcgcgcggngttaaataaagagcttagngggggcgtncggaattatggngcgcgaggcggcagncacgaagccgcccaagctgcggaggggnctgnggtcgccggaggaggacgagaagctgnacaatnacattatccgatatggcgtnggctgctggagctcagnnccaaagctcgctggnccaggggggatggngaaagagtttttttctgagatggataaacnacctgcggcctgacctnaagaggggcagcttnnnccagccccagcaggatcccattgcnagcnctcacaagatactaggcancaggnggnttcagatctaccccgagccaccgctgaggacggacaacgagatcaaaaactcctggaactcgatgatcaagaagaagctccggcagcagggcatctgacctcgccacccacaagccgctcaacgacgacaacgttgctgctgcggcggcggcggacaa

SEQ ID NO: 38582 - DNA, 1690 bp, Zea mays
  Clone ID: MRT4577_135190C.1
cattgtacccctcgacgccggccgggcactcgacacacacacccggccgcacggcactcagcaccaattcgctggaggagaggaggaaccgtacgcgcctcattacgcccatccacgtgctcgcctctccccatcgcataattttcctcggcggcgtcgccatctcaccggcggcgggcctgcggccggcaaccggaggcgatggcgagctcgtctgtggcggcggacatggagctggaccgccccaacctggaggactacctcccgcccgactcgctcccgcaggaggcgcccaggaatctccatctgcgcgatctgcttgacatctcgccggtgctaaccgaggcagcgggtgccatagtcgatgattcattcacacgttgctttaagtcgaattctccagaaccatggaactggaacatatatttgttccctttatggtgcttcggtgtagtaattcgatatggattactcttcccactgaggtccttaacgcttgcaataggatggttagcattttttgctgccttttttcccgtgcatttcctattgaaaggtcaagacaagttgagaagtaaaattgagaggaagttggttgaaatgatgtgcagtgtttttgttgcttcatggactggagtgatcaagtaccatggaccacgcccaagcacacgacctcatcaggtatttgttgcaaaccatacatcaatgatagatttcattattctggagcaaatgacagcatttgctgtcatcatgcagaagcatcctggatgggttggatttattcagaagactatcttggaaagtgtcggttgcatctggtttaatcgtaatgatctccgggaccgtgaagttacggcacggaagttacgtgatcatgttcaacaaccagacaacaatcctctgttgatttttccggaaggaacttgtgtgaacaaccagtacacggtcatgttcaagaagggtgcctttgagcttggctgcgctgtatgtccaatagctatcaagtacaataaaatatttgttgatgccttttggaacagtaagaagcaatcttttacaatgcacttggtccggctgatgacatcatgggctgttgtgtgtgatgtttggtacttacctcctcaatatctgagggagggagagacggcaattgcatttgctgagagagtaagggacatgatagctgctagagctggactaaagaaggttccttgggatggctatctgaaacacaaccgtcctagtcccaaacacactgaagagaaacaacgcatatttgccgaatctgtcttgatgagactggaggagaaatgaagggacgtcaagccgtacaagtgcacttcgttagggttttacatgcagctaccttgtaattcggttggcttccagaaaaaaaaaagtgagcctgggacacgtcaagtgaccacctcagttttgttgtaaatttgttactagtttgataggattattagtatgtacttatcaggaaaagaattctcagtatgtgttttggctgcccattcaatgataggtcagtgattaacaccgaagcatggtgctctcgtgagatgctgtgttggtcttaatgtattgacggtactgtaccatggtttaaatgtgattattgaagcaatgtgaatggattagatggctatcaaaaaaaaaaaaaaaaaaggtgaattgtttg

SEQ ID NO: 38583 - DNA, 1019 bp, Zea mays
  Clone ID: MRT4577_135191C.1
ttggaaatggttgttttgatgaaacagagattggatgtgcatttcatcgccatgtgagctacgtcataacaaatgaagaagtcaagatgttgatgaagaagaactacaaatttaaatgggaaatgcctgctgtgggcattccaaggtccaaatgggttggaacaggtgaaaaagtgcaggaagcatgtgatgatcatcttcatgatgtcaaaggaaagttgagagaccattggcaacatacactctccgatcatttaaattctcgaatgaacttttactctctttgtaacagttatcgtgacataatgcattgcaataagaagccattttatctgaaaagtaacggtcctgattctagtaccatggacgcatatcttatgcatgctttgaatcatgttcataggacgcgagatgttgtaattagaaatgacgcaaagcttaggaatgacactgagagagatattacggatgataagacataccttgatcagggttttacacgcccgaaggttcttttcttgttgcctctcaaaagttttgcacggcgcattgtgaagaggttgatccagctttccccattgccacaaaaggatagtgccatgggacaatttaaaaaggagtttggtgaatcagatgacgaggggatacctgaacatagcacaaaacctgcagactttgacctcctttttgccggagacattgatgaccactttgtttttggcgtaaagttaacaaagaaatctattaagctgtacagtaacttctattcttctgatataatagttgcatctcctttagcgctgaaacgtaaaattgatggaggaggacatgacaagaaggattttgatttcctatcttcaattgaaatagtggttgttgatcatgcagatgtgatgtctatgcagaactgggaccatctggaggctgtgtttgaacaacttaatcagttgccatcaaaagacatggaaccaatgtgatgcgaattaagccgtggtacttggatcagcatgcacagtact

SEQ ID NO: 38584 - DNA, 241 bp, Zea mays
  Clone ID: MRT4577_135192C.1
ttggtcttacctaggaaaaggcttatgagagggtggaatgttaaaaggggtagaagatgattattctatagttcctaaaatcgaagatagtaaaagttgctagtagagtttcatattacaaaaactaagtggattacaaggataaaggccagacgacgactgctgttgtgtctgacggagcacaataacgatgagataccacctgcagtgtattatagtgggagcgacatatataatattg

SEQ ID NO: 38585 - DNA, 2199 bp, Zea mays
  Clone ID: MRT4577_135193C.1
gatccatccaggcatccacacacgcggccgagccaattccgctggagaggagtacacgcctcattacgcccatccacgtgctcgcctcgccccatcgcggacctttcctcggcggcgtcgccatctcatcggcggcgggcgtgcggccggcggccggaggccggaggcgatggcgagctcgtctgtggcgccggacatggagctggaccgcccaaacctggaggactacctcccgcccgactcgctcccgcaggaggcgccccggaatctccatctgcgcgatctgctggacatctcgccggtgctcaccgaggcagcgggtgccattgtcgatgactccttcacacggtgctttaagtcaaattctccagagccatggaattggaacatatatctgttccccttatggtgctttggtgtagtaataagatatggaatactcttcccactgaggtccttaacgcttgcaataggatggttagcattttttgctgcctttttttcctgtccatttcctattgaaagggcaagacaagttgagaagtaaaattgagaggaagttggttgaaatgatgtgcagtgtttttgttgcttcatggactggagttatcaagtatcatggaccacgcccaagcacacgacctcatcaggtattcgttgcaaaccatacatcgatgatagatttcattattctggagcaaatgacagcatttgctgtcatcatgcagaagcatcctgggtcgacccacgcgtccgatgaagactatcttggaaagtgtgggttgcatctggtttaaccgtaatgatctccgggatcgtgaagttacagcacggaagtaagttgtctttgaatgacaaacccatttattatgtagttcattttgttcagagaattactttgtcaggttgcgtgaccatgttcaacagccagacaaaaaccctctcttgattttcccagaaggaacttgtgttaacaaccagtacactgtcatgttcaagaaggtgaaccctacctccatttactctgtcatttgtgtgtgcgttggagggtattcttatatttgcttctctacctcggtcttcctagtagccaaacagtaatttaatgccagaaactagaagttagtcacagcatggcatttaattgcatagttgctgacttgctattgtttactatgacaatgtttttttttatttggtgtgttctgtagggtgcctttgagcttgggtgtgctgtctgtccaatagctatcaaatacaataaaatatttgttgatgccttttggaacagtaagaagtaaggaatacaaatgatgaaacaaatttatgtcatccacacttttctttggttaacatgattacctcacatgaaatgttttaggcaatcttttacgatgcacttggtccgattgatgacatcatgggctgttgtgtgtgatgtttggtacttggagcctcaatatctgagggagggagagactgcaattgcatttgctgagaggtaacatatatttttaattcattttattttccaagaaaggctgatggtactatgtctctttggagagaccataatatattatttcttgtatgattaattgcttcgaacagagtaagggacatgatagcagctagagctggtcttaagaaggtcccgtgggatggctatctgaaacacaaccgccctagtcccaaacacaccgaagagaagtgagtttgctccctcattccttcccccatttcccgagttgtgtagttccaaagtttctaaagtggtttccaatcttcaggcaacgcatattcgccgaatctgtcttgaggagactagaggagaaatgaagagacatcaaacactacaagcgcatttggttagtggtttaccgttcagctagctaccttgtaattcggttggcttcctaaaaaaaagtccgggacacgtcaagtgcccagctcagttttgttgtaaatttgttagaaatttgacagaattggtagtgtgaacttaccaagaaaggaagaatacccgcatgtgttgtggctgttcattctatgattggttaggaattgacacttgaaacacggtactctattcagaggctgtgtccgtatttatgaatcgacgatgtaatggtttaaattcatgtgattattgattcaataatatgagtagattacatcatcaaaaaaaaaaaaaaaaaa

SEQ ID NO: 38586 - DNA, 376 bp, Zea mays
  Clone ID: MRT4577_135194C.1
atcatctctttcttatcagagaagatgaggtttcagtatggtgctactggttcctcatgtatgtgggctgcctcctaactcgtttagtggtagcactaaaggtgatgttttgtaagtgaggtgtggtatcattgtttgagccttggctagagaaacttacaaatgtgcaagcaagaatgggtgaagcatttagtttggtgagagctggtgctgagcgaatcacttgtccttgaagggattgctatggggtagctgacttgtctgtggaacttccctatagtgacatgcagtcaatacttgcatttttttcaattttcctgtgtcccagttcgatcatttgaatcaaatcactcttttttttaataaagtgtatttc

SEQ ID NO: 38587 - DNA, 626 bp, Zea mays
  unsure (1)..(626): unsure at all n locations
  Clone ID: MRT4577_135195C.1
tactattccaagatagcaaataagacgacttgtttcattgattcttcaagagatcgagcttcttttgcaccactacgtctaggatgtcttgcagctgcggatcaagttgctgctgcggctcaagctgcaagcgcggcaagaagtaccctgacctggaggagacgagcaccgccgcgcaatccaccgtcatcctcagagtgatcncggaaaagaatgcctcacccgacctcgtcaatgcctcggcggagacctgagaggcctcccactgctgctcatgcggtagaggctgccagtgcagacccctgcaacatgctgatcacatccatcgacgaccatgttatatgattattatctatctagattgtggccgctgcctgaacaataataagcgaggcccagatgtctgccatacatatagtattgtgtgacgtgtgtgtgatagacagagaaacatatttcttcagtttgatatctctctctgacactgattgctactcagactttgtgctcatgtacgagtgcctacatgcatgtctggttgatccgattgcgtctgctgtaaccatatattaactgtgccgcgaagatatgactggatactctatatatgagaaaggctacttttg

SEQ ID NO: 38588 - DNA, 200 bp, Zea mays
  unsure (1)..(200): unsure at all n locations
  Clone ID: MRT4577_135196C.1
aagcaacncganncagccgggaagcanagaagaaccacagggacacaacacagggnggagcaacggacagaacggcagaaaagggaacaagaggggggggaagcaanaaagngncnncgaagaagacgggaggagggggggggggnnnnanggcngcnngcangggagcaacaaggcgagcggcagccggaagggcagcc

SEQ ID NO: 38589 - DNA, 294 bp, Zea mays
  Clone ID: MRT4577_135197C.1
gcagcttctgcttgctctggggggaaggagagagagagagagcgagagagagatctagtagagaggctagtaggtggtcctcgaacgaagatgttggcggtgttcagcgggcaggtggtggaggtgccggcggagctggtggcggcgggcagccggacgccgtcgcccaagacgaaggcgtcgcagctggtggggcgctttctggccgcgttcgagccggtcgtgttcgtgcagcttggtgaccacggtcaccttggctacttccacaccaaccaggcgcttctttcgcccaag

SEQ ID NO: 38590 - DNA, 397 bp, Zea mays
  Clone ID: MRT4577_135198C.1
ccatatattggagaccatgtccagtttagcgggtattggtgtattccctcttaaaaagaaaaaacgaccccaaatggggccaattcaaattttaaccccaaagctagggctatagggacccactattaaaggcgttcaaggatttttttttgaaccatgcatcaaaaatctgggcgaaaaggcccctgaagttaattttggctataatacactgaagaaactccaacggttgtttttttgcaggctaggcaattgaaattcacttggaaaacatttgtaaagataccatggcaactcttttagaccacaaatttactccctttcactcttttcctcgctttcttcgccctttttgaggtttaggggggtaatatcttttttgagagggggtaagaaa

SEQ ID NO: 38591 - DNA, 403 bp, Zea mays
  Clone ID: MRT4577_135199C.1
gagggaatttaaattaaggtttttcaaaccctccacccccggggggggccccggacccaatttcccctatagtggggttaattaacggggggttcctgggcgggtttttaaaaaggacaagcttgggaaaaccccgggggttcccaattttaatgcctttgcagaaattccccttttcccaattgggaaaataaagaaaagggccccaccgaatggcctttccaaaaggtggggaggccgaaagggcaaaggaaatttaaaccggtaaaattttggtaaaattcccggtaaaattttggtaaaacacccccttttttttaccaaaagggccaaaaccggaaaaacccttattaattaaaaaaaaaaaaccgaaaaaggttggagggtggtcccagttggaaaa

SEQ ID NO: 38592 - DNA, 241 bp, Zea mays
  Clone ID: MRT4577_13519C.1
cccacgtcgtacgcccagcttccgcggagcatatgctgagcgaaaataaagacgtgaactgttagtgttttgcgctcctcatattgacgaaaagctgttggtataaatataataagctatcatttggtgctatgattctttagcaaggcacgatttacgcactagaaaactgtcagtaaagattatccccttccaagcgcgcggttaggtgctccaatcgctttcaaatgtaaggacagca

SEQ ID NO: 38593 - DNA, 280 bp, Zea mays
  Clone ID: MRT4577_1351C.1
tataaagatacagttgtgttgaactgatggtcttgaacgctatacgaccataatgaggcaggtgctaacgtggagctgatggcaggatctgagtgtatgatgttactgaccacgatagctataacaatgccatgctgagtactgaatgaagtttataggaatgccgatgaatgtgtgacacaagctttagtgtgtggacaagggtgacctgcctaggaacagagtatttacttacaaggctgtcctggtatttgctgatgacatggcattaccattcctt

SEQ ID NO: 38594 - DNA, 831 bp, Zea mays
  unsure (1)..(831): unsure at all n locations
  Clone ID: MRT4577_135200C.1
aatacacctcgtcttgttcccgacccaacgcgccgccgccgagggaacccctcgcgttgcgatgtcgtcaacggagatgcagatgcgattctgccggggatcaggggaaacagtggattcgtttcacgcctcccgctaccccagcccttccacggaggatccggcttgcctgctccctcgccgtgctcccactccatcctacgcttccacggaggacctaggggatctccatgattcgctggaggaggtggatgtagtcgaactcgacccccatgaccagccggcgcgcatggtcgcagatcctggtcagattgcctggcatgccctggacctcaagttcccacgcgaggagagcgaatcagactggagcgactggagcgagggcgatggccgactgattgacggggaggagaaagattgcccagggaatgaagtagtcgatagcgatgatgatgatgatgacgacgacgacgacaactgcaatgttcaagtcgtttacgaggacaaaagcccaaacacgaagataatctgcccaggaaagctctatcctgagagcgaagcagaggaaattgagctggaatggattgagagctactgcaagcagatgggagaatactcggaactgtttgatgacattctggcccgggaggaccacgacgattttactactttgcctccttttcctatgaaactgctccctcccacaacatctctatgcttcatggatggcgggtactgctaccacagtctttacaagacccatgatacttctaccactgcatcaactcttggatatcgcacaccgcaacagatgctacagntcttttcgat

SEQ ID NO: 38595 - DNA, 471 bp, Zea mays
  Clone ID: MRT4577_135201C.1
ttttttttttttttttttttttttttttttactgttacctcttcatcttattctgctgtttattgaaataaataaaagctgaagaaagcttgtttcatcttaagttgctaaagttccaaataaataaataaattaaatagatataagcggatggcaaatgtcgcgaacacatccgacatcttgtatgtcatgaaaatggaagaaggcgctacaactgaactgctgaatgaagcaaagagaaaaaaaaaaagaagaaagaaacaaagagcttctctagggtcaagtcatgaatcgatgtcaagttggccctctgaaagaacagcgggacaaggtgctgcttccacaacaaagaagagaagcgagcagctggcctatcgtcgcgggagcgggaagggactggtgattaacaaaatgtaacggctcagctcagctggggattagtagatcaggtcagctgaaaacagcccgggg

SEQ ID NO: 38596 - DNA, 159 bp, Zea mays
  Clone ID: MRT4577_135202C.1
cgagcaccgtgccgctcggtcgtggaacgagagcctccagcaagtcacgcgtgactgcggccacagacctgctcgatcgatgaacgagagtcagcactcggagtgtcgagacttatcccttgctctttctttctgtctactttttccttcccggaggcg

SEQ ID NO: 38597 - DNA, 442 bp, Zea mays
  unsure (1)..(442): unsure at all n locations
  Clone ID: MRT4577_135203C.1
gttgtcagacgcgaacgccttatggccgaaacggtagactcgccccggtcagatgtgactctccctgtcagcgcgtggttgctcagatctagtaggtgcgacgccactggcctacacacgccggctccggtgtgaaccttcatgacgtctgcaaccactcttcgatctgctggcgtgacctcatccagccgtgctgagggagcggagcggggatggctacagctctgattggcaaggaacgaagcatgcccctctcatattagcgtagatgcgttgatcggctcattctacagaatgactctccaataatgatgactgctatacgtattaatgtttggttagagtaggcatgtgcaacgaaagtcacaagaatggtagaactcgtccatgacttctgtatggtagtgctcctagatggtatgctgcnaantagagagttacc

SEQ ID NO: 38598 - DNA, 310 bp, Zea mays
  Clone ID: MRT4577_135204C.1
aaatgaatgcatattgcaaaatactgacaggtctaaaccatagacacgcaccacgaggtttattctagtaacaggatcaaggcactactatcctaaatagataagccgggatacacaggcccaccggcacaaatactatcaaatgactccatttcttcgccgagactcaggacttctgccactgacccttgctgaatggcataaacccctaacccttcaccaaccaaatgctgggaaccagcgcacctggcgcctgaacgcaaaaaccactggcctggagatgacagccttacggggggaggattgccat

SEQ ID NO: 38599 - DNA, 286 bp, Zea mays
  Clone ID: MRT4577_135205C.1
ctcaggcccaagagtggtctgcgcacagggctgattgtatccatggtggtcgggtcagtagcgttggctgccgtgatagtgatactggcgctcctatggcgatcccggacctggagaggtgtatttacttgcagtcgcagagagtttgaagcaggaggttctctcgcgttctactcttacgcgcagatgaagaaggctacaaggaacttctccgacaaactcggcgagggagggtttggaagcgttttcaggggaacaatggcaggaccaaccgccgtcgccgtga

SEQ ID NO: 38600 - DNA, 716 bp, Zea mays
  unsure (1)..(716): unsure at all n locations
  Clone ID: MRT4577_135206C.1
tacgcctgcaggattcggtccggaattcccgggtcgacccacgcgtccgagtaaccgtttcccgcagccttgcaagcctccgagccatggcgtgcgccgggctgcttactgtgtgcctgctcgggccacctgcgccccagcagccgcgacactctgcgcctgccgcgggacacgcgcttttccaggacgttttccgaagagcagacaaaaatgatgatggtaagctctcgtttgaagaattccagaattactttgctgatggggttctcagctctgcggagctgcgggaactgttcagcggcatcgatgatcatcactgacaatttagagacagagaaactgtgtgactacttctccacacacctgggtgtctaccggcccgtgctggctgcgctggagtctctgaaccgtgcggtgctcactgccatggacactacaaagctggagtatgaacaggcctccaaggtggaccagtttgtcacacgatttctgctgcgggagactgtcaatcagctacaagccctgcagacctccctggagggagcatcanacaccctggaggcgcaggcccatggccagcggttggatgaaaaaactatcaaagcgcagagtaggccctgtggcagncggagggcaggacgcagagccctaaggagcatcagttggtcaccatcctggtctgctggatcctctgatacaggagtcctggctgatgt

SEQ ID NO: 38601 - DNA, 1824 bp, Zea mays
  Clone ID: MRT4577_135207C.1
ggagagaatgtgacagccactgattgtattccagagatcattacacttatatacaagtgaaggagcgtatcccaaggagtgtgtccctttgagaaaactgttacaccccttggattgatcacatatgtaatattttgtaacatatagaatcggacaacaacctccaatcttagcatgtggtcgagacattatttttagcgatgaccctgcaagcacgtcgatatgcttgaactgcttcctttggagcagagggtttcccattcgtggcaagtgctgtaagtcacgagctcccagtcccaattcgaaaagtcggccgcttttttttttttttttttatgcaatcataacgattcagcactcacctgaaatagtatcacaaacctaccagcatttggagcttatatccccatctgcctctatgcaaaaattcatacaacatagatcaatcacttcaggacaaacataagtccgaccaagactggtgtatgacaatttgacacaagtctaataagggaagcagacaacctaccttatgcgcctgaatgagtacaaatccgtagaacaggaatagaaatggtttctcacaggcaacaatcacagtaagaatattagttgctttcagtatggtcgggaacgcgaaccaccaccctggtttctattgggtccatggcccccaccatctctgtaattatccctgcgtccacctccaccatatccaccaccgcggccaccgccatgaccataagagggtgctgctctgggtgctgatttttcagccatcgcaacgctgattttgtagcctctcatgtcataattattgtaaaatccaccagctgaatgagcagcagaaggatcttcataggcaaggcaagcatctcctttggcttttccagagtcatcagtgtagatttttatgttccagggccactgatctttgtaaccacgtttttgcttgatcctcccaacctggccgattcctccaaatagctcctgtaattcctcaacagtgacatcaggaggcaaatttgatatgtaaatccttgcattgtcacatgtctcgtcacaattttcatcacattgcttgacttttccagctggttcaggaccagcactaccagtataaccactggcgccgccacgataaggtggcggtgcacccccagatcctccacccccaggcatggactgaccaccatatccaccagcatatgtaggaggcaggccgccttgcccccctggggcaccaccatattggtgtggaggcggggcaccatagcttggtgggtatgagcctgggccaccactgtagctattaggaggcggcactgcagattctgaaccatacgcattgttgcctccataagagctcgtaggtgctgcatagtcacctgcaggaccaccataggaaggaggaccttgaggaggagtttgtccataaccaccagcattgtagccaccttcactacccttttggttctcctggtctcgtcctccatagctgccacctctgccaccacggtggtcatcaaaaccacggtcactaccaccactttgattgtatcctcctctgcccccgcctccaccaccacgcccaccagaattgtagtctccgccatctctgtcgaagccaccacctcctccagaaccataatcaccactgccacggttgtatcccccaccacctccaccagacctattataacccccaccgccactgccgccacctccacttgggcaaggtgctccacacttattgcattcagtcctcctcgcaaaattcacattaccacaactcgcgtcagggcaaacccaatcgccttcgcg

SEQ ID NO: 38602 - DNA, 538 bp, Zea mays
  unsure (1)..(538): unsure at all n locations
  Clone ID: MRT4577_135208C.1
aattcggcacgaggcacacatgcgcggggcaagcgcactctagcaatggcttgtgaggttgtccgccctagcgacgccgagctactaaaggcacaagccgacatatggcggctcagcctctcctacctcacgcccctgtcactgaggtgcgccgtggagcttggcatctctacggctatgtagcgccaagttgngtggntttagccgcngagcnggacacggcgcngacncggcgggggcacaaagcngccggcccgccgccgccngcngcggcaccncgccgcgncgggcgnnggcaccgncgacaagcagagcacggaggaggagncggaccgcancagccccgggnccgaccgccgggnggacggcancccgcacgaggaccacangaaccacaccgcgcnggngcacaccggcaccgcgacgcgcgacagcgaggcggagaaagggccggcggaggggnncaagagggacgngggcacgacacccgggcgaggagcngcacggggcgacncggnaccacgagagcanggggagc

SEQ ID NO: 38603 - DNA, 615 bp, Zea mays
  Clone ID: MRT4577_135209C.1
cgttattctaattagtttttgattcgaccataaaaccggccggccggatatccaccatacgaagatttgaaatgttcaattggcagggaataaatgagtacttctactacatctttagaaagccaaactttttcataggggttgagcgaacgacaaggcccttagtccaggtcccgagttgatgacctccgaacagacagcagcgagcatgcatagaactgatgcatcatgtacgcaatttaatcgcagtccaccaatcatattctaggatggtttggacggtcgaacaacctgttatacgttgtagtagcacattacttgcgcctgaagaaaataggaatccttatattttctgccactcccgatgtggacaccatttttaatccaatcttctctatgaatccacgcatccttaccaatatcaaggacgcccaaaatcactccacctttccatggaacaaataatggataagtcctagattgcaacacctgaactttctcaataaattggtttgctgaaattttagtgcgaaccctttgctccagcacttgtgcaaggccagctgtataagctgcaccaccaaccaactgaatgctaccaaacagcttcttttg

SEQ ID NO: 38604 - DNA, 784 bp, Zea mays
  Clone ID: MRT4577_13520C.1
gtactgccgtggtgtccctgaccccaagatcaggatctatgatgttgggatgaagaagaagggagtggatgagttccccttctgcgtccacctggtgagttgggagaaggagaatgtttccagtgaggctcttgaggctgcccgcattgcttgcaacaagtacatgaccaagagtgccgggaaggatgccttccacctgagggtgagggtccacccattccatgtccttcgtatcaacaagatgctttcatgtgctggggctgatcggctccagactggaatgaggggtgcttttggcaagccccagggtacctgcgctcgtgtggacattggtcaggtcctcctttctgtgcgctgcaaggaaagcaatgctaatcatgctgaagaagccctccgccgtgccaaattcaagttccctggccgccaaaagatcatccgcagcaggaagtggggttttaccaagttcacccgtgctgagtatctgaagtacaagagcgagggtaggattgcacctgatggtgtcaatgctaagctgctcggtgttcatggtcccctctctaagcgtgccccggggaaggcattccttgcagagaacattcaagcgtctgcgtagacttatccttctgccaattggaactccagatattcaggatattctgcttagtctaattttctatgctagaactttgttaatggctattgcttgcagcatgatctacttgtgtagcccagtttcatatggtggttaaatattcataatagattgtttgaacccttactatgt

SEQ ID NO: 38605 - DNA, 2409 bp, Zea mays
  Clone ID: MRT4577_135210C.1
ccacgcgtccggagacatttgtcagccttagaaataggcggcgccgaggtcgggcccggctattgtatcggaaccatgaaaacgttgtgttgccaaagttatcgttgtcttctctagcgacggcgaggcttgagcgctcacgtcccggcgttcccgtgccggtggccaagccagcagccgacgagatggactacctcaggacggtggttccgtcacaactcttggcagagcgcggctccaatcttgtcgtcatcaacccaggatcgggaaatgtgcgaatggggtttgctagtcaggatgtgccattcaatataccacattgcattgcccgacacatcaatccacaagagggcgaagaaccaagattctctgtgcgcgatcagatgctcaactgccatgctacttcatcgcagaatgcagagcgggagagtgcatatgatattattgcagcactgatgaaaatcccatttttggacgatgaagaaatgccttcaccgaaccaaccccttcctccaaagatgggacgtgttgatggcttctcttcgcagcaaaacagagacgataataaattcacttggacagatgtgtcagagagaattattaagccatccacaccattcgataggtcagtatacaaggatgctgaggaagatactctgccaagcacatctgatgatgataatggacaggactttaaagagaataagtataaagaaatgatatttggagaagatgctctgaaaatccctccttcagagtcatactgtctgagtcgcccaattaggagaggccattttaatgtgtcccataattattcagtgcatcaggttttagaagatttacgcactatttggaactggatactgacagaaaagttgcatatcaacccaagagacagaggtctatattctgcaattcttgttcttggggagacatttgacaaccgagaaataaaagagatgctgtctattgtccttcatgatttggggttcagcactgcagttgtacgtcaggaagctctatctgcagcgtttggaaatggtttatctacaacttgtgttgtcaacattggggctcaagttacacaagtagtttgtgttgaggatggagtagctttgccccacacagctctggcgcttccatatggtggagatgacatctccagatgcttgctttgggttcaacgtcgccatggcacgtggccaaacttccaaactgatccaatgagcaatcctatagatatgctaatgctcaacaaaatcaaagagtcatatagccaaataaagactgggagcattgatgcagctgtccttgttcattcatatgataatgaaaggtctggtggacatcagaagacaagactatcagctattaatgttcctcctatgggtcttctttacccaagggttcttgttccagaagagtaccctccacctcctcgatcttggttccaagactacgatgacatgctggaggatacctggcaaacaagtgatggtctttaccctagtgggaatggtgggtttggcatgtgggacagttatccgatgtttcccactagattaaagaaatttgataacattggcctcgtagaggccattattagtagtgtactttcaacaggacgtgttgaccttcaaaagaagctgtttggtagcattcagttggttggtggtgcagcttctacagctggccttgcacaagtgctggagcaaagggttcgcactaaaatttcagcaaaccaatctattgagaaagttgaggtgttgcaatctaggacttatccattatttgttccatggaaaggtggagtgattttgggcgtccttgatattggtaaggatgcgtggattcatagagaagattggattaaaaatggtgtccacatcgggagtggcagaaaatataaggattcctattttcttcaggcgcaagtaatgtgctactacaacgtataacagtatcttatttccgagctacacacgaagacttgcacttatacaggttgttcgaccgtccaaaccatcctagaatatgattggtggactgcgattaaattgcgtacatgatgcatcagttctatgcatgctcgctgctgtctgttcggaggtcatcaactcgggacctggactaagggccttgtcgttcgctcaacccctatgaaaaagtttggctttctaaagatgtagtagaagtactcatttattccctgccaattgaacatttcaaatcttcgtatggtgttaatgaaaaatctgatgtttggattcgtatttatttccaatgataatgtatatgtgcattctcgactgttttggaaagaatgaaaaatcctcgtccgtttgcgtatcggggggggggggggggggagggggggggagaaactcgagggggggggcccgggtaccc

SEQ ID NO: 38606 - DNA, 241 bp, Zea mays
  Clone ID: MRT4577_135211C.1
tagaagatccaggctacggagtacatacacacttaactgtgagcaccgccgcatggtgacgaatgcgctccacatctctctcgcagctgtagatctcacagagaccggtatcacactgacctggacggacattgacaagagacctaccatgccttcagatagatgaacaggacccatcttgccatcactcccatgagtgattttcacaaatatgatatcgcaaacggtgactacttgatga

SEQ ID NO: 38607 - DNA, 2166 bp, Zea mays
  Clone ID: MRT4577_135212C.1
attcaacgatgtgttgccaaagttatcgttgtcttctctagcgacggcgaggcttgagcgctcacgtcccggcgttcccgtgccggtggccaagccagcggccgacgagatggactacctcaggacggtggttccgtcacaactcttggcagagcgcggctccaatcttgtcgtcatcaacccaggatcgggaaatgtgcgaatggggtttgctagtcaggatgtgccattcaatataccacattgcattgcccgacacatcaatccacaagagggcgaagaaccaagattctctgtgcgcgatcagatgctcaactgccatgctacttcatcgcagaatgcagagcgggagagtgcatatgatattattgcagcactgatgaaaatcccatttttggacgatgaagaaatgccttcaccgaaccaaccccttcctccaaagatgggacgtgttgatggcttctcttcgcagcaaaacagagacgataataaattcacttggacagatgtgtcagagagaattattaagccatccacaccattcgataggtcagtatacaaggatgctgaggaagatactctgccaagcacatctgatgatgataatggacaggactttaaagagaataagtataaagaaatgatatttggagaagatgctctgaaaatccctccttcagagtcatactgtctgagtcgcccaattaggagaggccattttaatgtgtcccataattattcagtgcatcaggttttagaagatttacgcactatttggaactggatactgacagaaaagttgcatatcaacccaagagacagaggtctatattctgcaattcttgttcttggggagacatttgacaaccgagaaataaaagagatgctgtctattgtccttcatgatttggggttcagcactgcagttgtacatcaggaagctctatctgcagcgtttggaaatggtttatctacaacttgtgttgtcaacattggtgctcaagttacacaagtagtttgtgttgaggacatctccagatgcttgctttgggttcaacgtcgccatggcacgtggccaaacttccaaactgatccaatgagcaatcctatagatatgctaatgctcaacaaaatcaaagagtcatatagccaaataaagactgggagcattgatgcagctgtccttgttcattcatatgataatgaaaggtctggtggacatcagaagacaagactatcagcaattaatgttcctcctatgggtcttctttacccaagggttcttgttccagaagagtaccctccacctcctcgatcttggttccaagactatgatgacatgctggaggatacctggcaaacaagtgatggtctttaccctagtgggaatggtgggtttggcatgtgggacagttatccgatgtttcccactagattaaagaaatttgataacattggcctcgtagaggccattattagtagtgtactttcaacaggacgtgttgaccttcaaaagaagctgtttggtagcattcagttggttggtggtgcagcttctacagctggccttgcacaagtgctggagcaaagggttcgcactaaaatttcagcaaaccaatctattgagaaagttgaggtgttgcaatctaggacttatccattatttgttccatggaaaggtggagtgattttgggcgtccttgatattggtaaggatgcgtggattcatagagaagattggattaaaaatggtgtccacatcgggagtggcagaaaatataaggattcctattttcttcaggcgcaagtaatgtgctactacaacgtataacagtatcttatttccgagctacacacgaagacttgcacttatacaggttgttcgaccgtccaaaccatcctagaatatgattggtggactgcgattaaattgcgtacatgatgcatcagttctatgcatgctcgctgctgtctgttcggaggtcatcaactcgggacctggactaagggccttgtcgttcgctcaacccctatgaaaaagtttggctttctaaagatgtagtagaagtactcatttattccctgccaattgaacatttcaaatcttcgtatggtgttaatgaaaaatctgatgtttggattcgtatttatttccaatgataatgt

SEQ ID NO: 38608 - DNA, 706 bp, Zea mays
  unsure (1)..(706): unsure at all n locations
  Clone ID: MRT4577_135213C.1
cggccgcgtgggcggacgcgtgggnaaagcaccaaanacccatcaactcaatctggacacaacaatttatcttaggcaaccggtcttgtaagtgcaagtttctgtcctttttttctagagatggcacccgtggagccccttccggaggctcccaacgacggcaggcccatcgtgtgccccatgtcagacttctgccctctcacgatcgatggggtgctgaaggagttgttcctagagacattacgaaagaagcgaagatcgagtggcttgcgagcaaaggagcttggcaggaaggccatgtacctaggagtgccattcgtatgcgagtgggttaggaacaagagtcattcatggaagtcacagatcacaacattgaaagcagtcgatgctttccaggatcatacaaaagccattaagttgcttcacctggagtcatgtcatctttttctgtaactatggggaatttggtcgtcgatgtgggtcaacaagaaggcatagcatgtgtggttagaagcagtatgacgaacctaaagtatataatcaaaatttctggacggggccgacggcacgagcgacgctcaccggaccttacctccccttcgatatgtactgtggcggtttttatgtgctcgtgtggcgtatttataataatattacatatttattagtgttacgatgatatttgccaatggatttttccatattg

SEQ ID NO: 38609 - DNA, 319 bp, Zea mays
  Clone ID: MRT4577_135214C.1
ggagggtgcaaacagtttattttgcagccatttaatatatacgactaatgttgcactaacagaagtattacatgagagaatgcaaaatacgactttacagagtaaaaaaaaacataaaccataaaaatatgaaggtttcaactttttcggaacatcactggcaaccccgaaggcaaggtaaacaaaagcaaggagggcagctggtgtgcttgagaaccatgaggaggggagacgttacgccatgcatggtctaaaaagctttgtgcacgacaagactcctgagatcatgcctgcagttaacaagttcttcactgaccct

SEQ ID NO: 38610 - DNA, 2705 bp, Zea mays
  Clone ID: MRT4577_135215C.1
gttgtgggtcgtgggtcacggaacaggattatcttcagcgcctagaccccagctggagcaaacacggagtcgaggaagaaggccaagaaggcagaggaggagagggacgctgagctagcttcaggactgcgtgtaatccagaaccccagagatgagatggcgcctgtggagccccttccggaggctcccaacgacggtaggcccatcgtgtgccccatgtcagacttctgccctctcacgatcgatggggtgctgaaggagtcgttcctagagacactacgaaagaagcgaagatggagtggcttgcgatttctgcactgtgaactgattccacaattctactagcttttcagttgcagaaattacaggcgggtccttgtataggggatatatcatcatcatgtgctctgcaaacatggaatgtcagcattcagcaacagaaaattccaacagtgaaaaggtcccttctgggactggaaaggctatacttagagtgcatgaggtgagttgatatcttgtctttacgttaaaaaaattgatatcctgccttcctattgcactgccttgtcaaaaaagaagctttgtagtgtgcaaattttgtcaaagactgactatattattgttttttaaatgtattaaattttattatgatctcccataatagttatgagattatgcaagcaaacataccatgaacaatacactttattcatagaacccctcagttttaaatttgtttttgaaagatctagaacctttgattctagcttatattaataagaagaagaaaattgccccagtttataggggaaactgggttagtttaagtaaagcactagaaaattattctctgtatctcaagagcagttgttcttgagaccgtgatagtttatggtaggtaatcttcagatattttaatacatcttcaaaggtctggattggaaacagaaaccatgttacatgtcataactcacaaggaccatacaatacattgtagatggtaacctgaatgaacatcaaaaaacacagtaacaaagtagtgctaaaaacactttgtctggatttgctcagtttgcgaacacaaagcatagaatgatttcccatgaataaattggttggtcaatcacaacagattgcctaagaactattataaagaagaactgaaaagataaagggtagaaatatcaccttcgcattgaacctcaatgagctaatgtaccccttgacatcatttgataacaagtagttggggtccaggttaaaataacttgaagaaattttcttccatgaatttctctgtgatcaaattattccatagatacttgtaacgcattagttgaagcctaccataatcagatgatcatctatcatatagacttcatagatcatactaagataatcgtctatcatacaaacttcatagatgttatcgctctcaatgtttttccaattgcattataccatcttgccacttgtttgctaactgctctggactcaaagttactgctgcagtaacggtcaaactctttacacggcaacaccacttgcatgtatataaataggatcaatctatttttgatccggccctgttattgatttattttgcatgctactctgatttggtcagaaaaccatcactgagaaaaattctgtgggcatgttctttctaagctttcctgtgcatcgatttgaacaaaataattcagtgagtatacaaattaatgcctttttgcctcttttgtttttctttttgtttatttttacaagcttctattaatactaggttgttgctgcaaaggaccctaacaatgctttctttaaaagatgcgatggttttcaaccttgtgaagtaaatgaaccgaaagcaggaacccattattttgccatatatgcagaagctacgaagtgtggaggcaaaaacaatctgctctgtctaaatttgagtctgagtatcaagaggttttggcaaagttcactgagatgactaccagatatactcaagaaatgcaaacggtatgtgcatatgtgggcgaccgccgataatgccctgcaactgtaatttcttttagaaagatgatactgagattaatgttgatgttgtggctccggcacctcagattttaatcaaacatggtctccctgggattgaaatatattgtcgtacaccttctaagctgctgcatatatagactagatgtcatcttcaaggactgctttcttcttgagattgtacctgcatttaggaaactgcatatatagactagatgtcaccttctaaactgcagcttcggaacatgatcttatgtttaccgcagcagtcgatgctttccaggatcatacaaaagccattaagttgcttcacctggagtcatgtcatctttttctgtaactatggggaatttggtcgtcgatgtgggtcaacaagaaggcataggtaactctgcattttccctcacattagtttttcttgctattgcatgtacttgaatcaatcatgtcccattaattttttttgaagcatgtgtggttagaagcagtatgacgaacctaaagtatataatcaaaatttctggacggggccgacggcacgagcgacgctcaccggaccttacctccccttcgatatgtactgtggcggtttttatgtgctcgtctggcgtatttaccataatattacatatttattagtgttaaaaagggagggg

SEQ ID NO: 38611 - DNA, 347 bp, Zea mays
  Clone ID: MRT4577_135216C.1
atagtatgcctagataacttaattgcccagttaccaaaggctgctgatgaataacaaaagcccaccacgccacaacatatgaaacggaacatctgactagctactgccttttacacggagaggacgagcgatgtgaaacctatgcagctagcgaaaactatttatgctcacaagggcctcctttcacatatcaactattcagctttcttcacttttgacaccaacatttgaacaaaccattggatacgatcggttgcctgtcctagttctttcagtgaactgtccacgccatcatctgacttgggagggttggagatcaacatgccatggatgccggactgtaataa

SEQ ID NO: 38612 - DNA, 456 bp, Zea mays
  Clone ID: MRT4577_135217C.1
gcgggacaactgcttacatacatgcaacgatatggaaaaacaatattacataataaattctgacagaacaatatgggcctaaagtaacactatggaacaaagccggcaaaaagcggttaggaaaccgactagggggaggaacaaaacagcagtttgccaacatatcatctaattgtcatttacctcgacaaaagcctaaaatgggacgacataaggcagctgggacatattaagggccgggaaaaaagtagccctgggatacaaaaaagggttaagctgcaccattggatggatcggccctgaactatcaacagctgtgattaaaaacatgaaagcatcggaatttcttttactgttgaacaggcacacttaatcaccaaaatctgaaccttaattctatatcaatacccgattccatgaaacaaacaaatctctgaacatcttatcttttttcta

SEQ ID NO: 38613 - DNA, 658 bp, Zea mays
  Clone ID: MRT4577_135218C.1
caaaaagacatatgcttgtattaaatattaagccatagctgctcatttatgcacctcatggtaactgataaactgcaactggctcacaaactgaggcatggtgttgaaggctgggtgctgcgctacgtaagtatcacactcgacactgaaatgctaaacagagtcactcgcccgcgacaagcacacccgtacgttcctgcggaggtgggcgccactttattaagaatagaacggcctccacgacgtgccttcgtaggcccgccggatcgcgatccattcatggatcactcacacggtatcgcacggcgcttcaacccgaagacccatcattgaaactgctgacctcataactctacaaccatggatatgatcctaccatatctatcgtacgggggacgggttaatacagtaatcaatccaggccgagcagcctgcacaacatataccacatgcaatgaatgcagaaagagagacaaactacccaattctgacacgctatatgtatctacaataaataacaataccctttcgcgctcattgtctgacaattggaatgagtacaatctaaatgcctcaactaggatccattgaacggtaaatctagtgccacacagacgaggtgattccagctccatagcgtctatttaagttgttgcag

SEQ ID NO: 38614 - DNA, 444 bp, Zea mays
  Clone ID: MRT4577_135219C.1
ctctggtgctggtgctctccgagcccgagctccgagggccgtatcatcatgctaggcccccctcacgtgcgaccgagatgtcgctaccacatcaagggaccgttgattaccccagcttcaagctagtaatcttcggcgacggtggaactggtaaaactacatacgcgaagaggcatctcactggagagcttgcgaggaaatctgaaccacccattggagcggtagttcatgcgttggatttcaccactcactgaggtaagatcaggttctactggtgctatactctaacgcaagaaaactgtggtggcactaggaatgggtactatatcacatggccagggggcgatcatcatgcgggatgtaacctcatggcttacttacatgcaagtacctacgtggtataaggacctttgcaggcaccgggaaaacatcaccattgcttct

SEQ ID NO: 38615 - DNA, 716 bp, Zea mays
  Clone ID: MRT4577_13521C.1
gaggctggccggggcgtgccgcgcgcgcgaggagaataagctttgcgcgctcccctgctaccgggccgcgctgcccactccccatccccgcctctctcctcgcaacagaaccaagcatctccacacgtcgccatcgacacgtacgcgagtgccacgccggaggtcgacggagcaagctaggcagaggccgttcgagcacggccggcgcccgcgtcccacggtgcatctccggctgcggcgaaccggaccatgggcgcggaccgtgtgggtcaaggtctcgagtcaggttgactcgatagataaagattctttctcttctgactcgagaccaagatcaggttgattcgagagacaaagatttttttctcctctgacgagacaaagattctttctcctcgtccagatagtgatgtctggacgatgaaagggacagtttggtggatccatgaagtttgctaaaaaaaagtagagttatgtcgagagttatcacgagttctcgtataccgttagcctgttcgagatctcggcgaaaaagtgtattaggtgggataaagtgtgttgggtaggaaatgatcaacttttctggatactttggttactcacttagatcaagtgaagaataagttcgttatattaatcaccgtggtctttatataaagacgacaaactatgtaatcccactcgccaagtaaaacaactgagccaaatgtttagag

SEQ ID NO: 38616 - DNA, 630 bp, Zea mays
  Clone ID: MRT4577_135220C.1
gtactcgtgaaattcgcggcgcagcgcaagcgcgcgggagccagcgtgccggcgaggcggaccgatgggctcctcggcggcgggctccaccccgacggcgcggcagcagcgcggcgcgggcgcgggcgctggcgcgagcgcggcgccgtcgtcgtcgagccccgtcttcctcaacgtgtacgacgtcacccccgccaacggctacgcccggtggctcggcctcggcgtctaccactccggcgtgcaagttcacggtgtggagtacgcgtacggcgcgcacgacggcgcgagcagcgggatcttcgaggtggtgccgcggcggtgccccgggtacgcgttccgggagtcggtggccgtgggcgcgacggagctgagccgcggcgaggtgcgcgcgctgatggcggagctggccgccgagttccccggggacgcctacaacctggtgtcccgcaactgcaaccacttctgcgacgccgcgtgccggcgcctcgtcgcgcgcgcccgcatcccgcgctgggtcaaccgcctcgccaagatcggggtcgccttcacctgcgtcatcccgggcaacggccgcgccgcgcgcccgccctccgccgcgagccggagccggagccggtccgcgccgcc

SEQ ID NO: 38617 - DNA, 291 bp, Zea mays
  Clone ID: MRT4577_135221C.1
gctttgatagttcattctcgatgtgacttccatatttccatatccactagaacgacactttttacaaatctctaaatataaaaaaaccatcaatttgatttttgaaggccacaccaagtggtgaacgttatcttcaaagctgttttttcactaataactgcaatacaattgggcttatcagcccagcagcccatccccagcagcgcctccgaaaagccctagtgctccgcgccctcgacgccgccctctacaccgtgggcgcctcctgctcctccagccatctcctccaca

SEQ ID NO: 38618 - DNA, 333 bp, Zea mays
  unsure (1)..(333): unsure at all n locations
  Clone ID: MRT4577_135222C.1
ccggcccacncacaccgaacncgcgaggcacaggggccaacgnnagangncgaggaagaggaaaaagagggcaaagaagaagaaggggcngngagcgaagcacnggncgncgcaccgccaccancggcggngngagggcangcagcgaggaagcangcnngccangccgnccgcccgggagcggcggcgccgcgggccggnggcgngngagcagggangcnncggcggngcacangaaagaaggcaagncnnancggcaagggaaggcnaagccnnncnnccaggncncccncncnccancnaaancaaacnacgngnngggaggagggggca

SEQ ID NO: 38619 - DNA, 1264 bp, Zea mays
  Clone ID: MRT4577_135223C.1
aattcggcacgaggctgctctgtccaaacgcaccctgacttccgagttccgacccccactgctttgcttgctctgcactccgctaattccttccgcggcgatcccgagcaagaaacccagcagcgcggcggatctcgtcgggcggcggccgccactatgatgagcggtagctcgcctccgccgccctcgcttcccgccgggagtggaggcttcttcaggggatacacaaagctgtgcaagggcctcgccgtcatattgctcattgtgcaccttgtagtccagttgtttccgtccgccgtcacctatctcgcgcttatccctggaagaacgatcccttttgcttggaacctgataactgcaggctatgtcgagcaaacaattccagggatggttgtcagcatcattggccttcttttatttgggaagttgttagaacctctatggggttcaaaagagttatcaaagttcatttttattgtcaacctttcaacttctgcttgtgttttcatgactgctattgtgctgtactatataactcagcaagagatctacctctatactcctttttctggattttatggggttctatcaggattgttggtgggcattaaacagcttttacctgatcaagagcttaatctttttgtgctaaaaattaaggcaaagtggattccatctcttgttgcattgatatccattcttggaagcatcttcatatacgactttatgtcttacctcccagttctgttgtttggcatgtatatgagttggatctacctccgttactttcaaaagagacttgagaccagcctgaaaggggatccaagtgaggagttctctttctcaagcttcttccctgaatttgtaagaccatttctcgacccaatagcatctgtattccataggttactttgtggaagatctgatgccaggggagaaacattagacacctcaccattacctggttcagacgtttgaggcaaacaagctcatatctccactgatattgcaattctgtatccagagcgacatctttagctgcctgtttggctcctagcttgcctacatctggttcctagttaccgctgctatgggtttgcactgaatgcccagatgtctcttagtcacgctctgtggtaaaatgcttgatcttctgacactactgactggtatgaggatccagaacatgcatttgaaatggaggattaagctgctgtgctattgccattacaataattacgcagcgtgctaaattaataacatg

SEQ ID NO: 38620 - DNA, 490 bp, Zea mays
  Clone ID: MRT4577_135224C.1
attcggctcgaggaggcaatggtgcggacacactagcacactggccaacctcagcagagataatgacgggggaagatgcctttctacaggtcttgcaatacttggataaaatatggggaacaatatcttcttcagaaaaaaaagaactggagaaactggcatttataccagttgcaaatggtactcgattggtcccagtgaagtcactttttgctcgtctgacaattaacatgtcaccttttgcttttgagcttccaagtcggtatcttccatttgtttcccttcttagagagattgggatgcaggaaagccttacaaattcatatgcaagagaacttcttttggatatccaaaaggcatgtggctaccagcgcttgaacccaaatgaactccgtgcagttatggaaatcttggaattcatgtgcaatggaatcaaccaaagtatcacagatggatagatgggccttttgattcagtaataccagatgac

SEQ ID NO: 38621 - DNA, 402 bp, Zea mays
  Clone ID: MRT4577_135225C.1
aaccaggccaaaaaaccattatttttatctaaagcaatactcacataattttgcatacacacatatgctcctgcaactactttttattaacacacaaacattaacggccgaaaaaccttacattaaaacacacccatttcagggcttgttcgggtattcccaaaacacatggattggatgggattggaaaaaattgtaaaaaaatttgacctgtttgggattaaaacccattcaattccgcttaatccacatggattgaaaggtaacccaacaaacccttacaattattggcatccttcacaacattcaaaataagcctttctgtaaacgccttccttgaaaaaatacccaaaagggggttcctaaataattttttcctcacccaacccccccttggggggc

SEQ ID NO: 38622 - DNA, 311 bp, Zea mays
  Clone ID: MRT4577_135226C.1
cgctccgtaagctcggaattcggctcgaggccgaatcaagacccccgttattatgaggcaccaagaaaagcatctaaatgggggggatttaccgaggatgccccccgaaacgaagaataaagggaaggttataaaaaaaaaaaatagggtggtcgtctactttaaaacttaatatacccgagaataagtactcgacctataattgcatgcataccatcttattctatggaaagaagtactaaagccagaccctaatacggtaatcgcagggaaaggtgctaaattttaaagatggcaacattccactcaac

SEQ ID NO: 38623 - DNA, 1787 bp, Zea mays
  Clone ID: MRT4577_135227C.1
aggcgggatgtgtcgtcggactagcaagggtcctctccctcgcgctgtgcagtgtcaacaagccatggtcgacaccgtcgccggcgccaccgactaccgcggtcagccagcctcgcgggccgccaccggcggctggaaaccgtcggttttcgtcatggcgatggagatcgcggagcggttcgcgtacaagggcgtggccgcgaacctcatcacgtacctgacggggccgctggggcagccgatggcgcgcgccgccgcgtccatcgacgcctggaagggcgtctcccagatgctgcctctgccgctcgcgtgcgtcgccgacgcctggctcggccggtaccgggccatcgtcctcgcctctctcatcttcgccgtgagcatgggcgcgctgtcgctgtcgtcggcgctcccggcgctgcgcggcggccacgtggccatcttctacgtggcgctgtacctggtggccctcggcgagggcgcgcacaagccgtgcgcgcaggcgttcgcggcggaccagttcgacgagaaggaccccagggagagcgtggcgcggagctccttcttcaactggtggtacttcggcatgtgcgcaggcaccgccgtcaccaccatggtctccagctacgtgcaggacaacgtcggctggggcctcggcttcggcatcccctgcatcgtcatcgtcgcctcgctcgtcctgttcctgctcgggaccaggtcgtaccgcttctacacgaccgcggcggccagccccttctctcgcgtcgggaaggcgttgctggcgttggtccagagctgggcgccgaagcatcgcaccagaaaactaggcgacagcgacggtgacgccgtcgccgtcgaggaagtgaagagcgtgctccgcctgctgcccatatgggcgtcgtgcataatctacgcgatcatcttctcccagacatcgacgttcttcacgaagcaggccgcgacgctggaccgccggatcggcgcgaggttcaaggtgccggcggcggcgctgcagacgttcatcagcgtcagcatcgtcgtcttcatcccggtgtacgaccggctcttcgtgcccctggcgcggcgctacacggggaggccgacggggatcaccatgctgcagagggtcggcgccggcctggcgctcgccctcgtcgccgtggccctgtcggcgctcgtggagatgaagcggctccgggttgcggcggaagccggcctggtgaatacccccaaggcgcagctccccatggcgctctggtggatggtcccgcagtacgtcctcatcggcgtcgccgacgtgttcgccatgatcgggctgcaggagttcttctacgaccaggtccccaacgcggtgcggagccttgggctggccctgttcctgagcatcttcggaatcggccacctcctcagcagcttcctcatctccgtcattgacaagacgacagcaaagagcgggacgagctggttctctaacaacctcaaccgcgcccacctcgactacttctactggcttctcactgggctctgcgccgtggagctcgtcgcctttgtgatcttctcgcgagtgtatgtttacaagagaaaggttggcaatgatggcggcaatggtgatttcgtataatagtatatgcaatttgagccgtactgatcacttgaggggtgccggtagctgtagttgtttgtacagtacccgtcttggaaaaaaacgtacgaagtaaggtgtgaccgtgtgactacgggattctgtgttaacgcatattttttcatcggaaaaattttaaaaaaaaagc

SEQ ID NO: 38624 - DNA, 182 bp, Zea mays
  Clone ID: MRT4577_135228C.1
ggtaagagaaagagttttatcaggggttcttttttagggatgacaggcgctgtgacaaacatgtacaatggtcctcatgggcagagggcatacatgattgatggactttggccccgtatggttacgctgaaggaggtttcaccatcatgtttacgtagagatattgggcgcataagggattt

SEQ ID NO: 38625 - DNA, 611 bp, Zea mays
  Clone ID: MRT4577_135229C.1
ttttacatgtctaaccgtgtcgcgacgatgttatatagtattaacacctagtggtgtccatgccagtccagtcactatttcactttaagagatcgaaagatctagaacaaacacgaacatttatatcagtatagtcattatttcactttaagagatcaaaagatctagaacaaacacgaacatggatatcagtatagagtgtatttattatatttaaaaccataatcaatcacattttataaatcacattcatacatcataatctcatctataacccaccagttagtctaagtcgtgtctaatcgtgccaactctttagaccctttttgtaggactcttacatcaatcctttcaaccgtggctctaactcttctcgaaaaacaacttcctccttatttttaggaagagtacatcatttagtgggaaatgtagctcctcctgttttttacgtggtgaggagaatcggagagaagcctccttttgggctcctagcttctatttctaggagcaatttcttcctatttttacgaatttttacggataaaccagcagaggagttcctgtttgggtagattttttcaaatgagcccgtttaaagccctttgaggggg

SEQ ID NO: 38626 - DNA, 1349 bp, Zea mays
  Clone ID: MRT4577_13522C.1
agacaacgcatgcactcgtgcggcagctctacattcgcttcgagctatttttcaggccctttttgacccgtcgcccgggtccatctggcgacggtttgcgacggctcgccttcacctcctcgccgccagacgcgcccgccgtcacccagcgagccggcagccgcccgctatcccaggcttcgttttcttggtcgctccgccactgtgacagatggctgcggggggcgggcggtgcttgctcgccttgaaagggctacggaaagcgttcgtttgtagctcaggcggaattttaccgtacctgtaagctgaaggcggaagccgcaaacccgtcaaatgcatgccctgctctagaacgtacattggtggtgcacatctcgacaccttgacgggccagcttgctcagcgtcgtgacatagtggaaatgtctgattctggtgaattgtgcaaaggacttgctgatgatgtcgaagttcctatgctttcaaaactacgccggcaactggttggtaaaggttctcaccgccgtttagtctattctgtggattttggtgcccatgaaggtgctatggttaatttccttgatcactacgatgcccatctggtgatatttgaaaaacttcctgatggagtgtttgccgacccatttgagctacagcattttgttgagcgcaaagttttcgttgatgttgctgtttttggagacgccaaccttgaactgcccacagctctatccaatgggtcatctgttgagatccattttgatctcaggcgaatcatttcaaacaactgtaaccttgtaatagagatgcctctccatgctagatacccgcctcttgatgccagtggctatgccacagtggagtttggtagcccagatctattcctccgctacagaaaaaaggacatccattctggttcctgtctttgggtgatcaataatctcaaagctgcacccctggagaaagctgcatggcgcataccctgtggagacgaggcccacataggatttgtatctagcatcacgtttctttcagctcttgtttgctccatgtccattgtcttggcttctctcattttttgacgtcttagggtcctatcagaccttttttttgtttacataaatactgaagtgcgagacaggagaattctcttcatgcatccacacatccttgcaaatgacaacccagttgccattaaaaaaaaaaaaagaaaaaaaaaaaaaaaaaagcggcctgaaacggagttgccaacttcgaatcacatacagaccagaaccagataagggtgttcctctttgtgatggaaaaggagtcccaaaagaaaattcgtttacttcaaaaaaaaaaagg

SEQ ID NO: 38627 - DNA, 1653 bp, Zea mays
  Clone ID: MRT4577_135230C.1
aatctgctcatcaaaaagttggacgtttgttgcgctctgtttgaccggacgcgtgggttccagattgctgagagagtattatttttctggaacaatattcacttcgagaatttcgttaagcaaaacagtaaggtgatcctgcctatcatcctccctgcattggagaaaaatataaatgggcactggaatcaagtcgtgcaaagcctcagtctgaatgtccgaaagttactctccgatcgtgaccctcaaatgtttactgaatgcttgcgaaaatacgaggaagacaagggccgggagaaggaattgaaactggagcaagagttggcatggaaaccccgggccgtggctgcttcgggaaatattgagggttcctttactgtgaggctgcttgacctctttgactcggaggacgctagggagagggatcgccttaagatggtgcttcaccgtatctatgggaagttcatggtgtatcggccatttatccggaaagctatcaataacatattctaccagttcatatatgaaacagaaaagcacaatggaattgcagagctcttggagatttttggaagtatcatcaatgggtttgctttgccactcaaggaagagcacaaactgttccttgtaaggaccttaattccacttcacaagccaaggtgcactacaatgtaccatcaacagttgtcttactgcattacacagtttgttgaaaaagattgcaagcttgcggattctgttattaggggcctcataaaatattggcctatcaccaacagcacaaaggaggtactgttcttgggtgagttggaagaggtactagatgcaacacaacctggcgagtttcaaaaatgtatggttcctctttctcaccagatcgctcgctgctcgaacagccctcacttccaggttgctgagagagtattgtttttctggaacaatactcacttcgagaatcttgttaagcaaaacagtaaggtgatcctgcctatcgtcttccctgcattggagaaaaatataaatgggcactggaatcaagtcgtgcgaagcctcagcctgaatgtccgaaagctattctccgatcgtgacccccaaatgttcaatgaatgcttgcggggttatgaggaagacaaagacagagagaaggaatttagactgaagcaagagttggcatggaaacgtctagatgagattgcatcagcaaaagtcacaagtggtgaggctgtcctggtgtctccaaccttgcatcgtcaaccttcagtcttgtaggaacctgcgctacatgagtggtccttgcagagtcgttagacattgtacaggattgggttgtagataaaagcgggtatatgaagccaccaaggcaggtgtgcgaaatcgaggaaagagagatgaggagccagtagtgcatcatttctgtaaatcccgtgccatggcttcttttggcatcctggtggttcactttgctgctgtagtccgttgtttgggagaatggatgttttttttcttcttataatggaaaatgtcgagatggcgtgcagtcagcttaaatgataaaagttataagcttttcctttcgcatatagttttgatacaatttgtcatggttgtgaatgcaagcgaatcatacaaaaaaaaaaaaaaaaaaggccccta

SEQ ID NO: 38628 - DNA, 2683 bp, Zea mays
  Clone ID: MRT4577_135231C.1
tgcctggtcccaaactgagcatcgagcaggaacctggagacaggagagatagtggacgaggtggaagcggggaaagagagggagtgccaaccagggagtgagagggactgaagaagagaatccccgaccccgcgccaccgccttagctagcagggtttcccctgttatatttctaccaattcatctaaaactgctactgaagacgacagtggcggcggttcgaggttcggtgcgagagcgcgacgttccgctatcggcgccggcgaagctgtcggtgagccacgcggaggacatcgagatatcgctgtgcgacggcaactcggaggacgagcggcggcggcgtaagatcggctcgctgcggcggaaggccatccacgcgctcaagaagcgagggaggcgccgcgtcgacttccgcttcccgcccggcggccatctccatcgaggacgtccgcgaggccgaggaggagcgcgccgtcgcctccttccgggaccgcctcgccgcgcacggcctcctccccgacaagcacgatgactaccacatgatgctcaggttcctcaaggccaggaagttcgaagccgataaggcaatgcagatgtggtcggagatgctgaaatggaggaaggagttcggaactgacaccatcctcgaggattttgatttcgcagaactggatgatgtgctgcgctactaccctcagggctaccatggtgtggaccgcgaaggccggcccgtgtacattgagaggctagggaaggtggatcccaacaaactcatgcagatcacgtctgtggatcgctacatcaagtaccatgtccaggagtttgagagagccttcagggagaggttccctgcctgcacattggctgccaagaggcacattgactcgaccactaccatcttggacgtccagggtgtggggtttaagaatttctccaggactgctagagaacttgtgcaccggatgcagaagattgatagcgactattatcctgagacactccaccaaatgtttgttgtgaacgctgggagtggatttaagtggatctggaacagcgtgaagggcttccttgacccaaagacttcatccaagattcatgtgcttggttcgaactaccagagcaggcttcttgaagtaatggattcgagtgagctgccagaattccttggcggttcatgcacatgtagtgacaagggtggttgtcttggatcgaacaaagggccgtggaatgatccttatatattgaagctgatccacaatttggaagctggatgcatgagggaaatcaccaacctgtttctgagggggaagaaagaagcagctcatcctttcggttggaacagatgaaatggcagggcatgctaagtgatacatcaaatgctgaatcaggatctgatgttgatgattttggtgcatcatttgttcataaagtttctgactatggttgcttgactccagttcatgaggaagtaaagggcacagatcgtgtgacatacttcagctatgatgatcaaagccacccggatatggctcctgaatcttaccatggagcgcgacgagctactggaatggagcaccacaaaccaatggctgatttcagccaatattctgccaatagaaggcctgggaacagtgctcttaatgtcaatggtacggccgctcaaagtggttgggaaaacgtggtgaagctagtggttacaactttggtcaagctcttctacttcatccggcttttcctctccacagccgagaggaggctcgagagcatccatcgccctgctccaccagcggccccagcagcggcagaggagccaagacctcgcgccatcagtgatgaagaggtgtgcgcctgcctgcagcgccttgacaatcttgagtcgatgtgcagtcacctcgccgccaaaccgccgcagatcccagaggacaaggaactcattctgttgagctcgttcgagcggatcagatccgttgaggctgacctcgagaggaccaaaagagtattgaatgcgaccgtggtgaagcagaaggcactggtggagactctggaatccgtacaggagtcgtcgtctagagtcaagaagaggatgttctgttcataggacattgagccgagctgagcaccagcagatcccaggaaccatgccatctgcgtcgtcattaaccaacaaactgtgaagctgacgtgcgaagctgccagcagccggagcggagccgccattttgacctggccgcgaccacccacttcgtcagccctccgaggaggatgaaccagcctacaccaaaatggaagagaagaccgtagcacccatgtcgcttcctttcattcccacccgtttttgtagcctccgtacggttgtagttgtaccctgccttccggcgatcccgttttttgattggtgaattctctgctccggccggccgccgagcgccatgccaagtgctgtgttacatcttcttttccttggtgccgtccgaatggctggagtcgttcttctgtatactgatgagtacagagtagtgacccccgcggcaggagctgggctggggagaagcacggtggcgagcttggtctggctgcagctcctgtgctgtcgtctgtacatggcacagactgcttctggtggccctgctaatacagattgctatgaaatgaaaaatttgcgttcaaaaaaaaaaaaaaaaaa

SEQ ID NO: 38629 - DNA, 324 bp, Zea mays
  Clone ID: MRT4577_135232C.1
cctacaccttcaccatcacctaaccgtagtcttgctcagtctggcaagggccagacacaggggaaggatcaaccaaactcacagtgaccgtatcaagaacaagtacaacaacggttacaacgaccacatgctacagactatcatccatcacaagtaagacagactgcatcgcatcagaacactcttactactgatacagccgtcacccacggcaaatgatggaggccatccagaccatcttactgccgagacggatccgcgtctgacccctacaagtgcacctactgaatcaactcatgaacttactgcagtggaaacaaacat

SEQ ID NO: 38630 - DNA, 131 bp, Zea mays
  Clone ID: MRT4577_135233C.1
ttcgctctagttcaatcgtcgccccaagcagttcccggcggaaccatcacagaagattaactgctcaagctgcactcttacccatcataggctactggcattatgcccctctttgctcccgctcgtcgcat

SEQ ID NO: 38631 - DNA, 552 bp, Zea mays
  Clone ID: MRT4577_135234C.1
acgcccgtccggggtgctgcgtggcagcgttggtgtagtccggagcccgtcggagcgtccagctcccgaaccaccctacctgcacacgagcctgtctgcaaagtctctcctgcctgcctcctcacagtaagtaccgagggggcaatgaaccaccgtgcgtacgacgcatctgcctccgagtgacacatagacattgccgtccttataataattgctgggggcgtgatgcatcgtgcactccaccctaatgtacggctcatgcttggcatggcttactcggataaaacccttgatggggttgaaaaagaactgaatgctgctattgaagatcactatgatgggatttgatgctactgctgaagtggaataagccttccttgactcaaatgccgacgtgatggtaataggctcatcaaaaagaggggcaatgggctggctggtgttcaccttatagatgcccatatatgctgagaccctgcatagacctcaaagctatgcttctttcactatcaacgatgctgcagcttgccatcgccacataacaccgtgctg

SEQ ID NO: 38632 - DNA, 1727 bp, Zea mays
  Clone ID: MRT4577_135235C.1
gccaatgagaaaatttggattaatctgtggcccatttgatgctacaatggaagataaaacctcttttgatgagtgcagccatggaaatgctgaggtgctgcaaatcatcactgatttacagaagaggactgaagcactggagaagaaactgattgggtcagacaaagaaatactttcattgagggaaatttttaaagactcaggaagaaaagtccagcaactggaatacattgtagatgagttacagttcaaacttgactcttccctggctcaccttggaaacatgtgcaatacactagccaccccatcaatattcctgattggtggttataatggcgtgacttggttatcatctcttgattccttttctcctgagaaagacgcggtcctaggtctcacaccaatgagttctccccgctcatatgcatctgctgctgtgttggatggacacatatttgcttttggcggtggcgatggcatgtcatggtataacacagtggaatgctatagctcaagaaataatgagtggacggaatgcccctccatgaaccagaagaaaggaagtcttgctgggatctgtcttaatgagaaaatatacgctattggtggaggagatggaaatgaattttattcagaagttgagatctttgacccctaccttgggaagtggatatgtagcccatctatgctaacctctcggtttgctcttgctgcgtccggactaaatggagtcatctatacatctggtggctatgatggaaacatgtacttgaaatcagcagaaaggtatgatccaagggagggcttctgggtccggcttccaagtatgagtactaggagaggatcccacaccttaactgtccttggagacaccctatatgctatgggagggtatgatggggacaaaatggtttctagcgttgagatctatgatcctagtcttaatgcttggaggataggtgatcccatgaacactccaagaggatatgccgctgctgtttatcttgatgatagcttattcctaattggtggcatgcagtccagtgtgcagatgttggatactgtggaagtttacaatgcaagttctggctggtcagtccttggttctagttctattgggatgaggtccttcgcatctgccgttgtcttgtaattggtagccagaagtttagaattcatatcatcaaaatttgtaacatagctgccattacaatttacatggaatggttagcacaaatcagggtaaacaacccttctgaagcattctggttaccaacagcgagataggataacatgctggttcgaatttttacttttgaatcttcattcgcgactaaccccacattgtgtggatgaacgattttctcggataattgtcaaactgatgtagaatccaaaagaacttttgtattcaattattgcctctgttttttctccttaagtaggcttgtatacatagcagtgcgtaaaacgttgagatgttggttgagcagactggtaagctttcaggttagtataagatgcagcaaatgttgctgttaacttttttcagctgctctattgtcaactgggccacaggctgttagatgagatcatggagtcggcacatgtttctttgaattgcagcagatctcgtgtgaagcggctcgtggatctgtaaatatgtgtgattcatgatattttgttagatatcaactaaatatatgccaagaaacttgggatttgac

SEQ ID NO: 38633 - DNA, 193 bp, Zea mays
  Clone ID: MRT4577_135236C.1
ctcacgcgagggatgacgcattcgctcaagagaggcattcaaatgactatcaagatcctggctgaatagactatcaccatcgacgtggagtctgctgacaccatcgacaacgagggcgtccatatcacaccacaaggaggtcattcctgcagaccagcagctgctaatctgtcgcacgctgcagctctacgac

SEQ ID NO: 38634 - DNA, 455 bp, Zea mays
  Clone ID: MRT4577_135237C.1
cggacgcgtgggtttatacgcaccattcgcatgcccttactcttcagcgaagaaaccagcacagcagcagatatgactggcatactcgacgtcaacttcgatgaggctctcgccgccgccatgacaagccactacactgaggacctggagccccacctcgctcagaggtcgtttttaccgcactcgcccaacattccacgtaacagccgcagcagcattagctcgccctcctccagtaacagctcattctctgcccggaatgactcacccgcttatagcaatgggtctccttcgagcactggctcctccctcagcaatggcttttctcggtatgccaatccagtggacaggagaaccatcttgaacacccgccagcagtttgaagaccaaagacgggcaaagctggacagcctcgaggaagccctttcgcgattggaccttagtaacgcccgcat

SEQ ID NO: 38635 - DNA, 826 bp, Zea mays
  Clone ID: MRT4577_135238C.1
ggtctctgctcagctagcatatttgagtttctcacgtgctctagctactagcaacctcgacatcaatggcttctggtgccgccgccccggttaagatgtccactgcagtgactgcctgcatcctgctggcggtcctgctgcccatggcgcccaagctagtactgggtaacgtttgttccgaccgttgtggtgccctttgcgacacctttgctgatgggttctgcacggaagaccccgagctttgtccaccggcattggcggggccatgcaagcccacggttgtcacagggtgtatcactgaatgcaatacactctgcattacaggcggattcgttccttgcgctgcttagcttgatgagaatgcatgcatgcgcattcataataagtattattattgtttgcggcagaataaaggtgagtgcaagagcaaccagcaggcctcttccccacgcatacacacactgcagcgtgagctgagggaggaagcatgcaataagcttccacgatgatctacgtactatcccacatttccttactatattttcctttgtttaattcacagtcaagattgtgccgttcagaggccagcatacatgggcttattgtacttctccatatgcatatggaaacgtgtagtgtgccaattctctatgtggtctttcagtgtctactagtagacatatatatgtcattgtcatgtaatctcctctcgcgggcttactaccatcagcacagctgagggaagttgtattgaaataaatcatattaaaaaaatgcagtgctctatgtttttgcacatcagtagttaggctttatatggggcgta

SEQ ID NO: 38636 - DNA, 1661 bp, Zea mays
  unsure (1)..(1661): unsure at all n locations
  Clone ID: MRT4577_13523C.1
tggtaaagttggtctcagccggaaggcccaattgatgaagacggataagctcggctcagggtatggccccgggatcgccgtcgactaggctggccctccgccgtctgccatgacgagatccgcgtccccgagcgtggacgctccacgcctccgcctcccggacgccggcgaggtgcgtccggcgtccctgctgcacacaacctgacaacctacttctctcttctatctaccacaagatccttccgccgcctccccctcctgacagagcagaggcagagctgaggcccggcctggccgggcttcggcggcccagcccaaataacccgacgggtccgcatcctgagctccgcctccacacaccttggcacctcgccctcgcctccagctccgcacgtcccgtcgcccgcttccacctccacgcgacgcgacggctcgccttcacctcctcgccgccagacgcgcccgccgccacccagcgagccggcagccgcccgctatcccaggcttcgttttcttgttggctccgccactgtgacagatggctgcggggggcgggcggtgcttgctcgccttggcgctcgccgccgcttggatctccggcgcggtggtcgccgcctcatcgtcgggtgagcaggaaggcggaagccgcacacccgtcaaatgcatgccctgctctagaacgtacattggtggtgcacatctggacaccttgacgggccagcttgctcagcgtcgtgacatagtggaaatgtctgattctggtgaattgtgcaaaggacttgctgatgatgtcgaagttcctatgctttcaaaactacgccggcaactggttggtaaaggttctcaccgccgtttagtctattctgtggattttggtgcccatgaaggtgctatggttaatttccttgatcactacgatgcccatctggtgatatttgaaaaacttcctgatggagtgtttgccgacccatttgagctacagcattttgttgagcgcaaagttttcgttgatgttgctgtttttggagacgccaaccttgaactgccacagctctatccaatgggtcatctgttgagatccattttgatctcaggcgaatcatttcnaacaactgtaaccttgtaatagagatgcctctccatgctagatacccgcctcttgatgccagtggctatgccacagtggagtttggtagcccagatctattcctccgctacagnnnnnnggacatccattctggttcctgtctttgggtgatcaataatctcaaagctgcacccctggagaaagctgcatggcgcataccctgtggagacgaggcccacataggatttgtatctagcatcacgtttctttcagctcttgtttgctccatgtccattgtcttggcttctctcannnnnngacgtcttagggtcctatcagannnnnnnnnnnnnnnnnnnnnnnntgaagtgcgagacaggagaattctcttcatgcatccacacatccttgcaaatgacaacccagttgccattaattttgctagctttagtggagtctttgcaagtttcattgaaacggagttgccaacttcgaatcacatacagaccagaaccagataagggtgttcctctttgtgatggaaaaggagtcccaaaagaaaattcgtttactt

SEQ ID NO: 38637 - DNA, 387 bp, Zea mays
  Clone ID: MRT4577_135240C.1
aaataccatgaccctccagtgctcataggggtgcgtgcattacttttaccgacatcgaggttgtcttccgagaaccacacaggggctaataccagccgtgatggaggctccaaaaactagttgcagtgtttgtgacactgcgggtaacccggaatatacgtcccgactcaatgcttaagcattcaatgagaccttgaaacacctggaccttgtgcggacacgggcacgctgtaacttgcggaccttggactcaacgcatggcttgttgcgggaatggcgaccgaatcccaagtgctcgacaaactcaccggagttattaggtccactgaggaggtacggtgagccaccggctggggaaacgggagagaccctctgcgatggtgagag

SEQ ID NO: 38638 - DNA, 459 bp, Zea mays
  Clone ID: MRT4577_135241C.1
attgggacctcgagccggcgggaaaacttcaaaaagcgccagacttctattttccctatactccagaatacaatggagtctcgtctactcgggagcgtgtttactccggctcggcagggtcccgtgacacctgagcggcctgaactgcgccgcaggacttcgtgacaccgcacaacgcggcgcgcgctgatcgtgcgagtcagtccgtggtgacgggaggagaacgtggccgtcttcgcacggagctacaacgggtatgggcagggcgactgcatgatggtctactccgatgatagggccagccactactgcgagaacatctactgaggcggaggtaatgttttttagacgcccgccgccgcccgtttgcggtggagatgagatgcagaactacgactactgctgcaacataagaacgagcagcgaaggcgtgcgattcacgacacaaaggtcagtctg

SEQ ID NO: 38639 - DNA, 396 bp, Zea mays
  Clone ID: MRT4577_135242C.1
tgtggttttttttaaaactttcgtggcaatattcaaaaacataaactcatcaatcacatgacaaaagtcccatcaatcacatgacaaaactgtcatccctaggcctaattagacacaattcatcatccaatgctaataacaggcaatgtcttattcgaggcacaatcaaagactccagtttgaaactgcaataacatggaagctcacgcgcacccagcaccattcggtgacagccacgagggatgggtgattcctctcgtcgggacaaacacagctcgtacacaggtgctgtccgcattctagatccgatacacatggtcacaacaccaataatggcgactgtcgccccacacctctatttcatctagaaaagttttcacccaccgggcacctgaa

SEQ ID NO: 38640 - DNA, 284 bp, Zea mays
  Clone ID: MRT4577_135243C.1
gggaacaaaaaaactcccactgggggccccacaaccctatataaaagaggcccccaggcccataaatataaaaaacgaaaccggaggctggtcctgggaaaacaaataggtttattttattttttcccggggttaaaaaatccggcaaggggcgggacccgaaccccccgggacctttgggggggtaaaaaacttggggcccgaaaattaaccgaacttggtgcaatcgggggaaattcttagggggaatcccacggaaaccccccacttgccgggggaggggg

SEQ ID NO: 38641 - DNA, 868 bp, Zea mays
  Clone ID: MRT4577_135244C.1
gagctcattagtcggcggccgcgtcgtctcctgcgccgacatcgtcgcgctcgccgcacgtgaatccgtcgccctggtacatacagtatactatatactgaactgaataattagttagttgccttacctgatcagtcatcaccatgcatgagctgctgcatgcagggtggcggcccggcgtacaagttgccactgggcaggcgcgacgggctggcgccggcatcgaacgccgccgtcctagcggcgctcccaccgccgacgtccaaggtgccgacgctgctgtccttcctggcgaagatcaacctggacgtgacggacctggtggcgctgtcgggcgggcacacggtgggcatcgcgcactgcggctccttcgacaaccggctgttcccgacgcaggacccgacgctgaacaagttcttcgcggggcagctgtaccggacctgctcaaccgggagggcctcttcacgtcggaccaggacctgctgaccaacgccaccacgcgccccatcgtcacgcgcttcgccgtcgaccaggacgccttcttcgaccagttcgtctactcctacgtcaagatggggcaggtcaacgtgctcacgggctcccagggacaggtccgcgccaactgctccgcgcgcaacggcgccgctgctggtgacagtgacctgccgtggtcgtccgtcgtcatcgagacagtcgccgacgccgccggtagcctcgtgctagaaacgacgacgacgtcgatggcaatggcagcatgctctgcagggagagcgctggcgcgggcaccagtagatgatccctgtccgcgcgggcccgggctcagccgaccaatcgatgtcaaccgcggcagcagtagcatagctaaggc

SEQ ID NO: 38642 - DNA, 1670 bp, Zea mays
  unsure (1)..(1670): unsure at all n locations
  Clone ID: MRT4577_135245C.1
gcacgagaaccgcccagaacagccgccacaagcccttctcaactcaagtctcatctcatcatctcccacccacctaaactaacagcccacggccaacttgcaggacgcatgggcgcatggcatgtgggtgtggcggcatataaatggaggcagccgagcgcgcaaggtctccacacgcctctcttgctcaccttctcttctaaccagccaaggcgcatctagcgagctgagcagcaatggcggctgctacttcttctaggcgccctgcagctgctctgcttgtcctggcactggcactggcagcagccgtcgtggccctggcggccgagggggccaggtacccgccgctggctccgggcctgtcgttcgacttctacaagaagagctgccccaaggcggagtccatcgtgcgggagttcctggcgtcggcggtccggcagaacgtggggctcgccgcggcgctgatccggctccacttccacgactgcttcgtgcagggctgcgacgcctccatcctgctggacgccacgcccacccagcccagcgagcagcagtcgccgcccaacctcacgctccgccccgccgcgttcaaggccgtcaacgacatccgcgcccgcctcgaccaggcctgcggggccgcctcgtcctgcgccgacatcgtcgcgctcgctgcgccgacatcgtcgcgctcgccgcacgtgaatccgtcgccctgggtggcggcccggcgtacaagttgccactgggcagacgcgacgggctggcgccggcatcgaacgccgccgtcctagcggcgctcccaccgccgacgtccaaggtgccgacgctgctgtccttcctggcgaagatcaacctggacgtgacggacctggtggcgctgtcgggcgggcacacggtgggcatcgcgcactgcggctccttcgacaaccggctgttcccgacgcaggacccgacgctgaacaagttcttcgcggggcagctgtaccggacctgcccgaccaacgcgacggtgaacacgacggccaacgacgtccgcacgcccaacgccttcgacaacaagtactacgtggacctgctcaaccgggagggcctcttcacgtcggaccaggacctgctgaccaacgctaccacgcgccccatcgtcacgcgcttcgccgtcgaccaggacgccttcttccaccagttcgtctactcctacgtcaagatggggcaggtcaacgtgctcacgggctcccagggacaggtccgcgccaactgctccgcgcgcaacggcgccgctgctggtgacagtgacctgccgtggtcgtccgtcgtcatcgagaccgtcgcggacgccgccggtagcctcgtgctctagataataagcaaataagcagtttgaagcttgcttcgcatgcatgttgcaacaaataagcagctagtagcgatcgatcgattggaaataaagcagctagtagcgatcgttattacagaaacgacgacgacgtcgatggcaatggcagcatgctctgcagggagagcgctggcgcgggcaccagtagatgatccctgtccgggcgggcccgggctcagccgaccaatcgatgtcaaccgcggcagcagtagcatagctaaagcatncgccggcgcacgccgactcggccacgtgatccctggcggacttgaacacg

SEQ ID NO: 38643 - DNA, 286 bp, Zea mays
  Clone ID: MRT4577_135246C.1
ttcaagactgcatacatctcggctgcgagaccagattccacatcattcccagacaatacatagcgcacaatggttcatgtcccaaccaggatgattctgcctatcattaagccgatcctgaaaccaagggaaaggatatcggcctccaaagggaatcccgagcccacattataccgaaataaggcagcatagatgtacatatctgaataccaatcctttgtagtcttattacccctatcctgaagccccaggaaatgacaccagtgttcatcgcgctattccaaaa

SEQ ID NO: 38644 - DNA, 565 bp, Zea mays
  unsure (1)..(565): unsure at all n locations
  Clone ID: MRT4577_135247C.1
tcttggacctcctggnagccccagatccgtccaccctggnagagttccttggaacgatccccatggtgttcaatgtcgttatcctctcccctcatggttacttcgctcaagctaatgtcttgggttaccctgacaccggaggccaggttgtctacatcttggatcaagccttggcaccgagcactgccatatgcgcgctatggagaacgaaatgctgctgaggatcaagcagtgtggtcttgacatcacgccgaagatccttattgtcaccaggttgctccctgatgcaactggcaccacctgtggccagcgccttgagaaggatccttcgcgtgccattcagaacagaaaacggaatcgttcgcaagtggatctcgcgatttgaagtctggccgtacctggagacttacactgatgacgtggcgcatgagattgctggagagcttcaggccaatcctgacctgatcatcggaaactacagtgacggaaaccttgttgcgtgtttgctcgcccacaagatgggtgttactcactgtaccattgcccatgcgcttgagaaaactaa

SEQ ID NO: 38645 - DNA, 222 bp, Zea mays
  Clone ID: MRT4577_135248C.1
tgtttttttttcctcctggaatccacgatcatggaacatgatgcgttcaagaacatccccattataatgatgtcatcgcatgactcagtaagcattgatttcaaatgcatgctaaagggtgcagcatattttcttgtttagccgataagaaagattgaattaaggaacttgtggcatctcgattggagaaaaacaacatgctaacggtagtcctaatgctta

SEQ ID NO: 38646 - DNA, 699 bp, Zea mays
  Clone ID: MRT4577_135249C.1
aattcggcacgaggaggacagcaatgggggaaggtgcaggtgaccgtgtcctgagccgcctccacagcgtcagggagcgcattggcgactcactctctgcccaccccaatgagcttgtcgccgtcttcaccaggctgaaaaaccttggacctcctggaggccccagatccgtccaccctggagaagttccttggaacgatccccatggtgttcaatgtcgttatcctctcccctcatggttacttcgctcaagctaatgtcttgggttaccctgacaccggaggccaggttgtctacatcttggatcaagtgcgcgctatggagaacgaaatgctgctgaggatcaagcagtgtggtcttgacatcacgccgaagatccttattgtcaccaggttgctccctgatgcaactggcaccacctgtggccagcgccttgagaaggtccttggcaccgagcactgccatatccttcgcgtgccattcagaacagaaaacggaatcgttcgcaagtggatctcgcgatttgaagtctggccgtacctggagacttacactgatgacgtggcgcatgagattgctggagagcttcaggccaatcctgacctgatcatcggaaactacagtgacggaaaccttgttgcgtgtttgctcgcccacaagatgggtgttacttactgtaccattgaccatgcgcttgag

SEQ ID NO: 38647 - DNA, 244 bp, Zea mays
  Clone ID: MRT4577_13524C.1
ctgggtgtgggcttttttcttcgtttttccctccccctattcggcctcccctgcggggacctcatgcccagatctacaggccaccaaacaaatattcaaataaagtcaatgtacatagcgatcccggacgagacgatgccaccaaccaatcatacgggagatgaatctaaactctcctaaaagtttgacaacacggtaactgtatatattgccacaccgacatttttatttttcagactactga

SEQ ID NO: 38648 - DNA, 298 bp, Zea mays
  unsure (1)..(298): unsure at all n locations
  Clone ID: MRT4577_135250C.1
ctcgcgtcgcttaagtgttgtgagatagatctgcatgcgtctaccttttgtaggtaccttagtgtttcgacggcataagcaatactcttgtctgcagtggtactagacagatacagcttaggcacttgaactgggatctattgcttatgatagctgtgtatcatatatgacataagcagaggggataatgacgatgtgttcactacttaatctgtgctgtatgaagtactggtagactgaaaagtgttgcaatgttctgctactgagtcgttacagnattaagcatgtaactagctga

SEQ ID NO: 38649 - DNA, 213 bp, Zea mays
  Clone ID: MRT4577_135251C.1
taaaaaaacaccgggtagccgtccacgtcacgggggtaggggagttacctcttacgccgttcatagctcccacttcatcactatattaactcaactcatccgaggcactttaggtctagtcgatcaacgaagttgatgaaaagtccccgacccaactaacatacccacacatctaacctaaggatacctcaggaactcatcggatcataccac

SEQ ID NO: 38650 - DNA, 280 bp, Zea mays
  Clone ID: MRT4577_135252C.1
ttccatttatcaagctcgaccctttcagacgggagctggatgtctcgtaggggctgcggccccataccccgtacctcctcactaccttccgttctatcttcatcctcaacaacacccagctcaactcgtacgccttccttcattacaaccaccaccccttcgtccacgacagcaccgtggacatcctctgttaaaatggattagccgattaccacaactattatttccggttttgtgcctactgagcccatcttattctgcgtcctctagcatatggcca

SEQ ID NO: 38651 - DNA, 585 bp, Zea mays
  unsure (1)..(585): unsure at all n locations
  Clone ID: MRT4577_135253C.1
ccggccggtttagtaactaaaatgattggagtaaacaagtttagatattgtacctacttccctgtcagatatatttctatcatatattttctaaagaatgtgtgatttatacccttggggtagtggaagctacataattatgttttttttcctctctagatctaagatttctttcacttctaatatgttgatggaaagaattttcatggtatgcacgttttcagtttatttaagtactatctttctactagtataagggtttttaacctgtgaaaaattccaatataagtaccattttgggggaattttcgaagtcacagtttctctgccatattgaatgaatcaaggaaacattatctttcaagttatttgaaggcacagagcgcttgagttgtgcacactccttttgcatttgtgttacctaccttctaacttgccttcctgttctctctgctcatttgcagnatccacagctataccaagaaggagtgcagaatatattattcagttggtgtcggatacttggctggatgcttaacggggttatgaatgctgccttaatattttttttctgcatcactacct

SEQ ID NO: 38652 - DNA, 548 bp, Zea mays
  unsure (1)..(548): unsure at all n locations
  Clone ID: MRT4577_135254C.1
ggtgtgnaataaagtgtaattggtgcacctctagactaaaagcaggataaatgaaattttaatttagtggnaacttatgctgcataatagctgagaatagtaattctagaagttaatgtaatgatttctatttttagtctaagtttagatattgtgctctagtcaagagagatagagtgctcgtaaacgtttctctatggtttatgatattcctatctatatgcattcatatgcataatgcatttcattcagatacgttaattaatggcgtaatgcggaagacaagccaagtcgaccccaagcgcgggctactccgtatggtggtgctggaagacgaacctgcccgatcaagtgctagcacaaggatgatcatcaagtggacgtcacctaacaacactaacctagtgttacctaggcaagccctggtgcattttccacctccttgtgttttaaaatctttatcaccttatttgatgcattaggtgataggagttgtgtgctaaaccggtgatccatttccttcctttgaaaggtgattacccttcctt

SEQ ID NO: 38653 - DNA, 138 bp, Zea mays
  Clone ID: MRT4577_135255C.1
ctacaccacacagagccgcagcagactcgcaagtgatagtagatggatcgtctgccctagtggagccggagcatgagggagtactggtcggaggcctgcgggcttcgcgcggctctgcgggtcccgcacgtgcggtcg

SEQ ID NO: 38654 - DNA, 137 bp, Zea mays
  Clone ID: MRT4577_135256C.1
gtcgactacacattatgatcacttggagtgtgaaacgttccagaaatgaggctggtagatccccgcgtgaaagcgcctgggttgcaaacaagtccagtgtctgactggaccactatgacgcttcaactcggtggacc

SEQ ID NO: 38655 - DNA, 195 bp, Zea mays
  Clone ID: MRT4577_135257C.1
acgggctcgcacgcttggtgcctccttccgtgcctgataacgtattgcagtagcggatgacagtgacgatcggcaccttctgcaaaatctatcctgagtaccatgggtcgagcagcctgggagtcgagtccatcatcgacaccctccgcgtgctcctgctacaggtggtcaccacgccgccattcttggggatca

SEQ ID NO: 38656 - DNA, 402 bp, Zea mays
  Clone ID: MRT4577_135258C.1
ggcgcaaatgcaagtggtcgattgcttattatattatcacaagcttgcttacaataatacttatagctaaataaaatcacaatgtgttttcgagggggcgttacattgagtgttgacagggatttgtgttgttacactccctcgtctaaagaaaataaattttacgccaatggaaactgatgatgcatgctctcctttattatttttagagagagaaaaaaaacaagaaacaaacaaaatatacggtaggagagtaggcggtggatggatgatggatcatgcaaatgcgcctgcccgtggcagcagcggcaccggtaccaccttgacgccgtcgccggtgacgtcgcattgccggagtttgctcgccttaaccacgccggctttatttgggatgtcgtatga

SEQ ID NO: 38657 - DNA, 464 bp, Zea mays
  Clone ID: MRT4577_135259C.1
tatgacgacacctaccgcgttgccaacaccgggggagccttttaaaatactgggggttttcattaaccaagcaatgaagcagatgtacctggcacgtcctttgctttcatatatacagcctcactcgatcgatcagtgactgctggtgttatgacgacatcccaaaacaaatgcaggcgttggttaaggcgagcaaactccggcaatgcgacgtctccggcgacggcgtcgaggtggtaccggtgccgctgctgccacgggcaggcgcatttgcatgatccatcatccatccaccgcctactctcctaccgtatattttgattgtatcttgtttcttttctctctctaaaaataataaaggagagcatgcatcatcagtttccattggcgtaaaaattattttctttagacgagggagcgttacaacacaaatcacttgccaacacttaatgcaacgccccctc

SEQ ID NO: 38658 - DNA, 303 bp, Zea mays
  unsure (1)..(303): unsure at all n locations
  Clone ID: MRT4577_13525C.1
cggttacagtgttcagtgcattgcctagccactacatggccgatttttttgtattttagccctttatcaggtttaaaatcacgtttagacctanaaaaattttaaactcaattttggacccttagctcggcaccatagcctgtggcgccgagctaacatagctcagcgccacagcctatggcgccgagctatgacgtggcagcaacggctagttgcgtctagggctgacctggctctgacgtggtggcggcgcggcctcgtagctcggcgccacagatcttagcgccgactacgaattcctat

SEQ ID NO: 38659 - DNA, 450 bp, Zea mays
  Clone ID: MRT4577_135260C.1
aatgggggttaaaaagggggaagattcttttaagcttataaaaatttgtttaattttttggggggggggaaaagtttaagtaaaaaaaggaaattttggttgaaaaatttgttgaaaaattgaggttgagggaaaacggttagggggaaagggtttttgagaggggaaaaaaaaggagttttttgggggggggggttttttacttaacaaggggggattttttgtacttgccgggggggccgtttaaagggggaaattcaagaaaatgggggggggtttttgggggatcggggttgggaacaaagttgggggaaataaggggaatagttgtttcttgggggaaattgtttttgggttaaaatttccaaaaaaaatacgggcgggaaaaataaagggaaaaggtgggggggcctaaggggggggttaactaaaattaaatggggtgggggt

SEQ ID NO: 38660 - DNA, 476 bp, Zea mays
  Clone ID: MRT4577_135261C.1
gtcagcaaaccagcaggcgcgagatattgcatcttactggcgccgactgtgttggcaccagagccacttctgtaacttgcttcggccaccatgaagggcgacaagaacactctagcaactaggaacgctgaccctgaacaatgcttaaaagcgggccacacaaaggctctcagatccgtttaacccctttactgcaacccatcacaaactactgggcttggtcaaaccagcatgataaaacagctaacaaaggcttggccatggtcaaacaagaacaaaaaaagggcgatcaaagcctgttctgtaatcacaaagagaacatttgacgaggtgctcaaatcaggctcagaaagcaccctgtctattacccgatgataacaatctagccgtaggagtggcacactctagaacctgcgcagaacaatctggatgatgcccgctctgactatggaggcaatgggcccactggtgaatta

SEQ ID NO: 38661 - DNA, 379 bp, Zea mays
  Clone ID: MRT4577_135262C.1
agcaggagaggaaggcgaggaggggcaacttctgggcgcggctgcagcagcagctctaccacggtggctggcacaggaaagacgacgggtgctcggtggccgcagagagacagaacgccgcggccgcggccgccgtagtgtgatgctcgatcagggtgcgaccgagagaccgtggcggtggacgagcgcgtcgaggtgctcggttctgtgctgttcccgtgtttacgctgtttcaatcaatctttcggtgccgtggaatggatggccgggtatcggcgaaacgaaaggcgacctaacggctcgctcattttgtaaacaaacatcgaatgaagcttgcacttgcaaaaaaaaaaaaaaaaaaaaaaaaactcgagactag

SEQ ID NO: 38662 - DNA, 609 bp, Zea mays
  Clone ID: MRT4577_135263C.1
acccggttccccccctcggattttttttttttttttttttttttttttttttttttttttttttttttttttcttttttttttttaaaggaataatttgaaatatcaaaactgcaaaccagtaaactgtagggggggacctaaaaaaagggtaacctgtggggggtaaccaccaccaaaaggaaaatttacttcagctttttccccatccacaacctatttttacttccccacaggcccacggaacacagccgaaggaccattgccccaaccaacataaaaaaacctttcccttttttttaaagggcccaagggaaaattttggggaggttgtttatttgcccggggggttttttttcctaaacactttttcctggttctccctccaccattcctgggcctgttgttccgaaaacctttttttgttaaaccggacccccttaaaccccttagggccttttttaagctggatgagcgtaacatacccccccggttaaaactgttaaataagttgcccttttccatgggtcccaccgaccttgggggctaaatccccgttagctttcaagctgttttccataatacgggggcatggaaaactccctcccca

SEQ ID NO: 38663 - DNA, 369 bp, Zea mays
  unsure (1)..(369): unsure at all n locations
  Clone ID: MRT4577_135264C.1
tatgccgaaaaagggtatctacttattttgtctgtataaattagtataaattacagctgcaagcctgcaacagtctgaacagctggcttatagccgcacgtcatctgtaagagcaagtttaataatagagcctattattggctctaacttcttaccgtgtcatatagagccagcaataaacacactcatgtagtaaaaactgggnctttaanaatttgacctcttagatgaatttcttgtctcttatctcttttatccttttgtcttgaaacctgtgtagcacctaactcttgcatgagagctcactacctctatttttttatgtctctcttccacgtaagcaaaaatgacatgtaattagacttgagt

SEQ ID NO: 38664 - DNA, 194 bp, Zea mays
  Clone ID: MRT4577_135265C.1
gtaatcttcatgccttatgagcctaagagcagatggcaacaagacaatgacatcataatgcctgggtaacaagatcaccgtgtgtgctcaggtctacctgcctcacccagacaccttcaatggctgctgaatatagatcatctgcacactcatattctactggaccaggatcaggattcggtaataaccttctg

SEQ ID NO: 38665 - DNA, 275 bp, Zea mays
  Clone ID: MRT4577_135266C.1
acgcgtgggttctggagaggtctcggatgctaatcctgctaagtcccggaaggggcttacagaagaagaatatgaatgcatcgcttaatcagcaacccactatattaacctaacccaggtacatgcagccgggaacgacaaaagctaccaccagacggctcctcgtaacgattctaataattaaacttccgcctctattttctcgggctcacgcgatgaactttacttcaccataaacccaagggtcgctcatggtttgggcccacaaaatccca

SEQ ID NO: 38666 - DNA, 247 bp, Zea mays
  Clone ID: MRT4577_135267C.1
agggcgccccttttttttttttttttagttaaaagcacagaagaacaatgcagcagaaacaatctacatgcacctgggatgggataccagaagtacaaaggctcaagagctcacagatcccacatatacagatagtctatcagaaagcacaggggctatctagagccaccatcacaaggaatcttttcccctaggccgcaaggacagcaagcctacctaagatcagaacagaagtgcatcatgtgta

SEQ ID NO: 38667 - DNA, 429 bp, Zea mays
  unsure (1)..(429): unsure at all n locations
  Clone ID: MRT4577_135268C.1
tttaaaaaaaaaaattttttttttgacaacaaccaaacaacaactcattgcatccccccatacaagccccancaaatacaaccaaacaaacacattttcaaacttattttttaatactnatacanatcccacacagggggggggggggggggtttaattnnnntcttaccttcataccatgggggggcaaagggggatggttcattccatttaattaccgccccgggaagcttcccttctgcttggctttagcctaactgttcgcgtctcccttgctcggtccttcccccgcttttttttcccttcttctcgggggggggggctttcttttcctttttttttttcccccccctnncccctttttttttttctctcttttttttttttttttccgcgcccttccccccctcctttttttttttttttgtt

SEQ ID NO: 38668 - DNA, 525 bp, Zea mays
  Clone ID: MRT4577_135269C.1
acgacccccgctaggtcggacgcgctagcgacggcgtccacaaccacgcaagccccgcagccgccgccatcatccagtacggcggcggcggcggattctatagcccgccgcacagcggctcgccgtcggccgcctcctactcgggctccttcgtcctctgacttctccgggccttgacccagagtgatctacctgctttatcccagtcgtaggatgagaagagtgttcagacttcagagacatcagttcagcggccggctaaattcggacctgattgtagatatttacacctcaattattggttacctcttgtgacgactgacgaggcatcataatcgtcactaggataattgatcacgcatgtttttcgcttaattagtttctgtgtatacatacgaagtttgccgtatagctgataggctgctgatttaacttgacttctctttgttcggtattagaccccaagatcaacatttacgctgaacagatgctttgtaacagtgaaggaatattttatggtttttc

SEQ ID NO: 38669 - DNA, 813 bp, Zea mays
  Clone ID: MRT4577_13526C.1
cgggctacaacttatcatgcattgacccacgaaagggtcgctagctaagttggctaggtggcctgagtagctctcctcatatcctgagttcgactccccgtgaaaacacaaattttaggtcagggttaaaaaaaaaattatcgtctgtcccactcccacgccaagtggggctgccttaccccatgcaggttgagtcataatgcattaacccaattgtttgggcctagaggctttgttattgttgttgacttgttgtttcgaggttatgagcaccattgtttttacataaatgttgacaagttgcaaacagtcacacagaagatcatccatgaccaaaggacctttttttgtcttaccagcttctcggacaagtagttggccaggaatgctcctccaagaatagcaaaggctgttgcaatcaagtgtccagcaatggctccactagcaacgcccaaaggagactgcaaaaataagacagctcacagcttagtaaatgcttacatcagccaaatcaaataacttaaaattgaatatttgtaaacaaaactctcaacccgacctgagcagcacccaaagcaattgtagcaagcatagagcgatctccccactcctacaggtgcagaacatttggcaagcagtaagatggttgtttgacaatatctaaggaccacggtcccaaatgttcttggcaaataattttagtgtaggagatacagcttacagcaaagaaaacaagactgaaggacttccaaaggacttcaagagggctggtgagatttttagaagactgttacaaagtaactgactttcagc

SEQ ID NO: 38670 - DNA, 590 bp, Zea mays
  Clone ID: MRT4577_135270C.1
accgcgacgacccccgctacgtcatcaccacctacgacggcgtccacaaccacgcaagccccgcagccgctgccatcagccagtacggcggcggtggattctatagcccgccgcacagcggctcgccgtcggccgcctcctactcgggctccttcgtcctctgacttctccgggccttgacccagagtgatctacctgctttatcccagtcgtaggatgagaagagtgttcagacttcagagacatcagttcagcagccggctaaattcggacctgattgtagaatttttacacttgtgcagtacaagttatactatttaagctagaagcgaagcgtactctacttacacctcaattattggttacctcttgtgacgactgacgaggcatcataatcgtcactaggataattgatcacgcatgtttttcgcttaattagtttctgtgtatacatatgaagtttgccgtatagctgataggctgctgatttaacttgacttctctttgttcggtattagaccccaagatcaacatttacgccgaacagatgcattgtaacagtgaaggaatattttatggttttttcagat

SEQ ID NO: 38671 - DNA, 374 bp, Zea mays
  Clone ID: MRT4577_135271C.1
accacaaccaagggtaaaaccctttttttttttttgggcgggtgggagtccaccaagtttggggggtggccatacaacaaccttttgcaaagctttcaggggtcacttattgtttggcacccctttttttaaatagcccaatgggggtggttttatttttgggaggagcttaaaaaatcacccggaagggaattgcccccattactttaaaatttaaaccaaccttcccagggggggagaggggggggggctcaattttagtaaaacttgaggcccattccctcggggaccttgtaatccttgggggggatgggggccttgtaaattgttgaccacttttggatgcggatttttttggggggggttcccgtttg

SEQ ID NO: 38672 - DNA, 191 bp, Zea mays
  Clone ID: MRT4577_135273C.1
gcttcccattgcgtcaagagattcttctgcccctgtcgttcaaactgttgttcttaatgttgtcatccactgccatggcttcaataagaatgtcctgaaagttctcaagggcatccaatgctttcatgacgtgactgttgactcctcgcaacacaatgtgactgtgactgtcaccgtggactcctacactc

SEQ ID NO: 38673 - DNA, 210 bp, Zea mays
  Clone ID: MRT4577_135274C.1
gcgtgctgcaaagaattctatgatttcttgtacatgttttgctaatgcttgtgtctccttgattatataatattagtagcactgagaccccccacggtaatgtaacttattatgggctgcgtcaccattctcctgtaaaatagtactggacagacacaggaggggcccttggcttcctgtctggcccacatacaatacacagcttgtata

SEQ ID NO: 38674 - DNA, 581 bp, Zea mays
  Clone ID: MRT4577_135275C.1
acaagctttttttttttttttttttttttttttttttttttatttttttttttcttttcctcctttggagggggtccatcccagcacaggggggggcggttttaggggccccgggcgcccccccccgcggggcccaccccggggggggggggggccccgaaaaaggggggggtccgatcacaacccacacaagatcccgacccgaaagcaaaaagagaaaagccgggggccccaagggagggaacaaacggaaaagaagcgcgggacacacccggcccgctggagaggggaaaaaccgggcggccccagggaaaaaaagaacccccccacgcccggggaggggcggggagcggttggggcccaaaaaccctccccaccccaccgactcaaagaaaccggccgcccgggggggggggggggggtcagttcacggaagggcgccaatccggctccccacaaaggggggggaaagcgggggaaaaaaacaggggagggaagggcccacaaaaggcccggaacaaaggaagggccccggaggggggggtttaccagaggccccccccccgtgcacacaacaaaaa

SEQ ID NO: 38675 - DNA, 386 bp, Zea mays
  Clone ID: MRT4577_135276C.1
ggccgcttttttttttttttttttcgaacacgcaggatagctgcgtatcattgtattaagaagaagggtctaaaaattagaccaattacaaacacaacagataaagaaatataaagaaaatgaaaaagaaaaagaaaaaggagaataaagaaagcaaactagaccaacctgcccccacattctaaacttaaccaatcatcacccttccctaatgaggttaactactgaactcactcctatttctttacatgacacctggattgggatcttgttttaagggcatgatgttttgtctctgtataatttctaatattaatttcttcttcattttttctgatttttccctttatgctatgtgttgttctatcattaatacatttcttttt

SEQ ID NO: 38676 - DNA, 271 bp, Zea mays
  unsure (1)..(271): unsure at all n locations
  Clone ID: MRT4577_135277C.1
aggggggaattttttcctgcattctcaattcatgtgggnnntggaattcatagccaaccctaatcccttgcttttccaaagggaacctaaaatctggcacgttttcnnaagactacaggaaccgaagtgttccttgacttgaaccatcttagcggatacattccggatgcttgggccatcggttggcgcttcttgggagcacagtaatccaagggttagcagctgaaaaatgcacttgtgcaccttagtgttcctggctcgagtaccactg

SEQ ID NO: 38677 - DNA, 297 bp, Zea mays
  Clone ID: MRT4577_135278C.1
aaacccggggcgagccacgcgtccgctgctcctggacgacatgcagaagtccgtctacccgtcccgccgcctcatcatcctggggtccatcaccggcaacaccaacacgctggccgggaacatcccgcccaaggccgggctgggcgacctccgcggcctcgcggcggggctgcgcggccagaacggctctgccatgatcgacggctcccaaagcttcgacagcgcccaaggcgtaccaaggacaagcagaatcttgcaacatgggctcactcatgctaggagctttgcaccggcggg

SEQ ID NO: 38678 - DNA, 258 bp, Zea mays
  Clone ID: MRT4577_135279C.1
cggccatccagcctctggcgagcgtgcggccagtcaccagcaccagcatggacagcgccatagagtgtggagtgcccttgattcggtgctgctcctgatttgagtctgactgtcgacggagatgctggcgataccacagctgggctcgcagcgatgctggccagtggtgacaacctcaagcctcatccataagccttccttcatctgcatctcaccatcttctaaccatgtggtaaatagggccacaacccatctagg

SEQ ID NO: 38679 - DNA, 538 bp, Zea mays
  Clone ID: MRT4577_13527C.1
acgcaaccctgatgtatgggacgaccctcttcgcttcgaccccgaacgccacatccctttgagccccgagatggaggtctcactcgttgagcgtgatctacggtttatctccttcagcactggtcgtcgcggctgcatcgctgcagctcttggcactgatatgaccatcatgctcttcgctaggctcctgcaggggttctcttggagcaagatgaccggggtggcggccatcgaccttagcgagtccaggcacaacactttcatggcacggccactcgtgctacaggctaagccacggcttccagcgcacctctaccccgggatcttgctttgtaagtagtcccaaataacggctgagcatgtagaaaatttcaccacttatacatgcttaaaatcgaggaatgagagaaagcgcgagaggaatagaaaaatagatgtgtactgctggttttctgaacggttatatttaagatgtaatgaatactattcatcgcctgaaaaaaaatctgtaaatcaggcatctgaaaaatagcagctc

SEQ ID NO: 38680 - DNA, 326 bp, Zea mays
  Clone ID: MRT4577_135280C.1
gcatagcggcaacacttagagaggatcgttgcacttaacagtatgaagatggtcatcgggctcggcgagtgtctggctctgtcagctgccatcttctatgtaatgctgatgccttgcccctgcgcggtgatgcatggattggacggatctgtaaccggtctgaccactataatgggcgccggcgggctgaacccctacacggagaacctgatggagacgtaaagcaacccgatggaggaggaaacctactacgccgggtgtgggcggacgagctccatgtacgagccgctccagtaactgtgttgccatcagcagatcaggatgat

SEQ ID NO: 38681 - DNA, 1077 bp, Zea mays
  unsure (1)..(1077): unsure at all n locations
  Clone ID: MRT4577_135281C.1
nnnnnnnnnnnnnnnnnnnnnnnnnnnnnnnnnnnnnnnnnnnnnnnnnnnnntcattgggtacctcgaggccggccgggggcgggctcgctccttcttgcggccggggccggggactcccttcccgagcacactagtctctcttccctgcgcttgctcgctccttcttgcccccatggcgctgctcgccgtccagggcatggccatgtccaccgccgccgcggccctcccatctcacaaccacggcgccgtctcatcctacgtctccacctcctcctacgcgctcgcagcctccgccgccttcccccgcgcccgggctgcgttcgccgtcggcgccgtcttgtcggccaccgtcactccagttcttgacgtctactgcgggagaggggacaagaaaacgaaaaggggcaaaaggttcaaccattcatatggcaatgcgaggccgcgcaacaagaagaagggaactgggcctgcgcggctctttgcccctcctgctcctccaaggaaggatcagttcgatgatggggagatcatttcaatcgagattgacgaggacatcctggaataggttgtccgagttctgccttgctttatatttgccctgagcttaattggcctagtttgtaccaaatcaaatactacatattttaagtaattatttcctcgcctataattatcgatgggtaggctgccacactttcatttggctagtaatgttcctactacagaaaaaaaatttccaaaaaaaaaaaaaaaaaaaacttactctcttcaaaatgaaactgtgtcgaaataagttttttttagaagatattaaatgattcatctagtggtaacggagagattacacgtttcatttgtaaggggattaataagatttaatctctttcaatcctcttctaaccgaacaatccagccctaacaggtaaaacaaaatccaactagcgatttattcatacgtcagcaatgtgcaaagatcttgcgtgctgaactaatgatcgtgttgtgttattaatatgtgttgcaatgatgtaagttttgtttcaaacttcagctaacacttttaggtctcttgct

SEQ ID NO: 38682 - DNA, 206 bp, Zea mays
  Clone ID: MRT4577_135282C.1
tagagacataggctttgttttaccttcagttagctttgtttttaccttcagttaaacagactacagctagttacagagattcctaaattgtcaccgttttcgtccgctcactgctttgttaactttttttccactgaccccctgaagaattgtgctcaatgtagccaattagccagggaaaaaaaagaaaaatactattttctatt

SEQ ID NO: 38683 - DNA, 891 bp, Zea mays
  Clone ID: MRT4577_135283C.1
ccggccgggtagcggcgagaccgagccgtttaaataggtgtcaagtggaagtgcagtgatgtatgcagctgaggcatcctaacgaacgaacgatttggccggaacattcccgagcacactagtctctcttccctgcgcttgctcgctccttcttgcccccatggcgctgctcgccgtccagggcatggccatgtccaccgccgccgcggccctcccatctcacaaccacggcgccgtctcatcctacgtctccacctcctcctacgcgctcgcagcctccgccgccttcccccgcgcccgggctgcgttcgccgtcggcgccgtcttgtcggccaccgtcactccagttcttgacgtctactgcgggagaggggacaagaaaacgaaaaggggcaaaaggttcaaccattcatatggcaatgcgaggccgcgcaacaagaagaagggaactgggcctgcgcggctctttgcccctcctgctcctccaaggaaggatcagttcgatgatggggagatcatttcaatcgagattgacgaggacatcctggaataggttgtccgagttctgccttgctttatatttgccctgagcttaattggcctagtttgtaccaaatcaaatactacatattttaagtaattatttcctcgcctataattatcgatgggtaggctgccacactttcatttggctagtaatgttcctactactgactgggttctttattttcctttccagctgctgagttctttactctcttcaaaaaaaaaaaaaaaaagcgtaagtttttttcttaaatgattcatctacaggatacactttcatttgtaaggggattaatgacgattaaatctctttctattgaaaacaaaaaaaaaaaaagcccctaa

SEQ ID NO: 38684 - DNA, 789 bp, Zea mays
  Clone ID: MRT4577_135284C.1
ctccgagggccggccggggggcactgggtacctcgataagggacggaccacaccaccattccgagcacactagtcttccctgcgcttgctcgctccttcttgccccccatggcgctgctcgccgtccagggcatggccatgtccaccgccgccgcggccctcccatctcacaaccacggcgccgtctcatcctacgtctccacctcctcctacgcgctcgcagcctccgccgccttcccccgcgcccgagctgcgttcgccgtcggcaccgtcttgtcggccaccgtcactccagttcttgacgtctactgcgggagaggggacaagaaaacgaaaaggggcaaaaggttcaaccattcatatggcaatgcgaggccgcgcaacaagaagaagggaactgggcctgcgcggctctttgctcctccagctcctccaaggaaggatcagttcgatgatggggagatcatttcaatcgagattgacgaggacatcctggaataggttgtccgagttctgccttgctttatatttgccctgagcttaattggcctagtttgtaccaaatcaaatactacatattttaagtaattatttcctcgcctataattatcgatgggtaggctgccacactttcatttggctagtaatgttcctactactgactgggttctttattttcctttccagctgctgagttctttactctcttcaaaatgaaactgtgtcgaaataagtttttttgagaagatattaaatgattcatctaaaaaaaacctaaaaatagcggcc

SEQ ID NO: 38685 - DNA, 262 bp, Zea mays
  Clone ID: MRT4577_135285C.1
cagacgcgtgtccttaccattcatcgtatgctgaggccaatccacgctttcggggtacacggcaaagtttgaaacagggctgattactacatactcagctttggtcgttcatctgtttatagacaacttcaatgtctaccttccgatttcgtcttgatttggacacaactcgcttctgtcaaaaatccttgatttgctacaggttcaatgtcgggcgtggccctcaacctgaaaagcggcccttctcacaaaaccttccact

SEQ ID NO: 38686 - DNA, 2079 bp, Zea mays
  Clone ID: MRT4577_135286C.1
tgcctccatctgttgtcaatatcaagggagaagatcaccactgctattttcaacagttcggggagttggcttgtctttggatgtgccaaacttgggcagcttctggtgtgggagtggcggtcagagagctacattttgaaacagcagggacactactttgatgtgaattgcatcgcatactcaccagattctcagatattggccactggggctgatgataacaaagtcaagatctggacagtttcatctgggttctgtttcataacattttcggagcatacaaatgctgtaactgcggttcattttatggccaataaccattctcttctaagtgcctcccttgatgggactattcgagcatgggatttgtttcgctatcgcaacttcaggacatttaccaccccttcacctaggcagtttgtttctttaaccgcagaccagagtggagaagtcatatgtgctggaacacttgattcgtttgagatatttgtttggtcaatgaaaactggtcgattgttggatgtactcagtggtcatgaaggaccagtgcatggtctaatgttttcaccaattaatgctattctggcttcatcatcatgggacaaaactgttcgcctctgggatgtctttgagagcaagggtgcagtggaaacttttcagcactcacacgatgttcttactttagcttatcgacctgatggaaggcagatagcatgcagtactttagatggcctaattcatttctgggatccatctgatggtttgttgatgtataccattgagggacgcagggatattgctgggggtcgcctcatgacagataggagatctgcagctaatacaagtataggaaagtacttcacaacattgtgctattctgctgatggaagttctattttagctggaggaaacaccaaatatatttgcatgtatgatgttggagaacaggtgctgttgcgtaggttccagatcactcgcaatctctcattggatggagttcttgattttctgaactcaaagaagatgacagatggtggtgcactagatcttattgacgatgaagacagtgatgttgaagaaggaattgatcgacatactagaggaaacttagggcttggtttacctggatcaatggcaaatcgtggaagacccatggctcggacaaaatgtgttaagtttgctccaactggaagatcgtttgctgcagcgaccactgatggtgttttattgtactcagttgatgaatcatttatttttgatccaacggacctcgacatcgacgttacgcctgagaaagtagaggaagctcttgcagaaaaccaacaacaaagagcccttatacttagccttcggttaaatgaggatttattgattaagaagtgcatattcgcagttgatccagccgatgtgagagcaatttgttcggcaattccttacaagtatctccaaagattgattgatactttcgctagtctcttggaaagttgtccccatctggaatttatcctcctgggtctcaggagctatgtaaggttcatggccactatattcaacagaactccagaactttgcttccttctctgaaatcattgcagaagtctataacaagactacatcaggatttggcagatacttgctcttctaatgagtacttgttgaaatatctttgcactgctggtacgaagaattaggttgtgctggaaaataaccttgcaccgatctccctgacggtttctataggaggttgatgtgcttgcaaacccagacgcatgcgagctctgagcagttctgcttgggacctctagggggattggcatccgggcttaatcctctgggcagtggctgttgtgttcagaactactgagctgaagcaacaatgtaacatgatcgatcctcaggagaaagttgagctgtctggttttgtcagtgaaacgagagaaaaaaatgtcgggaacgattaaagttatgtaacttaccgtgttatcaaatgtttggaccagaactggaaattgatatttgtcatgaatcaaatagaagaaacatgttatattcactccaaaaaaaaaaaaaagcggccct

SEQ ID NO: 38687 - DNA, 701 bp, Zea mays
  Clone ID: MRT4577_135287C.1
attgacagcaaataactgaatgtggatcgtagggtcattttttctagcacacaatattgaacaaaaccctatagctcctctatggttctgccttctatacacacatatgtattttaaatgctgaaaaatgacgtcaggtaccaactgtccgtctatggattgtccctccttggcttgcaaaaactaaagggttgcaacataagggtcctggattatttctctcttggtaactactgaagcatgatgaaaatcactacacatatatgcgtggagatagctaggggacaacagaaggtccatgaatcctcaataccttgtgtacttttaatgccacagtctctacaccaccatggctgatggatcacactatcgagtcagcgatggtggactggttctcaggcgcagctggtctttgcttctgatcctcgccaacgtgcctaggggacgatacggcagacgacgacgacgaggaggaggaggacgacgctaccttgcgcgggcttgacggcatgtgcagcctccgcagctcgctcatggggcttctcgggctcaggagcagcggcggcggctgcatctgtggctgtacgggttctgctacctgagggtgctgccgacgatacagaacctggtgaacaaagtggcaggagcttcgctgacgcagagaattccaaaatggagtggttcctgggataatctctgtg

SEQ ID NO: 38688 - DNA, 606 bp, Zea mays
  Clone ID: MRT4577_135288C.1
ccggccggggattctcccggccgtgtttctcgccatccgcgtagactcggcttcacccccaacctcgaatcctgatcggtcgttgatcccgattccggatcttgccttgggcccttgacttctccgtcgggcctctgcgactctgctcctccctccgcctctccagttgcgcctctacgccctaccgagccgcgccctcaccaggtcttcgcgggcgaagaagggatcggaggcgccatcaatttctcgccgctagtctgacgccgccgctaatccgctccccactcgctgatagccccagcgatgctaccatcggagcgcgaggacacgcatcatctgaaaagcaagttggtgacactggattctcaagtgccaggagaagagcaggtggtcgaagaggagccgcctaacactgaggagttcgatctgatctaggtggcgtgtctcggtcgacattggcgccgacgatccttagatcgttttacatttattcctttatgttgaaataagccgtccgctatgcaataattactctgatgtcctatgacatgtatctctatgcactctgtgatgatcaaaggaaaaaaataacagaaatttgcggcc

SEQ ID NO: 38689 - DNA, 746 bp, Zea mays
  Clone ID: MRT4577_135289C.1
cggttcccctcatccgctgcacgagcgcgacgcacggcggcctcctcgagtcctcgtcccgtgccgtgcgttctcggcgagtcggctctcctgccggccgggcgcgacccagtggccgcgtggcgcgcgccgtgctctcccgctccacgcacacgcttcgctgccagagcaatgccgccccctactgtccccttcttcctcacctctactacgctcgccaccaccgcgaagaaaccgcagccgcaatcgccgttatgcgatgcgcaagcccaggccgccgctgcctccctggcctcggcggcgtctgcttcgtacgccgcgcgcatgcggctcaacccgcacctcgcgctccgcctgttcgaccacctgctccgctcgggcgctgacccggaccccgcggcgtacgagctcgctttcgcgtcctgcgcgcgcgccagggaccgtgctacggccgcgcagcttcacgctcacgccgccaagcgcgggctcgtcgcctcgcaccgccgcgtgcgctgcaggctcgtccacgcctacgccgtttgcgggatgctcccccacgcgcgcagggtgttcgacggcggcaccgacaacgacatggtcgcctggaactgcctgctgcgcgggtacgcgcaggagggtggggacgaggacttgctccgcgatttctttgcccagatgccgtcccgggacagcgtctcatggaacacagtcctttcatggtgcgtcgtgaatggggagtatgatga

SEQ ID NO: 38690 - DNA, 394 bp, Zea mays
  Clone ID: MRT4577_13528C.1
ctgtggcctgtgggataattctgggcacagcgcctggctactcgatatccatggctatctcttgggaacagatccaaacttaccgacacgtgcgcatcgacacgtacgctagtgctagacctgagcgcgaacgagcaggctaagccaaggccgatttagcacgcgctgtgcaccgtctagatgtgggatgtcaagttcgggaagaacctacactacaacgcctacagcttgcaccaaggtatccagtaatgcatgttccatggatgaagattctctctcttctgcctcaccaccaacatgaggatgtaccgagagacaaacattgactagtactttgaccacacacacattgtccctgctgtgccatatattgatcaactgcacgacgaacagg

SEQ ID NO: 38691 - DNA, 156 bp, Zea mays
  Clone ID: MRT4577_135290C.1
aaaaaaaaaaaaaaaataacaaaaaataaatataaaaaagaatcacaaatgaagtccgataatagaagctaaggtcagacctactcgagcatcctacataatatatattgtaaagtgacatccaaaactctattacactggcacgacattttacaa

SEQ ID NO: 38692 - DNA, 313 bp, Zea mays
  Clone ID: MRT4577_135291C.1
caaataccaattcactgagaccccgtctagctctcgtcttccttctgtcttcccagctccaatctcggatctcctttcttctaccttctgtggtgctaacaatatggtatcagaaggaccgatcctcgtggagaatgattttgccacgttgcttgcggacttgcggcgtgtgagaagcgtctcactgctagcatcgaaggtgcgcttgccaggtgttcggcacaatgcccgaacgccttcggcggcttcacggcaactgcaactccggttccagcacttgccaacgacgaagcggtcttcgatgcgtggccta

SEQ ID NO: 38693 - DNA, 360 bp, Zea mays
  Clone ID: MRT4577_135292C.1
aaggttatgtgttttttggaaaaggggttttttttttttagaaacaatgggttgtaaaaaataaatagggggcttacaaaatcaaggggggggggggaagggttaagaggctattgggggttgggcttaggtccaaggtaggaggaataaataggaaaggggggcagaacccaagtaagggtttgatttaagaaatggggccctcccggaagggggggtttgaggaacgcgttagatttaaaaatactaaggtgattcaaggagccagtaccagttaaaaagatataattggtttaaaggggcatatgcagggttaaaatttgaaataaaggatattaggacagggaggggttaattttt

SEQ ID NO: 38694 - DNA, 231 bp, Zea mays
  Clone ID: MRT4577_135293C.1
gttgggccccttggttcaacccggaatttcgggacgggtccttgaggggttccaatttttccttatagggggtcgtttaaaagttgggggaaataagggaaatagttttttcttgtggaaaatttttttccgttaaaatttcaaaaaaaaatacaacccgaaacattaaagttaaaaccttggggggcttaaggggggacttaactaaatttatttgggtggggttaattg

SEQ ID NO: 38695 - DNA, 278 bp, Zea mays
  Clone ID: MRT4577_135294C.1
cctcgagccggccgggccgggatactcaacctacccagcctcggccagtcacctccccgtcgctctcacgctcttcgtgtccgacgactgcactcttcccctacagctacactcctgcgcgactgacacacatggcctgccatcacacagatcttcacgctcactcggtagaacatgtctgaccaaggcaagtgaaatcaaattctctactgcttctgccctggagaagaaagggaaacgtgttagatagacgtaggaaaccgtagcccatgagatgc

SEQ ID NO: 38696 - DNA, 857 bp, Zea mays
  unsure (1)..(857): unsure at all n locations
  Clone ID: MRT4577_135295C.1
gccggccgggccgggaaacaaatctgccttgtctctgctgccccagccccaactctgctccaaagcttcaagcatcagcaaccccctccaccacctcttcctcctcggtcctcacctggagttgtagcaagcagcaccacatcatatcacagcagagcagagagtggggtgaagcagggagctgggcaggagagccccaacggcctgtcctgccgcggccatgcgtttctctgcgctgctcctcatcgtggcgctgctctgcctcggcggcggcggtggcggccgcgtgacggcgtccaccgaattcaacttcccggcggtgttcaacttcggggactccaactccgacaccggcgggcgcgtggccgccggcttcgagtccatcttcccgccctacggctccagcttcttcggcgggcccgccggccgcttctgcgacggccgcctcgtcatcgacttcctcaggttcgagcacgccactcaggcgtgctgtggatacggaggcccacccctgaactacgatggtaacgtaccatgtggacacacggtgtctctggatggtaagatggtcaccgcaaaagggtgcagcgacactactgaattcgtcaactggggatgggatacattacacggaagctgcgaatttccatatcgcctcgcagatcctgaccgggaagtattctgatccctcgttcgtgggatagatgccgttcgtcataaaacctagatttctgatggcatacnattttccctctttactcaccactttacagcaccggttgcagatacgatgtatacttattacttggccatanncatatatagcttgagtaaaaatcatatatacggcttggttt

SEQ ID NO: 38697 - DNA, 828 bp, Zea mays
  unsure (1)..(828): unsure at all n locations
  Clone ID: MRT4577_135296C.1
ttttccaatctgccttgtctctgctgccctggccccaactctgctccaaagcttcaagcatcagcaaccccctccaccacctcttcctcctcggtcctcacctggagttgtagcaagcagcaccacatcatatcacagcagagcagagagtggggtgaagcagggagctgggcaggagagccccaacggcctgtcctgccgcggccatgcgtttctctgcgctgctcctcatcgtggcgctgctctgcctcggcggcggcggtggcggccgcgtgacggcgtccaccgaattcaacttcccggcggtgttcaacttcggggactccaactccgacaccggcgggcgcgtggccgccggcttcgagtccatcttcccgccctacggctccagcttcttcggcgggcccgccggccgcttctgcgacggccgcctcgtcatcgacttcctcatggaggcaatggatatgccactcctcaacgcgtacctggattctctaggcacgccaagctttcggaccggcgttaattttgctcaagctggatgttcgatcacaccagcaaagccgacatcagtcagcccattctcatttggtctccagatcaagcagttcttcgccttcaagaacaaagtcactaagctcctgtctgaaggagatatgcacagccgatacattcctcagcaagaatacttctcagagggactctacacgttcgatattgngcagaatgaccttgctgaaactgtatgaccagggntgctagggaagntctggattcacaacacggccccctcggttgcttgcctcanaacattgccctcttcggcaa

SEQ ID NO: 38698 - DNA, 466 bp, Zea mays
  Clone ID: MRT4577_135297C.1
taccctcgggctcgccggggcctagttgtgcccgtctgtcactaagcacgcctcctagaaacctccatatctgtgcctgcaagccccccgttcctcggcaacaatgccgtccagatggacaccgtcgcgcccctgcaactgaaagcctgcgccggcgacgccgtggagaagctgctgctcgccgtcgcagccgagggtcctatctgtggtgtgccagacttcaagatgaggggagagaagagtgatgagctccaacctgtcgatgctggcgacgaagattatgatgggggtgacgatggagacgaggatgcgtgactccgggctggaggaaaagaaggctcacctgatggagatccaagtcaacggtggtagtgttgccgacaaggtcgactttgccgaagtccacttcgagaagacctttgatgtctcatgaatcttcgaacacaacgagaacattgatgtgatt

SEQ ID NO: 38699 - DNA, 1518 bp, Zea mays
  Clone ID: MRT4577_135298C.1
aaatcaatctgccttgtctctgctgccccagccccaactctgctccaaagcttcaagcatcagcaaccccctccaccacctcttcctcctcggtcctcacctggagttgtagcaagcagcaccacatcatatcacagcagagcagagagtggggtgaagcagggagctgggcaggagagccccaacggcctgtcctgccgcggccatgcgtttctctgcgctgctcctcatcgtggcgctgctctgcctcggcggcggcggtggcggccgcgtgacggcgtccaccgaattcaacttcccggcggtgttcaacttcggggactccaactccgacaccggcgggcgcgtggccgccggcttcgagtccatcttcccgccctacggctccagcttcttcggcgggcccgccggccgcttctgcgacggccgcctcgtcatcgacttcctcatggaggcaatggatatgccactcctcaacgcgtacctggattctctaggcacgccaagctttcggaccggcgttaattttgctcaagctggatgttcgatcacaccagcaaagccgacatcagtcagcccattctcatttggtctccagatcaagcagttcttcgccttcaagaacaaagtcactaagctcctgtctgaaggagatatgcacagccgatacattcctcagcaagattacttctcagagggactctacacgttcgatattgggcagaatgaccttgctggtgagttctattcaagaacagaggaccaggtcatcgcatccattccaactattttgctggaatttgagaatggtctcaagaaactgtatgaccaaggtgctaggaagttctggattcacaacacgggccccctcggttgcttgcctcaaaacattgccctcttcggcaaagacccatcccaactggacgagctccactgtgtggcgaagcacaaccgtgccgcaaagcctttcaacttacagctgcacgcactttgcacgaagctgagggcagaattcgatggagccagcatcacttacgtggacatccacacgatcaaatacagcctgatcgccaactactctcgatacgggttcgagcacgccactcaggcgtgctgtggatacggaggcccacccctgaactacgatggtaacgtaccatgtggacacacggtgtctctggatggtaagatggtcaccgcaaaagggtgcagcgacactactgaattcgtcaactgggatgggatacattacacggaagctgcgaatttccatatcgcctcgcagatcctgaccgggaagtattctgatcctccgttcgtggataagatgccgttcgtcataaaacctagattctgattggcatacaattttccctctttactcacccactttacagcaccggttgcagatacgatgtatacttattacttgccaataaccatatatagcttgagtaaaaaaatcataaaaaaaaagggcgccgctcgcgatctagcccacgcgtccgcccacgcgtc

SEQ ID NO: 38700 - DNA, 1510 bp, Zea mays
  Clone ID: MRT4577_135299C.1
ctccaccacctcttcctcctcggtcctcacctggagttgtagcaagcagcaccacatcatatcacagcagagcagagagtggggtgaagcagggagctgggcaggagagccccaacggcctgtcctgccgcggccatgcgtttctctgcgctgctcctcatcgtggcgctgctctgcctcggcggcgggcgcgtggccgccggcttcgagtccatcttcccgccctacggctccagcttcttcggcgggcccgccggccgcttctgcgacggccgcctcgtcatcgacttcctcatggaggcaatggatatgccactcctcaacgcgtacctggattctctaggcacgccaagctttcggaccggcgttaattttgctcaagctggatgttcgatcacaccagcaaagccgacatcagtcagcccattctcatttggtctccagatcaagcagttcttcgccttcaagaacaaagtcactaagctcctgtctgaaggagatatgcacagccgatacattcctcagcaagattacttctcagagggactctacacgttcgatattgggcagaatgaccttgctggtgagttctattcaagaacagaggaccaggtcatcgcatccattccaactattttgctggaatttgagaatggtctcaagaaactgtatgaccaaggtgctaggaagttctggattcacaacacgggccccctcggttgcttgcctcaaaacattgccctcttcggcaaagacccatcccaactggacgagctccactgtgtggcgaagcacaaccgtgccgcaaagcttttcaacttacagctgcacgcactttgcacgaagctgagggcagaattcgatggagccagcatcacttacgtggacatccacacgatcaaatacagcctgatcgccaactactctcgatacgggttcgagcacgccactcaggcgtgctgtggatacggaggcccacccctgaactacgatggtaacgtaccatgtggacacacggtgtctctggatggtaagatggtcaccgcaaaagggtgcagcgacactactgaattcgtcaactgggatgggatacattacacggaagctgcgaatttccatatcgcctcgcagatcctgaccgggaagtattctgatcctccgttcgtggataagatgccgttcgtcataaaacctagattctgattggcatacaattttccctctttactcacccactttacagcaccggttgcagatacgatgtatacttattacttgccaataaccatatatagcttgagtaaaaaaatcatatatacggcttggtttcagttgtccaaaaggttcagcttttttttttctaacggtcttttctaagaatctgattatgtagagaatttggttgtaagtgagtatataggatttagaatctgaaagtaaagtgtggatttctcttattgcggcaactcaattggttgtgggttcgcattgattttaaacattttccccc

SEQ ID NO: 38701 - DNA, 494 bp, Zea mays
  Clone ID: MRT4577_13529C.1
tttttttttttttttttttttttttttttttttttttttttttttttttttttttttttttttttttttttttttttttttttttgttttaatctttttttttttaagttggttgactttaaaagggaaaaaaaagggccctagggggggggccagctaaggcaaagaaaaacaacaaaaaaatggccaaaaggggcaaaggtccgcccaaccaaaaaaaaaacggccaaaaaagggaaccaagcccaagggcaaaaaactccaaaacaacgcctttaacggcaacacaaacaaccaaaaaaaaaaaaacttcaaagccttaaaaaaaaacgccaacccaattggtgaagaacctcaaaggaaaaagccacaaaacttcccttaggaacaccgccccccaaagttggacacaaaaagcaagacattggagccctggttccccaaaccagccaaaaaaactttcctgtaagaagggccggtaacccccctagttg

SEQ ID NO: 38702 - DNA, 342 bp, Zea mays
  unsure (1)..(342): unsure at all n locations
  Clone ID: MRT4577_1352C.1
aaaaaaaaaaaaattttttttttaacctggggttggaacctggggggcttgtcatacatgtccccccctgcccagacccccaaaatttaacctttttttggctgggtgctgcctttttttttttccaaggtctctttatnggataactgtttgtttgggatgggggtttccaaccaaaataaatggtgtaagcaaactttttcgggccttttaagcagtttacaaacccccgtttttttacaaaaactataagggccgcgtggtgggtctcacatttttaggccctccggccccccttttttttttttgaacataaccttttttttggccttcttgaaggcg

SEQ ID NO: 38703 - DNA, 106 bp, Zea mays
  Clone ID: MRT4577_135300C.1
agctgctaattataatggaccttaaagccaacgatctcctgtatcaactagcgggcaccagtcaacaaaggatacgtgaattgaaagatcgctagaagctgattga

SEQ ID NO: 38704 - DNA, 518 bp, Zea mays
  Clone ID: MRT4577_135301C.1
aatctcctcactcgtcatactcctctatgtgctaatcctccctacgtcgccgatagcgtcacatctggtatgcggctgtaacggtatctctgggacttataggagagataagcgatttgacgagatgcgactagttccacacgtgcggtgttcagagaacagtcttcttccgtgcctcgtccgactaaacgcgcagctcccagatggccgagctcgtttatgcatacagagatattgttactctcgtgtaccgtagcttgacagactggcaaatacttgttatccatgctatctgagagatcagaatcttaccagagaataaagtcttgtgagaagggtctggagatagttggagactcatcggtctcacgtctactggcgaatgacaataacacctactacactttgtgactctcctggtgtgatgtgagtcctcactgacatagtacacgtccaggtaatcatgatgctatgcgatcatgtgcatcaacatctggagttccgagtgcgcacctctg

SEQ ID NO: 38705 - DNA, 437 bp, Zea mays
  unsure (1)..(437): unsure at all n locations
  Clone ID: MRT4577_135302C.1
gttacaacaccttttttttttntttttntttnnttttttttttttttnttttttnttttttttttntttttttttggaacaatactttttggaacaaaactcaattgttcaaacaggaaatggcccacacggacactgccccccatggcgatgcccgccacagtaatacccaaccaacgccgacaaaagacccaaccagcaaggacgccagcggctatcccaccggccataattcctccacccacccgggcggcccctccccaggggggaattccaaaacaggggaggcccacacaaggggggccgagcccagggccaaccagggcggaaccaaggtcagagcaatcaccggggaaaaagtgtcctgcgggaaaaagtccacacaacacacaaccccaaaacaaaaaaggcaaaacccggggggccaaaggcggggg

SEQ ID NO: 38706 - DNA, 264 bp, Zea mays
  unsure (1)..(264): unsure at all n locations
  Clone ID: MRT4577_135303C.1
cttctctaagatcacatgatgagagtcttggcggtggtggccatgctggccaccgccttcttcgctgtgcccgctcgcgccgagcagtgcgggtcgcaggccggcggcgcgctgtgccccaactgcctgtgctgcagccagttcggccggtgctccngcacctcctactactgccccagccactcacacaaatcgtgtcaccaagccagacctcgtgtcgttgaaccagccaatccccgggtccacacccccccgagagagacc

SEQ ID NO: 38707 - DNA, 320 bp, Zea mays
  Clone ID: MRT4577_135304C.1
ggggccaaaataaatagattggttctttttaaaaatgacctgaatgggttcaattttttacgggggggcaaccttcaaattggcccgggcataccattggttacacttcggataaaaaatggggggtttggatccacctgtttttttctttgggggggtgggaaccccacaagcgggttttggttgcttgttttaaaaaaaaaaaaaattttcttttaaaaaagtggacggggccttaccaaaaaggtggtttcctaaataccccgaaaaattctgaggtttatgaaatataacagggtttttgttaaattgaaactctt

SEQ ID NO: 38708 - DNA, 578 bp, Zea mays
  Clone ID: MRT4577_135305C.1
ccgggatacccatacaccaaggatccacactcagatatccaacaacacagagcggctgagcacggactcatcgacaccgtcagcgcctgcgtgactgccaccatgcgtgctcacccgccccgatcaccagaagcactggtctacggctcgcctgcgttcaccacgaggagcgagaccatgagcagcacctacaccaaagatgccaggaacgcgaccccagccaacaccacgggcgcaagcacgaccatgactcatggccacccgcgcggtgaccgcttcatggtgcgccacactggcgctcaggagaaatcgactgctcgcccagggaccgccctaagcctcggagtaccttcctcgccgctgctactgacctcccgggggctcgggatccatctggttcgtgactgcctgtacgcctcatgtatgtatgagaacgagcaggcccatcgtactctggctagtagacgtacctgcactgactcagatcctgtacgaattacgacgataagctcgtgacctgaataagacttcttcttaatactactacctacatcaccacactgaaaataatagatagg

SEQ ID NO: 38709 - DNA, 142 bp, Zea mays
  unsure (1)..(142): unsure at all n locations
  Clone ID: MRT4577_135306C.1
actagctctagatcgcgagcggccggtcctaaagatccaatcttacgtcacgcgcgcgtgccgacgttcanacactcttcttatagctgtcacgcgtaaattacacattgcacgtgcgccgtctgcttctacaaacggccgc

SEQ ID NO: 38710 - DNA, 921 bp, Zea mays
  unsure (1)..(921): unsure at all n locations
  Clone ID: MRT4577_135307C.1
cccacggggttttacactcggaccttccggtctttctgttggtaagccccaactctgtttctctgtaccattcgtttagttacttagacagttacagttttttatgatggaattccttaactctgtcttgtttattactactatatatgtttttatttttgtacattttttttctactatttttgtttttttttttttttttttatattttttttttttctttttttttattttttttttttttttttttttttatttttaatctttttttttttttacgtaataatttttgtttaattttttttcttttttttttttttgtttgtcaattttttttttatttttttttttttttttttattgtatttttatttttatgtttttctttttttttttatttttattttttttttttttttattattctacttttctttttttttttttttgtttttttttttttttttccttttttctttttttgtattttttttttttttttttttttttttatttttcattattttttttttttttttttctttttttttgttttttttgctttttttttttttttttttttttttgttttttttgtttttttttttttttttatttttttttttttttttttgtttttttagttttttttacttttttttatttttttttttttttttttttttttattttttttttttttttttttttttttttctttttttttttcttttttttttttttttttttttttttttttttttttttttttttttttttttttttattatttttttttttttttttttttttttttttttttttttttatttttttttatttttatttttttatttttttattttttctattttttttttatttttctttnttttttttttttttttttttttttttttt

SEQ ID NO: 38711 - DNA, 628 bp, Zea mays
  unsure (1)..(628): unsure at all n locations
  Clone ID: MRT4577_135308C.1
aattcggcacgaggctacccttcgtatggtgggggcccacctcgccgcccccacccccccgctgcccttctctcttccccgtctccgactccacacacctcccctttccactcgccgccggcgatcccgaaccgggagcaacgcacatggcaggccgggacgagaggtgtggggcgcggggcggcccgggggacacgcacgcgtcgacgagccgcgcacccgcgggcaccgccggggagtcggagggcgcgtcgccggactcgctgcggaacacgccctccaacatcgcgcggctggaggacgcgatcgggcactgcgcggcgcggcgcaaataccttgcgaacaccaagagcccctccgacggcaaggacgtccgctggtacttctgcaatctccccctcgccgacaaagtgctctcttcgtccgtaccgcggacagagatagtggggaaaggagactatttccggttcagcgagagggactctctggactggaggcgtctttcttggagagggagggaagtgctgcttgcatactggtggcgtgagtatgctgaatgcagtgcaggaccgagaggatccttggntgaaagtgatgattctgcatatcttntataggtggaggaaga

SEQ ID NO: 38712 - DNA, 255 bp, Zea mays
  Clone ID: MRT4577_135309C.1
tcggcttatgaggccttcgtgcggcgtgcttgctccatgggaaagcatcatatcatcagtttgtcagggttgtgaacaatccggagatcatcgatgaagccgatgtacacgtgcatggttaagttcaagattgtcagcctgaaagtcataaggccggtggagtacgtgcctgaactgactgatgagcagaaggaccaggtctcggtcgagcaaatatcgcaggtagtattctcggatgctgatcgcccaagccca

SEQ ID NO: 38713 - DNA, 649 bp, Zea mays
  Clone ID: MRT4577_13530C.1
cacggcggcactgccatgcctcgtcactacaagccgacctcattgagagtgaccaagacctcgagcgaaattctctgagcgagagcacgagcgatggagagcaaggtagaagcagaagcagtgcagctggcggggaagaagaagaagagcaccttcccgtcgtgggccgccgacgacgggggagtggaggccgccagcatgggcatcatggcgtcgtcgccttctgccgcctctccagcagccatcgtctccgccttcctcgcgcccccgctgtcgctgctgcgtcacgtcgcttctctctgcgccggctacctgggcctcgacggcggcctgaaacctcctgcgtcgtcgtcgtcttcagtagcaactgctgccgccgccgcagccgcttctcagcgaggcgaggtcgttgaggctgctgcatccgtcgtaagctcacatgcatcctcaacacggatcgatgcatatgcatgtcgggttattcagatcattaacgaactcctcctccctctgcaacaatgtttaaaatagctggatatatccgccgctatatccggatatagatgctacagaagggtggagataagataatcacaatttagcgctaaacggacagaaccgctaatagcggatattagcccgctaaaac

SEQ ID NO: 38714 - DNA, 131 bp, Zea mays
  Clone ID: MRT4577_135310C.1
cggtccgattcggtcggcggactggagaggctcaaatccccccttcaggccgctcgcgtctctcggtggagacggccttcccgactggcccgggggccttttcccccttagggccaagggttctggcggcc

SEQ ID NO: 38715 - DNA, 484 bp, Zea mays
  Clone ID: MRT4577_135311C.1
cttggcttggaacctttgggctgatttatgtgcttggctgctgatagttctgttaatcttcttgagtctgcgacttgttgttcgtgtctgtctgtggcggaatatgttaaaaattctgtgccttataaggccgacacttgcgataaagacggaccggaaaaggcccccgtcctaataagacccgacgtcgccacctaccccgtcggatcgaaagtcgccggagaaagcgcataaaagttcccgtcccaccacgattacaacgccgccggtataacaaactcctcggaagcaacggtagtctacggacgcaagaagccagcgcctctactactagtcgtagcccacgggctattcaagaatctatttcgtatcgaagaccccttctctatcttatacaatttacacggtagaattaaatccacggtagaggagacacgttgcgacactcattacccagaactcgaacggaacactaccccgtcca

SEQ ID NO: 38716 - DNA, 239 bp, Zea mays
  unsure (1)..(239): unsure at all n locations
  Clone ID: MRT4577_135312C.1
ttttgttttttccatttgtttttttttgaagattgggggggtttttcaaatngggggggttcaacttttttttaatctgaaaaaaatggttcttattgagtgacattttgcggggaataaggaatttaagaccatttttccgagatacattcaagggaaaggggcaattttttgaattttaaatttcttatggtatatttcaaactttttggcttataaaatatggggggcctttccgg

SEQ ID NO: 38717 - DNA, 269 bp, Zea mays
  unsure (1)..(269): unsure at all n locations
  Clone ID: MRT4577_135313C.1
cggtgttgatgcgcaacacccgcaggtccgtagatttcatcgacgccagccggcaaggcaaggatcttcagcaccacttcaacacaacatttttaataggngnncngccngnncgacaatnntgggcntcaatgtcgcagatgtgtctgtcaaagatgttcgtcgtggcgatgctgcaggtgacagcgacaataacccagcactggaagcagctggcgtcacatgtcaggtgattatcctgaatcatccaggccatataagcgccggct

SEQ ID NO: 38718 - DNA, 358 bp, Zea mays
  unsure (1)..(358): unsure at all n locations
  Clone ID: MRT4577_135314C.1
gggggggggggggtgttttttttaaaaaaatattttttttttttttttttttttttttttttttttggggcaaaaaccacgaggggggtcaatacattactaacaaacaaaggttcgggcaaaattctttcccatgtctaanttctaaaatttgggggggggggggggttataatccctncctcccacattcattaacttaaaaagcttaaattcttcttttcaatgtgcgtaccaacccatctcattttcctgaggacccccatcatctcctctctcttcttctttgccctcttgtgagttccaagctttcttttggcaaacttcaaaacgcgcttgtcctttccaaccccgacccc

SEQ ID NO: 38719 - DNA, 386 bp, Zea mays
  Clone ID: MRT4577_135315C.1
gttttcttatcttggatacgtcataataacagggatcgtacggctaacgccagtgggccgaatacgaaatggcactgtacaatacgaacacaaacgtgggcaaggcgaagattcactgctacacctttgcgattggatacgtgcgcactgggctgtcgaggaccaagatccaggtgcagtacatgctcaaggaggttgacaagcagatgattaacaacgagctgaaactggacggaaacctgagcatgaacctgttcaagtatgccagcacgctggtcgagctcaagggcgacaaggtgatacagatctccattaacattaactacggggacatggatgagaacaaggtctacagcgatgtccataaccgccgcgtgcacatgatc

SEQ ID NO: 38720 - DNA, 295 bp, Zea mays
  Clone ID: MRT4577_135316C.1
gagctctttagtcggcggccgccctttagtgatgtttgttttttttatggtttatcttttttttttcttaagacttgattcttgctcacaaaaaaagctttgttttgggacggagtgggggggcctttttgtacaagtccctgttgaaaaaaaagaaacctttgttgtgacctcatgctgggacacatagatggttcaaatcgttttaaatggaccagaaccctgggtgcccaacgggtacaacgccggtacaccctgttaggtggaagcttgctcaactttgagaaaaatagag

SEQ ID NO: 38721 - DNA, 457 bp, Zea mays
  unsure (1)..(457): unsure at all n locations
  Clone ID: MRT4577_135317C.1
attatattattggagtgtgcgattgatgttttgttttctgttgagcgcggggggggaaaacctccaggggaaaatagggggggggaaaccacggggaagaagaaaaaaaagccggggcaagcagaagggagacagagcccaccatggagttccacacccgaaaaaataatacattttgaccaccctggggggagagggggttcctcgcaccctgggggaaccaggggggctcaagctttatatcatggtagctactacgagaggcaattttataccgggatcacaaacatcgcgccctgaaatggatccacctctggcaaaggggcgccagagaaaatccaggcctcgaaaatccgcatctgaaggggagaaggaaaaaggtnctgcatctggttctctccctgaggaggagaagggggatggaaacaattcttttgatgacgatgatgatgatgac

SEQ ID NO: 38722 - DNA, 554 bp, Zea mays
  unsure (1)..(554): unsure at all n locations
  Clone ID: MRT4577_135318C.1
gggcggcgcgggcggcgaggngccgcagcacgcgcccacaccgcgacgccaccgagggggaacgcgggggcaggaaccacaaagagggccgggggaggcgaagcaaggaagccaaggagcacaaggaggcngggngccaggcccccgagggacccaaccacngcancaanaacggnggcnncnncggcagcgcggcgaccaagaacangngcnccaggggggggggganannanaacnaancangancaggccaagcagacagacaccacaaacgacagcancgngaacggcagcgacgccgacaaggagccggnagcagcnggcagcaacacggnaggagcagcngcccaagnagagaggcaaacaangaacgngcagcagcccgcaganggagccggacccagcgagggggnggcggcgaaccccaaaggggggaaggaagggccgaaccggagcagcgcccgcaggaagagggaaggacccacgggaaacaacngccggagggggaacccgaaccgcgcacaccaccgcaacaccgacaagcaccacagca

SEQ ID NO: 38723 - DNA, 338 bp, Zea mays
  Clone ID: MRT4577_135319C.1
tccactcatccgcccacgcgtacgcgcgtctcgtctagtctcgttcagttcaatcctctgagcctgacacgggcggacgagcgggagcttctctcaatctcccctgccctgccctgccctgacgccgcgcttagcttcgcattttcccctcctcttactccttcttatttggtcaagcgaggagcgtggcgcggtctctagcgcgttgttgagatggattcggaggcggtgcattacggctgcacgcattacagccttggttgcttcgtttcggcgccctgctgcggccaggccttcggctgccaacactgccacaacgactccaagaacttcgttga

SEQ ID NO: 38724 - DNA, 618 bp, Zea mays
  Clone ID: MRT4577_13531C.1
ccaatatgtactcgggatcggcactacgggtggtagagtcttgcctcgtcacgcccagcgatgagacgccgcgggaagggctctggctctccgcgctggacctggtgctggctaacagaggccacacccctctcgtccacgtctacagcgccagcgacgacgccgccgccgacggcttcttcaacgtggccaagctcaagaagtccatggccaaggcgctggtgcccttctaccctctcgccggccgcctcggtgcggatcgtgacggccgcatccagatcgactgcaacggggagggcgcgctcttcgtggtagcccgttctgatcgcaccgtcgaggacttcagcggccccacgccgtcgtcggagctgacgaagctgttctgtcctcgcgttcagccgtcgtccatcatgttggccgcgcaggtcaccttcttgaagtgcggcggtgtggtcttagggacagcggtgcaccacgccgccgtggacggctccagcgcgttccatttcattgggacgtgggcaaggtactgcagggacggccagggccgccgtgatcgagctcccgtgccacgaccgcgccctcctccgcgcgcgctccccgcccgccatccacccc

SEQ ID NO: 38725 - DNA, 480 bp, Zea mays
  unsure (1)..(480): unsure at all n locations
  Clone ID: MRT4577_135320C.1
tcggtaccacgcatgctgcagacgcgttacgtatcggatccagaattcgtgattggttatcttcttcattttaacgatcggctttggtgcactaagaggattggtgcaataatattgatatttcatgtaactagaaagaaatgcagcaattataaaagtaattgctgcatttttgttataaggagaagatacatatatttaagaaacttatagcaaattttttgttcatgttacaagttatattttagctactggtctatatgcgatcgatagatttttcaaaaatataactacagaatagtataacttgagaactcataaacaaaaggttccttctaatgtatagaaggagccttttttatttttacccctatttcaaataccaccaacaaaatttcaaatactagctggtgtaatttcaaattccgtcggtagtatttgaaattactcacggtgaaatctttgntttattttcatatt

SEQ ID NO: 38726 - DNA, 181 bp, Zea mays
  Clone ID: MRT4577_135321C.1
ctgcgtccctgcgtagattaaatagtgccatcccatttttaaatcttctaacaaagatgcatcatgcatgcatgtactatatcacaagtggaagaacatatatatacttggcttcctttgcagcagcagctaatactgatttatttagtgggcagcaacaaaaccaaggctgagccttgag

SEQ ID NO: 38727 - DNA, 120 bp, Zea mays
  Clone ID: MRT4577_135322C.1
ggatggttttcgtttcggggccttttcccttggtagggaattaaaatcagtaatacggaaagcaaactttaaaaaaactcccctacctgggaaacaactcaactttcttcaaattcccca

SEQ ID NO: 38728 - DNA, 384 bp, Zea mays
  Clone ID: MRT4577_135323C.1
actacgagtatgcccatacgtccatgtgacgtatgctacgatatgatactttgaataccatattctgacaagtatctccaacgagcatgctagtgcagatcaccttgtctagtcacgctatgcatttatcaatggtcacttgcatcatatttcgctcagaagttttagactttccagtggtcaaatgctacgtattcaatcgatgccatgttactctctaactatgcacactctctctcatgcaaatgtctactgccttagtgagtgtaattaattatcacatctgtcagggagagctacaatcgtcaacaacatgctctaattaatgtcataatgactctttcatcgtgtctcaaataacctggatttttccttttgccttgt

SEQ ID NO: 38729 - DNA, 323 bp, Zea mays
  Clone ID: MRT4577_135324C.1
aacccaccgggggggccccttcaagggggaaattccaaaaaactgggggcccctcatatgggctaccaggtcggccccaacgttagagccacaagggccaaaagagggaacaaaaaaaaaaaaatagcccggcgcaaactacccaaaaaaaaaaagggaaaaaaaaaaagccaaaacccggggtgaataaaggaacgcccccccaaaagaaaatggggtaaacccccccccccccctccaaaggaaaaaacctcggtgcccccggcataaaaaaaatgcccaaccgccggagaagagcgattggcggtatggggccttttccc

SEQ ID NO: 38730 - DNA, 390 bp, Zea mays
  Clone ID: MRT4577_135325C.1
ggagttttcttggcctggccggattttatccaccaaaatacctagggctttgatcgcaccaaatacctagggctcttatccccacttccagttccacctcatgcatggcactcaatttctatggattttatagaggggctaccaaagtcaagggctgtggattgcatactggtggtggtcgaccggttctctaagtatagtcattttttggctttagctcatcctttcactgcggccaaagtagcacagatatttcttgacaatgtttacaaattgcatggcatgcctgataacattgtgtctgaccgtgatcggatcttcacaagcaatttctggcagcagctgtttcagttgacaggcacccatttgtgcatgagctcagcgtatcac

SEQ ID NO: 38731 - DNA, 143 bp, Zea mays
  Clone ID: MRT4577_135326C.1
aaaaggagcgtgcaacacacccaaaggggacacccccccaaactggatgggcaaaaaacctaacacggcccaaaagctaaagcctatgggcgagcaacaaccggagctggagctggagctgtaccaacagcaccagggccagg

SEQ ID NO: 38732 - DNA, 874 bp, Zea mays
  Clone ID: MRT4577_135327C.1
ctcgaggccggccgggaccagtgttctcattaggcggcctttattaccatctgttgttcatttggttcaatctccttcataattggcaattcctcaagacaaaatgacagacgtcgtagccgatctcaagaagcagacaggggcactacaatcaagcatcaacagcgtagccaaaactgcaggcagtacgcccgctgcaaaaaagaccgtctctacgcctgccaaagccacacagtccgcggcatcaaagaccactaccgtccctcccgtgaaaaagactacaagcacagcaaccccagctacaaagacaaggacaccaataggcacacagaagaagcttcctgtccggacagcaataggagagacgaaaccagcagctgctacaaccactccagccaagtctactgcaacaccactgaagaagactgcagcctctgcagcctccacaggaaagcctgcggttagcaatgcctccaagcctgcgaccacaactggaacagctgctaccaaaaaggtaacacccggtactgctaccacacctgtgaagaaggcgcctagaaagctcaatgcaggcggagccacaccatctgcggtgactcaaggctccaagcccagtacagtaccagcaggcactgggccaacgcctgctaagacaacagtcaacacacccaaaacagcgaccaactctgcggccaaatccccagcaaaggctgcaccagtgaagaggaatgtcgatggccaagctgcccccgcgcccaagaagaacattgtgtcccgcggcgctggcgctgcctcgaacagcgtcaactcgaccgtcggcgccaccacggcatcgtgaacacagtcgccgactccgctacctctggcgtcacgc

SEQ ID NO: 38733 - DNA, 322 bp, Zea mays
  Clone ID: MRT4577_135328C.1
ttcattcgaggctgagcaaacaaggacagtcacgcagcagccaggagtgagtatattgttttataagaatcgaggaggcaggaacattgcatagatgaggcaagcgacactgcgaatacaccataggtcctgaacagacggctgcacatatgcacatggtggatgaaagtgccaattggcatgaaggaaatgatgaagtatcgttacaatggcatgggtactacagaaatgcgaattgacgtgaagctcactaagtacatcattgggcagtggtattgcacagagtgccgaggcccgtacgagtgagaattgatgcgaaccc

SEQ ID NO: 38734 - DNA, 1004 bp, Zea mays
  Clone ID: MRT4577_135329C.1
cattgggtacctcgagggccggccgggaggccgcgagcctccaaaaccctaaccctaaatttgggggcgcttgggtcaaagagacggggggaggaatcgagccggcggcttgcggcggcatcagcgatggcggcgaagcgggagatctcgagcaccctcaggaacctcaagtttatgcagcgcggcgcggctgcgcagaaggccgaggagaaggccgaggtggaggtacaggaggaggcggtggtgatggcgccgagtggaggcttcgcctcgtccgcgcaggtcgttaggaagtgcatagttatcatggagggtaatcctcatccaggagctataaagggtcggatgtctttccaaaatttcaatccatctatcgataaactaaatgaagaggcaagaggtgaccagcaaacagaatcagcttcccccagtaactgtgaccaagacaatgcaaactccagcagagggaatgaagttccagcatcaagatgtagagattttggcattcccagttcagaaagcatatctctaaatgaactgaagaggaaggagcccgaccttgatatggaaacaccggcatcttacaaggaaccaaaaaccaatgttggcggtaggtcatcttcacaaagcaatggtcgcggatcacacaagtccaacaagcgtgaaaagctcgacttcaatcatctaagaccgaagaaatgaaaaatggtgttcgagttagctcttgtactctgtttgtagctgtacccaattggccatctgctgtgttttgtcgattatatctagagagctggtaaccatgtccatgtgaccatgtggcatgcattcttagtgagattatgtggtgttaatcatttttctttctattgatgtgttctactcaactactctgctgtaagatgtgaggctctactgtacagcagtgatgaatgcagttctgcttatgttttatgtcgcctactaagcatgtggtcaaaattgagctacggcatgatcgttcatag

SEQ ID NO: 38735 - DNA, 345 bp, Zea mays
  Clone ID: MRT4577_13532C.1
cacttagggcgtattgggtaccggtccccccctcgaggcggccgctattttgttttagttttttgccttgggatcgaaacacttttatacacctggctccgggcctgcggctgagccctataactgcgcataatgttctggaaggactcatctccttttgtgacctcttgcctcacataaatggcacactttaataactggtccagatgtgcgcccattataagcggaggactctgaatcctggagaattcacagcccgcgcagattttttttctcatttcatctcaaatatctatcttggcacaaagatcctaagggctgacagctgctaaaccggataccttt

SEQ ID NO: 38736 - DNA, 456 bp, Zea mays
  Clone ID: MRT4577_135330C.1
atgggacaccggacatactattgagctattattgtgagagacgcccacgcgcgatgcgcttgggcgcacgccgagaagagtgcctgttccttgagactggatattatttgatccgaagcacattcgctaatggtgtattcgggggacatggagctgatactcaagcggtaagaatcttactgtgacagtgagaactgactgtaggaggtgacgggggctctatcgtcactggggactgactctgacgacgaggggccaggcatgatgatcttgagcgacgcccacgacggctgctaggatgactataacgagttcgtcagcttctgcagcggagacccgtggctcttgagggacggatcataggtcttatgactcattccatcttcctgcatacgatacaggcgatgatgaggccgcttatatacacactcttgcaccattcacttctgacatatg

SEQ ID NO: 38737 - DNA, 1952 bp, Zea mays
  Clone ID: MRT4577_135331C.1
cggtaccggccttccctgcttgaaaataacgcaggagaacgggaacttgttctctcttccccacaacggcgagtttgagctgagctcacgctcgtcatctaactctccccccattcgcaatccaaaaagcttgcgcgctactccactggtccattacttacgcagtcagttcagcgagtgagcactgagcagccatgtagcaatttcaattgcaagttgcaacgcgacgaatacggagccatggacgacggcgccgcaaccacaatcgtccaaggcggcgacgcgcacgtcctgctcctgccgttccctgggatgcagggccacgcgaacccgatgctccagcttggccggcggctggccttccacggcctgcgccccaccttggtggtctcccgccacgtcctctccaccacctccacctccaggtcgtgccccatccccgtggccgccatctcggacggcttcgacgacggcgggatctcctcatgcccggacaccgcggagtacgtgcgccggatggaggccgcggggtcggagacgctggcggggctcctggacgccgaggcccgcgcggggcggcccgtccgcgtgctggtgtacgactcgcacctgccatgggcgcgccgcgtggcgcgggccgccggcgtggccgccgccgcgttcatgacgcagatgtgcgcggtgggcctcgtctacggcgaggcgtgggccgggcgggtggccctgccactggcggacggggccgcgctgcgcgggaggctcgccgtggagctgggccccgacgacgtgccgccgttcgtggcggcgcccgagtggtacccggcgttcaccgagtccgcgctgagccagttcgacgggctggagcacgccgacgacgtgctcgtcaactcgttccgtgacctggagccaatggaagcggattacctggagtcgacgtggcgcgcgaagaccgtcggcccgacactgccgtcgttctacctcgacgacggccgcttgccatgcgacaagacatacggcgtggacctcttctcgagcaccgactccgaggcggcgccgtgcatgacgtggcttgacaagcaggagccctgctccgtcgtcctcgcgtcgtacgggaccgtcgccaacctcaacaaggagcagctggacgagctcggcaacggactgtgcgattccggcaagcctttcgtttgggtgctgaggtccaacgaggcagagaagctgtctcgacagctcggtggcaggtgcaaggagaggggcctcattgtccccttctgtcctcagctcgaggtgctggcacacaaggccacaggttgcttcctgacgcactgcgggtggaactcgacgattgaatccatcgctagtggtgttccaatggtggcgatgccgcagtgggcggaccagccgacgacggccaagtatgtggagagcgcgtgggggattggggtgcgcatgcggaagggttccttggtgaggaaggaggtggagaggtgcataagggaggtgatgggcggggagaggaagcatgtgtacgggaggaatgccgctcgttggatgcacaaggccaaggaggccatgcaggaaggaggaagctctgacaagaacattgcagaattcgcagccaagtatttaccaaagtagatttccgattatgttctcctcggataatgagttttttgggcaataaagtttcttgtctttagggctaatttcgaaacttatcgtgtgcttggtttgtagagtcaccctatttctcattatatactagttattagtttatgagaaataaggtggtgatgaatcaacccgttttattttacaaaccaaataaaaaagtaatgaatgagaataagatgtattggtagaatttaaaaaaaaaaaaaaaatttcatcgggataaaaaaattaattctacgggccatcgtttaaaaaccccaggacgggaaaaacccggg

SEQ ID NO: 38738 - DNA, 253 bp, Zea mays
  Clone ID: MRT4577_135332C.1
acctacttttattgtgggattttttggacttttaatgagggggaagactatatacatgatgtcgatagtgttggaatatacaacctaacattaataacatgtggggacaggtggaaaggactaggagcaaattgaattgagcgatgtaacttaaaactaagggaagtatgataacgtacaacggatatagaagagcaaatttccgaggggaggcttgcaatgcgatatagaggggtaaatgtaaaggggaagc

SEQ ID NO: 38739 - DNA, 1046 bp, Zea mays
  Clone ID: MRT4577_135333C.1
gggtacccctcgaggggccggccgggaaaaaaaaaaaaaattcgcaatccaaaaagcttgcgcgctactccactggtccattacttacgcagtcagttcagcgagtgagcactgagcagccatgtagcaatttcaattgcaagttgcaacgcgacgaatacggagccatggacgacggcgccgcaaccacaatcgtccaaggcggcgacgcgcacgtcctgctcctgccgttccctgccactggcggacggggccgcgctgcgcggtaggctcgccgtggagctgggccccgacgacgtgccgccgttcgtggcggcgcccgagtggtacccggcgttcaccgagtccgcgctgagccagttcgacgggctggagcacgccgacgacgtgctcgtcaactcgttccgtgacctggagccaatggtgagcactgaacgcaccttaatgctggagaaacggaaggcattcagatctgggtcccgctgattgagcaggaagcggattacctggagtcgacgtggcgcgcgaagaccgtcggcccgacactgccgtcgttctacctcgacgacggccgcttgccatgcgacaagacatacggcgtggacctcttctcgagcaccgactccgaggcggcgccgtgcatgacgtggcttgacaagcaggagccctgctccgtcgtcctcgcgtcgtacgggaccgtcgccaacctcaacaaggagcagctggacgagctcggcaacggactgtgcgattccggcaagcctttcgtttgggtgctgaggtccaacgaggcagagaagctgtctcgacagctcggtggcaggtgcaaggagaggggcctcattgtccccttctgtcctcagctcgaggtgctggcacacaaggccacaggtacgcacgagatgtactcgacgacgatgagaaatttatttttggaagagaagagttttaatttcgaaacttatcgtgtgcttagtttgtagagtcaccctatttctcattatatactagttattagtttatgagaaagaagctggtgatccatc

SEQ ID NO: 38740 - DNA, 243 bp, Zea mays
  Clone ID: MRT4577_135334C.1
gttttgatcttaataatacacaatgtgtactgtacttatttctatgctcggcttggacatactggggagcacggttacatcgaacaacgggcattattattagttattactaggggtgacacgcgacgtctcatccgctcaccactcttattcgcgtacacacaaataacagactacgcgtcacaccggtcgtgcgcagtcagcaagcagctactcactatggacactgtacggcctcctgcc

SEQ ID NO: 38741 - DNA, 739 bp, Zea mays
  Clone ID: MRT4577_135335C.1
ggccggggaaaaaaaaaaaaaaaaaaaaaaaaaaaaaaaaaaaaaaaaaaaaaaaaaaacctttggcgcgcccgtagggatgaaaggattaacgacaatctgaggttatcccgtaggattgtttgaagatgggtagcattgaatccatcgctagtggtgttgcaatggtggcgatgccgcagtgggcggaccagccgacgacggccaagtatgtggagagcgcgtgggggattgggggtgcgcatgcggaagggttccttggtgaggaaggaggtggagaggtgcataagggaggtgatgggcggggagaggaagcatgtgtacgggaggaatgccgctcgttggatgcacaaggccaaggaggccatgcaggaaggaggaagctctgacaagaacattgcagaattcgcagccaagtatttaccaaagtagatttccgattatgttctcctcggataatgagttttttgggcaataaagtttcttgtctttagggctaatttcgaaacttatcgtgtgcttggtttgtagagtcaccctatttctcattatatactagttattagtttatgagaaataagggggtgatgaatcaacccgttttattttacaaaccaaataaaaaagtaatgaatgagaataagatgtattggtagaattaccccggctacggaggttgtatgaatggctaatggttggagagttggaggaagaaaaaaaaaaaaaaaaaaggccccta

SEQ ID NO: 38742 - DNA, 234 bp, Zea mays
  unsure (1)..(234): unsure at all n locations
  Clone ID: MRT4577_135336C.1
tcagtaaaaggagaattgcntgacttcctgcatgacagtacaactcattcttcattttttatatgtcacctattcacaaacgctggcgtgacgacatctagctattgtatagtgacacctgaaataagttgactgaccggccatgcaggacgtccagcctggggaaaaccctctcgttcccggaacttaatgggccggcaccagatggcgttccagctcagcctgtcggagtgt

SEQ ID NO: 38743 - DNA, 325 bp, Zea mays
  Clone ID: MRT4577_135337C.1
gtaacaaacgcgttcgcaggatccgacccttatgcacagttggaccgtatcccgaggcttgtgcgccataaaattaccagcctatcgatggcgatgaagataattgtgaccacgcatggtgaaaactacattatggtctggaaggtccgcatgaacagttaggaaaaagggcgagatgatggtaatctagttatctggtgtaacctgtactgtactctactgaataagatggcttggtaccgtggcgtgtcacctgatcttgtaagaacaggctgtaaatatgtcatttgtgcacttgcagtcctctttaagatactattagcat

SEQ ID NO: 38744 - DNA, 655 bp, Zea mays
  Clone ID: MRT4577_135338C.1
ccggccgggctctctccggctgtcccctctcctcccctcccctccccgccgaggacgaggaccccccgacaacttacccggggggcagctacatttatacaaagtcgacgacggcaagaggataaacgagtcgaggagaaaggaacaaccttaaccggagcccccgttcccgctaggtagattaaaagttatctcaggtgcttcactaggaaaaaatgaagtaccttagttaagttttgtaacaaggatatttgatcagcgcatgtcaaaggagggtatcaaaccaacgtgtcatatgactgtctagcttatgaatgttgctcctgttttatcacccctgaaggccaagcacacaatcatcctttattgatggctcacactggaaacttgagccagcgtgatcacacaatcgatataccaatgagtgatggtatgaccgcatcaacatctcaccaggatgatcatagtggctcggatgagctgcatcgcagcagaggtccttcgaatgaagtttcaccaagcccagatacatcttccggtacaaacgatgtatccaactctcacaatgcatcctcagcaagaatagatcgaggccaccgtcaacagaaccctttgaattctggcttctggatctcaatcgaacttattgtaaatc

SEQ ID NO: 38745 - DNA, 318 bp, Zea mays
  Clone ID: MRT4577_135339C.1
ttggtcttgcgcgtggcggatcgcgtcgctatctcggtaggcgagagcacgagaggcgtggggcctatgccgctggaggcggcggctccttggacctgccattgatggctccctgtagcggcttctggggcggcatgcccagcggatacgcctaccggggcacgccggtggtggtcaagatggagaaccccaactggtccatctgcgagatcttctctccggaggacgacgactaggacatcttggccgccgtcaccaacgccgtccgccgtaacaaggggggccgcaccaagaacgcctagcagatcaagtaggtgc

SEQ ID NO: 38746 - DNA, 111 bp, Zea mays
  unsure (1)..(111): unsure at all n locations
  Clone ID: MRT4577_13533C.1
aaaccaagtagagcaatcagcaagactacaccacagttcatttgtatgcaaggtatatggtagacaaaacaagggntacctataaggtcccatcaaattaatcaaagcatg

SEQ ID NO: 38747 - DNA, 699 bp, Zea mays
  Clone ID: MRT4577_135340C.1
caactacgcaattcggcacataaaaaaaaactacgctgtgcttatcgcctctggcggcggcgagttcgctcacgtcccggcgacccctcgccggtggccacgggccgtgacactccggcatgccgcgcgccccacgccggcagtccgacgaggcgcgccgtggcgcctacaagccgcgcgtcgacttcagccgctcgcgccgccgccgcgaggacggcctcctcgccctccgccgcctcaaccgcgacacgggactcttcaagcgccgccgcgacgagcccgctcccgccgtccctgcctccgatctgactcctacacgcgccgaagcagccccattcgcaggaatcacccgtccggcattcactccctcctcaccgcccgacgtagcggctccccgggatgctgctgagtcagagagcttgaaggcctgtcagagctggtcgacaaactatgttcagatgacaccaccagtcagctcgaagccacaatccagttcaggaaacttctttcagatgagaagaactcaactgtgataaaaatcatccgagcggatgtcctgcccagatttgccgagtttctttcaagacatgggcttccccagctccaaatggagggcagcctgggttcttaccaacatagctgcatctgattatacactgctggttgcagaatgcggtgctgttccaaggttggtggaac

SEQ ID NO: 38748 - DNA, 483 bp, Zea mays
  unsure (1)..(483): unsure at all n locations
  Clone ID: MRT4577_135341C.1
gggggggtgtttttttttttttttttttttgtggttttttttttttttttttttttttttttttttttttaaaacaatccgccccccaccaatacctcaatttcaacggggcctactttacccctcaaaatctcaatgccaaacaagggggacgtcgggggggtcatcntaaattaacaccggcccaagaacccccatgagactttttgccccccaatttttcagggcgtttaattcggcccggccctgctctgactggagcccctctaatctgatagcattccaaaagggcccaaacaatcctcaccccaaagattgttactggggggccgggggaggctgcccctgtgctggggggggctgctnctgctgctgtccctgggntgactggtgctcaaagttcccataacccggggttccatagaagttttaaatgcttgggtcttgggcattgggggccccataattataaccttcattacc

SEQ ID NO: 38749 - DNA, 374 bp, Zea mays
  Clone ID: MRT4577_135342C.1
atgaggatcgcacaggtgctcgcgtggctttggacgcactgaaatggaccgcgtgcatactcactgctacctgatgctgacgctgactgccacccggcctgaggacgaccggcgagctggactgggcggcgcggcggacctgactgggcggggccaacatgaagggcaagtccggcaaggtggtgctgccgaacaaccgctacgctcgcccgatttaggagctgcctgtggacatcgttgggggtcgggtgatacagaaagtggctgctcagttggagagggctgtgacggctgagatgctataggtggtggctgacattcgggacgttgacgctgacaagaagggactgttgtgaagcatggacgcttactac

SEQ ID NO: 38750 - DNA, 297 bp, Zea mays
  unsure (1)..(297): unsure at all n locations
  Clone ID: MRT4577_135343C.1
ctcacgcgtacggtgacgcgtgactaccaacacatccacctgctctaggatctactaatccgaccagccgatgctgaggaacgaccacgttatactccagatctgacgcgagaccggctgcgagaaagcggagagagaagacgaggacgacgagctcgacgaggcgtccaccagcaccaccaccagagnaagccagcggcaacaccaagacgacgaccaccagcagtaggagcaggagtgctacgcctcggaccacttctgaaacgacatccctgcaggcgaagcggccatatacat

SEQ ID NO: 38751 - DNA, 258 bp, Zea mays
  Clone ID: MRT4577_135344C.1
ctagttctagatcgcgagctgccgctcgcgatctagaagttcggtcccggatcagcgatcagatcaaacgaaaaccacgacccatggcttcatgttatttttgcttttgaacaatggcaggatacacgcctacgatgcgtgcacgacgacctgtttgcgtcgacggagaggcgatgcaagcggagagaagacgcaaagaagactgggtttccgccgcagatagcagcggtctaagagcagcacaagcaacgacgacgt

SEQ ID NO: 38752 - DNA, 308 bp, Zea mays
  Clone ID: MRT4577_135345C.1
gcttcacgcactccgacctaacgcagggggagctgctgttttctattctcctaacccaatcgcttctctcctgaaccctgtggcgttacaagagctcgaggaggtcgtggcggttcgcgctctacactgtgtgtatgccgaggcggaggccatgacagatgataaccatgttgttgccggcgccttgcataagctctattggttccggtataccaaagccacttgtgttcaacgcctgcatttcgcgtattattgttgtatgcacgctctgacatgttccctcccaaaaatgagggatgaaaacaacc

SEQ ID NO: 38753 - DNA, 326 bp, Zea mays
  Clone ID: MRT4577_135346C.1
caacccaacccatcaccctctacacgaacctttcagatccccgagcagaaccctacccaacgcaggggaggtcttcctcctctagcgcgccgccgctgccggtggggtgctgggcggtgcgcaccgcccgaaccacctccttgctagggtctgacttgacacggatcttctcagctggctagcgcacgcggctcaggccgccgtagagcacctgtgcgacccctaggcagtgatggacgctttccagatcattgggcacgacaacgtcacgtctttttcggtcgtcgagtacaacgtcattgacgatcacacagtgtgccagacag

SEQ ID NO: 38754 - DNA, 774 bp, Zea mays
  Clone ID: MRT4577_135347C.1
ccggccccttgcttgttcacattcatgccacttccagcaaaccatatactagcatagcagccagaaatagatacacagagcttctcatcgaggctgcggagcctcgctctcccctcctctacactgtcatccaaatccaatccaagaagctgaaaagagatcgatggcccagcagaaggtggtgctccggatctccaccatgaccgacgacaggacgaagcagaaggccatggaggccgtcgcggacatctacggcatcgactcgatcgcggcggacgtgaaggagaacaagatgacggtgatcggcgacatggacacggtggccgtcgccaagaagctgaagaagctcggcaaggtcgacatcgtctcggtgggcccagccaaggaggagaagaagcccgacaagaaacccgaggagaagaagccggaggcggcggcggggaagaaggacgacaagaagtgagcgccgaggccgtctgaatacgtttccggctgatttggatttggatggactctctaataataatgggcccaatacatgatatagaacattacagcccacaagggcacgtggttgcctctctaattagagtagtaccaacccaatacactacttagagggtgtttaggagtgaagttttttacagtagtttttaaaaaataatgtattattcttaaatactgcagtattatatatagaatagcgtttgacaagctatctaaaactatgttttcaaaactagagtattgcaaaaaaaaaagttattttaaggt

SEQ ID NO: 38755 - DNA, 413 bp, Zea mays
  Clone ID: MRT4577_135348C.1
cgtaaattatctaccaaaaaaatttcaagattttttattgattgtctccgctctctgtataatatttttttttgatttggctaactgatgttattgtttacaccatgcaatatgtcttggtacaacacggctaatgaagtgagcgattagaagagagttcacaacgactgactgaacgaacaaagattataaaatgacataattccaccataaagagaccaaataagagaaagtttgtgagctcaagtttctaaaataagtcacatgaactcaaacttataaaaagatagatcaaaatatgaagtgattgctaaagtcatgcatcaataaaaactggatgcgctctttgtagcaattattaacatttaaaaccaacaaataactttttattttactgttagtgtgataaatca

SEQ ID NO: 38756 - DNA, 382 bp, Zea mays
  Clone ID: MRT4577_135349C.1
aatttttccggctggcttgcgagaggagcgagcgttacgttgctgttttttttccctttctaacttttgctgtctgctgtgtgcgcgctcgcgtgcgtgcagccgaagccgccgcgggagcagaacgggcaggtgtgccagatttgcggcgacgacgtcggccttgcccccggcggggaccccttcgtggcgtgcaacgagtgcgcctttctcgtctgccgggactgctacgaataccagcgccgggagggcacgcagaactgcccccagtgcaagacttgatacatgcgccttaaggtctgccagcgtgtgacccgtgcccatggatgatgaccgcgtccattacctggacatttagttcaaactggtccggccatgtact

SEQ ID NO: 38757 - DNA, 760 bp, Zea mays
  unsure (1)..(760): unsure at all n locations
  Clone ID: MRT4577_13534C.1
gccggcccctggcagctgtagaaatcccaacagaaataggtgcgtcatcgcgttcttgtaatctagtaaaagtcttccatttttctgtgatccttccccttctcccgcatcggtcgtctctcaccaagaacagagggtagaatcacaggtagaaagaaacaagaactgaattagccagtggtaattccggcctggcagctgaatcgtgactcaattcctgacgaatttctcgtggattccgtggagaaaaagtgtgacctttccgatgcagtacaaccaccgcagccgcttgccgccgccgccgctgccgttcggccgcggagggcatcctcgcggccccaagcagccatgctacgctccgcttcctccgccaccgtttcctccggcgccgccgccgccgccgccgtcgctagagcgcaagtacgaggtgcttatggaggccggtcgcctcgccaccgagtatctggtcgcccagggcgtgctccccccggccgctctgcagcgcggcgccggcatctctggcgcgtggcctgatcatcctcttcctccgccaccgcagctgcaacagcaggaaccccgngngggngttatgggcccggaggcccgtacaaagatgaatacaacaataatcctaggcgagccaatgacactagtagtagcaccagtagcagagatgattgcagccgtggcagctgcaatggaagagggaagatgaagtatgggaaatacaggaggngggtatttggattcagggagggac

SEQ ID NO: 38758 - DNA, 765 bp, Zea mays
  Clone ID: MRT4577_135350C.1
aatgaagcgggtcaatattttatgtagcagttactaaatgtaagtagatgtaacaccccgggctttaagggacaatgccgagtgcatctcatacatgcgccaaagaagacaacatatataataacataatgtatagagataaatgtcacaatataatcagagtacttattacatagcggaagtcttacaaaatagaagataaatataacaggatctaaaatccatccttggcaccagaaagtcaactgggagacgacgacctagacctctcacgaacacagcgcaacatccaccatgcgcctcatcctgtggtacctggcacttgagattccaattaccagggtgattcttcggatcctcgtgaccgcactgctagcttcaacgagctcctgctcagaattatccacctgctgaacacctggatcctcggtcactggttcgtctactcgaagcaatacaaacgacggtgggggtctggtggaccggatatgatggagagcgggtgcccggtgaccacaatcgtcaacgagcaatttcccggccaccgccttcaaattccacccggcatagccacggacacgttgctggtgacttggcaaagcttcacatacatgcaccaagggtgcagcgtcgtcggagcacaccaccatgtgcggcagcgtcgccgtcatgcgtcagagtttgcacagtgaaattggaggtcttatgtgagcaacgtcaggctcgcgcgaggtgagagcccggccggcctcgaggtacccaatg

SEQ ID NO: 38759 - DNA, 388 bp, Zea mays
  Clone ID: MRT4577_135351C.1
atggggaaaaaataatagcgtaaaaaacacctttacaatcacaaataaactgaaaaaaacccccccatgttaaattttttcaaccttacccccctaaagggatattttaccatattacccttcccccctaatccaactttttttatctaaaaaggaaacaaacccccccttttacctattggagttttctgtgccccccatttttaacaaatcttcggaaagggttggagtttttccttgtaaccccccaagaaacaatctctgttttgaaccgcttgccaaacccaaagctgtaaaccagctaaatacttccaaaacaaaataaaaggatatgccccttctcctaagaaaagcccccttggtctttttcttaagcaacaaaaaccgc

SEQ ID NO: 38760 - DNA, 948 bp, Zea mays
  Clone ID: MRT4577_135352C.1
agtcgccggcagcccgccactcctccgctcgcccgggtcctgacgctctcatccactgcagtcgccggcaccgcttgcagccgcagccgccggaagcttgttgtagctcgctagctaaacggtcagagccgagctggctccgtacccacgcagccacgcttactccgatcctccaaaatcgcggcgccactaatctaaagccctaaacccatgacgcagccgccgcaccacctccctctccatcgccagtaccccagcctcgcctccgtcgcctatggggcgacagcctaagccgcccgcgtccccatccccaccgccgtgcccgccctcggactcggacccggacccaggcagcggcttcgaccccatcgaggagtggctcgtggacttcgacccggccatgtcgagcgagctagaggcaaagggccccgaactcgctgagcaagcggcggcggttccgcttacgctggagacggcgacgcaaaagagcttcgagctcgagtttggtgtgaaggaccagaaggtcgaggtggtgagcagcgaattggacgggctgcttgccccggatcagcttctggtgtctgggatcggcgatttggccgtgagagaggatattccagaggaagcggttgctgtgaagatgactgccacaccgcctgcagctgctgatactgagatgaatgccacggtatccgttgaagtggaatcggaaggtggcaaagaagggcaggaggcaccggccgcacctgctgatgctgagatgatgaataccatggtgtccgtggaagtggaagctcaaggtggcaaggaagggcaggagagcagcgatgaagagtcggaatcagagagtagcgatgaagagtcggatgatgacgagctgtcatccagcgaggattcctcaagcagcgaggacgagaaagagcagggggtcaacaagtacgaggaatc

SEQ ID NO: 38761 - DNA, 237 bp, Zea mays
  Clone ID: MRT4577_135353C.1
gaaggcgccgaacgcgacggggggaattttgaactagttaagcgggactgaccggaatccataggattgagcgtaaagcaagtgtacagtcctgagactgacgctgaatgaatacacaggtggagctatatctcatgcgtgtgaatcgattatggagaatggacagacgtatatatatgtctaagaaatggagtaagagttaaactcagctgaaaaaaaaaaaagaagggcagacgc

SEQ ID NO: 38762 - DNA, 459 bp, Zea mays
  Clone ID: MRT4577_135354C.1
cgggaaaaggaaccaaactaccctgttccccgggttttttttccccgcccaaaaacctttagataaggaacccctccaccccggttataaaaacatgctacggccccccttatgcgtttaaaaaaacccagcaccaaaaccccttatataaaactttgggcccgggcaaaaacctcccaccaggaatttttccgggaggaaattttacgggaaaaccctggtctgaaggggcaaacccctttcaacttcagttttgtttgcttccgccggggatttttttgaacagccttggaaatcccaaacattttttgaattgtttttttaaagcagcttttgggcccatccaggggggggggaaggaacccacccatgggggctttcaaatcttcagggaggggggcatcatttgttttttttttccggcatgaggccataacaggatttttggggacaaagggg

SEQ ID NO: 38763 - DNA, 222 bp, Zea mays
  Clone ID: MRT4577_135355C.1
aaacacccctttaaagcctgatttttatttgtggcctggacacttcaaaaaaaaaaatcaagctaaagaagttcccggaagttgcaaaatgggccaacattggttccaaatatcacgggattccaatcgctatttaaattgatctaaaaaaagaagccgggtaaaagctcaaacagcaagaaatgacgtcaactgaacctaacagggggagcattttcaaac

SEQ ID NO: 38764 - DNA, 531 bp, Zea mays
  Clone ID: MRT4577_135356C.1
aattcggcacgaggcgtaggggtgctatcccatgagagctcacggccatcctctttctcctcattccaatgagcggctgacttggcggtggtcggcagggccggcacctattctgctgtgggcgctgatcctggtcttgcagaccttcaccaggatcgtgggcagactgcttgccagctcaactgaacatcaggatgaccaccattagaaatcggcggcggcacggagcatgtcgtcgccagtctccccacatccagaactttacaagcctgcgtttgcatctatggcgcagctggaagacccaccgcctattccgcaccttggtattgctcccgctgcgaaagagagctctattttctccagcttacgagtggaatgccagagcgccggtgccccgagcggatgaagactttgtggagccatctaccgcttactacaggccaacagagggggtaactcatacacactctgtgtcaacaccaccactgatggccattgagacgcgggcggggccatctaagctggtgacag

SEQ ID NO: 38765 - DNA, 407 bp, Zea mays
  Clone ID: MRT4577_135357C.1
aaaacagcacccgggccgggggggggggcttcattaagggggggacaagggggaaaccattgccgaaggggccaagcctaaaagggagtttttttaacaaaaaaagacatcccttttaaaaccccccgggggacaaaggctaaaacccaggggggggggaaaggctttttgcggggggggggaaaaccagggggaaggactttggccaccttgaaccccacagtttttgatgggggcctgccctggccaaagaagaaaggggcccctttcttcacacggaaacttggggagaagtaaactggaatgggggaaggccccttttcaaacctcggggtttttttaacaaaggggaaaaagttcccgggaacaggagggggcggttatttaagaccggggggggggccaaa

SEQ ID NO: 38766 - DNA, 388 bp, Zea mays
  Clone ID: MRT4577_135358C.1
gagggaaaccccgggcaggcttttaaaaaccggggaaaaaaccccgcccccccgggctaaaggcccactggggggaaaaaaaagaaggggggaacaaattcaaacccccccccccccctaataaaaaaaaaaaaaagggggggccgggaaatcccctccaaaaaaagccggggccaatttttgtttcgacgggataaagctttaaaaaaagggggcccaaaaaaaaggccccccccaaaaaaaacgggccggaaccacccccacctttggggggttttttgccccaaaaaacaccatccccggggggggcaagggcccaaaggggcaagtggcccctaaggagccggaaaaacaaagggctttctttggaagacccccccccaagggg

SEQ ID NO: 38767 - DNA, 870 bp, Zea mays
  Clone ID: MRT4577_135359C.1
ggccgcccctttttttttttttttttgggataaagaaccttcataagcttctaaagaaagaacatgtgttaggactaaccgatgtctgttttgagaaatacagaccttgtgcagcatgtcaagcaagaaaacaaatgggaacaactcatctaagcaagaacatgatgacgacgtcaaaaccattggagcttcttcatatgggaacaactcatcctaccttgaagggaagcattgaagacggggcgaggagtgctcctagagtctgacgaattgaaagttcatgcctgagggacttctcgcttcctgtgcctataagagacagatatcgagtcggcgtcgtcgttctccagccgagtagtattgttgtcgatttggcaaggagattcgccataagtgttctggggcggattgaagacatggatctgcgcgtagagatgttggtcgactcgccgcctgtagcccatgtcttgtcatcacgtctgtagagatggtcgcccacagggtggtccccaggcttcaatgcgtcagatctggccacaatagcgccggatcctgttgtcgtacggagtgagggagggggtgagttatggcgggcatggcgctgatggttggtagggcaaggaggggtaggggcgaatctcacccgcctgtgattaatggcggcgcgggcgaccgagatccagagagatctgatgacaatggacttgaggggcagaatctggggtggggtggggccgccggaggaggtggtcggggtaggggatgggccggggggccgacggcggtggatctatacccggtcaccgtgggttgtggacaggggtggagaggctaacggctccatcctgttatcagtctggccccggccgg

SEQ ID NO: 38768 - DNA, 854 bp, Zea mays
  Clone ID: MRT4577_13535C.1
cctgtgcggcgctcgaggcggccgggttccaccaaccctaacccgagcacccagctcctcctcgcgttcccccaccaaaccctaacccgagcacccagcccctcctcgcgtctgctcgcgccggcctttgggctctcactctgagcggcagggacccgcagggctccggttgtgtccaggaaacatcccagttgttggcgagagaccaagaaatggcggagaaggagggagcaaaggttggagcggaagagatggaagagcgggagcaggaaggggaggcagaggaggtggaggtgaagtttcgtctcttcgatggctctgacatcggtcccgtgcgctgcaacgctgccgccactaccgtagccgccctcaaggatcgcgtcgtcgccgattggcccaaagagctccttttggtgatcttcccagtagtgctatcacgatgcatgttgttgttcaaccatcgtcagccaaatcaaaaccagataagaaggcgaacaagttgcccaaaaccactcgttgctcatgtaccatactatgaactacgaaggtccaagtccctccgagaccaacaataatttgtacgtccaccgaagattctgcagaggatttgagaacgaaagatccaagatgtccacgtcattcttctttgccaacgggtggcaatggcgaaagacaacaacgtccatatgttgtaagctatgtaattgtaacttaggtacaaagagtgggtccctctgccgtacggatgggggaaaaatagtctactggctgccctgttttccctacacaagattgttctatatgatgtaccacaagatacatacacgctactattttgggtgtagtgaccttgt

SEQ ID NO: 38769 - DNA, 555 bp, Zea mays
  Clone ID: MRT4577_135360C.1
gccgggcaaggatctccatcttctctcttcactccgaggatcggagtgaaaggagcactagctactggcagtatggtgagtctgtgtctgcaggcgaagaggcctcgggtgggggcggcgccacgggttgtggcgaaccagatgggggcgttcgaggtgctgccccaggagctgatcctctccgtgctcaccgccctgtcgtcggccgcggacaagcccgccgacctcttcaacgtcatgcttgtgtgccaggagttctgcaggctggtgactaacccgcaggtgatccgggcggcgtcggcggcgtgcgtgtccgtgctcccgcgcaggtggtgcgcagccgccgaccgtttcctccgcttctgcggcgacaacggcaacgcggacgccaacttcttcctcggcatgatccagttctactgcttggggctccagacccatgggtggtcccgcatgctgatggcggtgcggtcgggccacgcgcacgccgccttcgccgcggccgtcgtctactacaacggcagctgcatcgaccacaaccagaggcagccgctg

SEQ ID NO: 38770 - DNA, 428 bp, Zea mays
  Clone ID: MRT4577_135361C.1
tcgcccagtggtagccgctgacatctcaacgaaacctagagagctatagagagagatagagagaaagataagagagagaagcagtgattcatcacaatgggtaaggttcacggatctctcgcacgtgcgggtaaagtgagaggacaaactccctgagtggcgaagcaagacaagaagaaaaagtgacgcgcacgcgctcacaagagaatgcaatacaaccggcgattcgtcaccgccgtggtgcgattcagaaagaagggtggaccaaactcctcggagaagtgagggaggcgtgttgaagatcatggcttttcttagtttgtgaaatgtatcacttgttttgatttgattgatgaactcaaacttttatgatagttcttattatggttcaatgaaggagtttttttgctagttaaaaaaattaaaaa

SEQ ID NO: 38771 - DNA, 571 bp, Zea mays
  unsure (1)..(571): unsure at all n locations
  Clone ID: MRT4577_135362C.1
cgttgctgtcggcaaatgggcctcaatctccaagccgtagattgtttgatgctggaattaatttttgtaggataataattaatcaaagtgattacttctccacattattgcgtgcacacaaaatagttaaggaattggagaactaattggggaattgtggttgtaccttaagtgatgccgtgagcacttaagttctccaatgctcccactataatcttggagcacactcttattatggctctgtctggatccattagctgctaataactagccagctatagactatagtccacagttaatattagctgctaataattagacagctataggccatagccaatattagctgctaataattagccagctatagtccatagctaatattagctgctattagttagtttggtctaactagtcaagtagttattagttgggtattcaactaacaattagctacncctattgggatctaaggagctaactattagctctaagtgaaagaaaggatgacacccgctcctgtcccctcggcaaccctgctcaccggcaacctcaccacaaaccctcgccg

SEQ ID NO: 38772 - DNA, 444 bp, Zea mays
  Clone ID: MRT4577_135363C.1
aatttttactgtgccaacacatgcacacactggtggtgcctgcatctagctattcagatcaaagcctgacaggtaccatagggcaaagtgaagaagaaacagaagagttgagcaagatcacgctagagaataaggatattcagcttgatatcaatataagagaagaatcttggagctcttcacaacaagtgaacttttacacagaaagtaccagctccagtgaggcttgtttgatggagccgaccctatggagctgcatgtttatgattttaaaggacctggtgtaaccttatcaatgtacaatagcgatgagtttattaggccttttgctaagtcctccatggatatggctctttcaaaaaagtcgtctcttcatctcagcaccaagaatacaatcatcaagaagtatgacgacaggcatggatcatctatgtttctacaagc

SEQ ID NO: 38773 - DNA, 192 bp, Zea mays
  Clone ID: MRT4577_135364C.1
ctctgttacttctcccgcagtcgagaatctcctcagcgatcaccacgaccgcgaatcacctcacggactgcggaacatctactatcagcgataagcgatggccgcgaagggtgatgagctggcaatcggcatcgatatcgagacgacctactcttgcgtcggtgtgtggcaggacgaccgtgtcgagatgat

SEQ ID NO: 38774 - DNA, 666 bp, Zea mays
  Clone ID: MRT4577_135365C.1
acttcccatggaaaaggttgataagcatttttgggcctggcctctgccagacaccgcttcctcctctgtttccccttcctctcaagctccatccagcctcagatcctgaaccgcaagaacagcaagaatcagcggccgcggcggcgatggtgtgcgctaagtgcgagaagaagctcgggaaggtgatcgtgcctgacaagtggaaggagggcgccagcaacaccaacgagagcggcggccgcaagatcaacgagaacaagctcctctccaagaagaacaggtggactccgtacggaaacaccaaatgtataatctgcaagcaacaggtgcaccaggacgcaaaatattgccacacctgtgcttattcaaaaggtaagaaacacactacaaagggaacatggagtgtgcgcaatgtgtgggaagcaagtgttggacacgaagctctacaagcaaagcaacgtgtgatcttagctgcactaaactgctaatgacttgtatgaaatcttgtactctcaatacattcaagctgtcaacactcaacagtagttgtgtcttaacagacagtatgtacttgactagattctggaacataaagtggctcaaaaatgaaagttccagtggcattaaaagaacggaaaaaaaaaaaaatagagcccccctagggcc

SEQ ID NO: 38775 - DNA, 485 bp, Zea mays
  unsure (1)..(485): unsure at all n locations
  Clone ID: MRT4577_135366C.1
attcggctcgaggtcgttcgaagggctagctttgagcatttgttcttttactgggccgatccgggcacatctcgaccggctgtgccctcttgacaggctctttctgggcttgaaccatctgacgggggagatgccgacggagctcgggactctgaccaggctgcggtaggtctacctctcaatcaatgacctcgccggcgagataccagccagctgatcctgctgtgacgaacttgaggctgatcaacctgttacggaaccacctgcgatgcgagataccggccttgctgggggagtggcctatggtcgaggcgctgcaggtgcgggacaacaacctcaaaagcccccttccgcccgcgctcagcaggaacgggcgacttaagacgctggacgttaccagttaccaactcaccggttccataccgacggactctgcgcgcgaaggaaccctgagctgctcgtgcttatggacaacggcttntttg

SEQ ID NO: 38776 - DNA, 627 bp, Zea mays
  unsure (1)..(627): unsure at all n locations
  Clone ID: MRT4577_135367C.1
gcagtggaacagcacagatacttttttttttttttttttttttttttttttcctttttttttttttttttttttttttttttttttttttttttttttttttttttttttttttttttaaccttaaaccccgatcccccgtaaaaaaccaaaaaccccccaaaaacacggggggggaagttttttttttagaanaaaaacccaaccccgaaaataaaaccggagaaaaaaccaaccaaaatcttaaaaaaaaaaaaccccttccccgctattttttgctttaaaaccgggcaaattgcaaaaaccaaccaaaaaaaaaaaaaccttaaaactgaaggttgctttttttattaccccccccccccgcacctcgggttgttccccccggtaaaggggaaaattcgcaaaaaaccccaacaatgggggcccctctgccctcttttaaagggcccaactccccctaatgggagtgctataaaaataaatccccccgcttttacaacctccggaacggggaaaacccccggggcccccccactaaacccccccgaacacacccccctttccccccctggccttatcccaaaaaccccccccccacccccccttccccccctttgcccacccc

SEQ ID NO: 38777 - DNA, 329 bp, Zea mays
  Clone ID: MRT4577_135368C.1
agggcccccgaaggggcaaaccacaagggacaacacataaagaaatttccgagcgcaaggacaaaaaaaccggagaaagatttcggttcgcgaaagcctaacaaaaaacgggggaaatataaacaaacaaaccggcgggcgtgataatcccatgctaaacacaggggaaactttgctaactgcccacgggataccccccctctgggggagggcccaaccaaaacttgacctaagggcgggtcccatgaggcaactcttacaatgcggaagcgcaaaacgcggagggccaatcccaggacgacatccaccagagctccaaggggggccaa

SEQ ID NO: 38778 - DNA, 499 bp, Zea mays
  Clone ID: MRT4577_135369C.1
atcccggggttcggccaaaaccaacgcttgcctactccacgttggggcgtcccaacggacgagggttgcaatcaacccctctcaagcggtccaaaaaccaacttgaataccacggggttttgctttgcctttcaatatcccgtttgcgaggaatctccacaacttggagtctttcgcccttacacttaaaattcacaaaaaaatacggagtaagggagggaatgagcaacccacacaagacttcaaaagatcagagcaacccgcacacaagcagcaacaagagctcgcaacacaactcaaagagttcacaactccacaagagctctatatgctatcacaatgaaatgaatgcccgagatcgatgtcttggggcttaaaaatgttgtaggaatgcttggggtcctcctccatgcccctaggggtcccttttatagccccaaggcagctaggagccgttgaaaacaaatctggaaggccatccttgccttctgtcgtcggg

SEQ ID NO: 38779 - DNA, 1081 bp, Zea mays
  Clone ID: MRT4577_13536C.1
aaaggacattttctcctaacctcctgggctcaggcgctcagccttctgcttctcttcctctcctcgcgttcccccaccaaaccctaacccgagcacccagcccctcctcgcgtccccccaccaaaccctaacccgagcacccagcccctcctcgcgtctgctcgcgccggcctttggggctctcactctgagcggcagggacccgcagggctccggttgtgtccaggaaacatcccagttgttggcgagagaccaagaaatggcggagaaggagggagcgaaggttggagcggaagagatggaagagcgggagcaggaaggggaggcagaggaggtggaggtgaagtttcgtctcttcgatggctctgacatcggtcccgtgcgctgcaacgccgccgccactaccgtagccgccctcaaggatcgcgtcgtcgccgattggcccaaagataaatcaattatcccaaagactgctagtgatgtgaaactaataagtggaggcaaaattctagaaaatgacaagaatgttgcacagtgcagagctccttttggtgatcttcccagtagtgctatcacgatgcatgttgttgttcaaccatcgtcagcaaaatcaaaaccagataagaaggcgaacaagttgcccaaaaccactcgttgctcatgtaccatactatgaactacgaaggtccaagtccctccgagaccaacaataatttgtacgtccaccgaagattctgcagaggatttgagaacgaaagatccaagatgtccacgtcattcttctctgccaacgggtggcaatggcgaaagacaacaacgtccatatgttgtaagctatgtaattgtaacttaggtacaaagagtgggtccctctgccgtacggacgggggaaaaatagtctactggctgccctgttttaccctacacaagattgttctatatgatgtaccacaagatacatacacgctactattttgggtgtagtgaccttgttcccacttcaccttttgaaagtttgttccagagttgagtacccttatgggcactgagtcaatgtgaaatctaagttggttgatttccg

SEQ ID NO: 38780 - DNA, 406 bp, Zea mays
  Clone ID: MRT4577_135370C.1
ccttttttttttttttttttgggattttttttttttttttttttttttttttttggacaaggaaaataaaataatacttttttattaaaaataaaattggttccctgatgattgggtcggggacatacaaatttatttccaacaaattccccctcccaaatgatttatattgaaccaggggactttccactttttattttcaatactaatataaaaactggccccggttgcctgaaacctgggttttaacaaaggttatataaaaagggttacaacacatttttttatacacttttttcaaaacattttttttattggtggaaaatttttagaaatcacaaaaatataggggcgcctaaatcttattttaaagagttgggaatttttattatttggaacatatggg

SEQ ID NO: 38781 - DNA, 294 bp, Zea mays
  Clone ID: MRT4577_135371C.1
aattgacttgaataacactgcaagtatgatagtcaaagaagaaaggaaacttataacagtcgtgtttcctgatggccgtgacggacgcactttcacccttaaggcagaaactacagaagacctaaatgagtggagaagtgcattggagaatgctctggctcaggcacccagtgttgtgaatacagcgggacaacttccagtagtcagcactgacataacagaacctgttgaagctgctgttgaacaattgcattcttcgagagatgccatcttctccaattccggcaccatgtt

SEQ ID NO: 38782 - DNA, 263 bp, Zea mays
  Clone ID: MRT4577_135372C.1
acaatccagcatctccgggagctgatttttaaaagatggggatgcaaatgtattctattctgttaaattcagaccacagttaaatttcttttcgtctgaaaaataacactcctactctataacttccagtggctctgatccaaaattttaaaaccaaagctctaccctctcaactgatttgaaccatctggactggagtctcaagaacgttaaggcttaaactgtgagggcttcctccggtggttgtgtcacttcaggcttcc

SEQ ID NO: 38783 - DNA, 351 bp, Zea mays
  Clone ID: MRT4577_135373C.1
catgattgaagtcaaaaatttgccttagaacacgcatcagggcgggggcttgacaagctaggtgacgtaagagatacaatgtatgcctggaagtcagacacagtctactgactgtatgagccccggacaccggacttcatcaagaatatgatactgcacttccaagctgactggctgtctatcattgctaaccactgtggtttgaggctggtatctccaagatgccagacccggagcatgctctcttgctttcacactgggggaagcagagattgctgtgaacaagatggagctctcacccagtttaaaggcccgtatgagagattggaagagttcttctacctgaaagtg

SEQ ID NO: 38784 - DNA, 164 bp, Zea mays
  Clone ID: MRT4577_135374C.1
cggacgcgtgggcggacgcctgggctaccctttaggatcggctgaaggaaaatgaactttctgctatcaatgttaccaagaaggaggctaagcaaccttggaggctgataccccaaaacatggagaaaccgggttcttccttggtcgccctattgaattcatgg

SEQ ID NO: 38785 - DNA, 582 bp, Zea mays
  Clone ID: MRT4577_135375C.1
cccacgcgtccggtactatcttggccctgctcctttgcagaatatggcaaggccacaaagatgattcgatcatagagcttgcaaacaaggtgaggaaggtgctcaacagaacaaaggagaccaaaatcactgcgatgcagggcgcgtgaactcttctactacctcaagggtaagcaggtggactatggcgaggagcacagcaaggcttgcggccacaacaggtttgggagaatatatcacacaggtcactatcctgtttgttatgagcacaacccagtgcattttgtggggcactctgctggcgcgcaggttgtgagggtgctgcatcagatgcttgccgacaagagggatggttcatgtgagctggagtacaggattagagcacccaaattaggaattagtcatgcctatcatcccgcttgagacgaaggatgagcttgggctgcttcatccagcattcaaggctgtgaagacttccacatgataattagagttgtctccactctccaggagaccgtggaggtggttctggagggagcatctttataagggctgcatcgataagctagatgtgatgatgag

SEQ ID NO: 38786 - DNA, 210 bp, Zea mays
  unsure (1)..(210): unsure at all n locations
  Clone ID: MRT4577_135376C.1
ccggccgggaagtcaaacgtccccagcctcctaaaatttcccctttncncaantaacacgacacncnnncttccctncctccgatcnncccgcntcnnccaaaatncgacgcgnaatcgccgccatggccgccgncggcaagctccnncttttggccgccgncntnctggcggcttcnnncgtcgccgacgcgcgnccgtgcggccacgc

SEQ ID NO: 38787 - DNA, 230 bp, Zea mays
  Clone ID: MRT4577_135377C.1
cccacgcgtccggcaaaccatggcgtccatgaccggcctgtcgcagggcgtgcgtctcccaggcccgaccggcaggcgcgccagcaggttcaccgtgagggcgttgtttgcggaggcggaggccgtcggccgccgcgcggtccttggtctcatggccagcggagtcttgagcatcacgttcgttcaggtggtgcacgtccttaccgttgtggtcatgaaggttggaccac

SEQ ID NO: 38788 - DNA, 371 bp, Zea mays
  Clone ID: MRT4577_135378C.1
cccccggcgaaaaaagagatttccctcccccccccaaaaaaggaggggggggttttcctaaaaaatcccggccggggttagggcctgaacatttaatggggttaggggaaaaaaattttgagccgggccccctttttcaaggggggccaatggggggcttcaatttggggggggggttttttattgggcccctaaaacttcccaacttattttggaaaaaaccccttttggggccccagggggaactgggtgttttccgctttgcggaaccctgggggttttttttttttttccaccaggggcggggggaaccctttttttttaaggggcatttatttttttgggggcccggatggggggcccaacttttt

SEQ ID NO: 38789 - DNA, 2432 bp, Zea mays
  Clone ID: MRT4577_135379C.1
ctgcgagctcgggatctctgctccccatcccgtgcgtccatcttggtcaagaaaccctaaccagcacatccatcccacaggcctgccgacggcgcgtcgcccccaaaccctagaccccctgcggaaatctctagagccagggtctatccatgggccatcgctgtgcgccagctcttgctccatctctccgcgacggcagcgcaacagccgcccccatgaaagtcgccatcctcaccccctgcgagcctgccccatcccgcttagcgtcgtcccccgtcgccgcgcagccgcgacccatctcgataaggatgcatccgcttctcccatagccgccactacccatgcctgccctcggctacgaacacgaagatcccctggatggaggtggagctctcagaggcttatgatctagaactctatcgcgtactacggattccacaaggtgaggagagatacgagtaggtgtcccaccggcgatgcgggtcccatcttcggcattgggtgcaatccgcctactcggccatgaaggttctctgaggcggtgtagccagagatcatgcgggcaacggggaaggatgatagctatgcagcccacatcacgaaggcatataagtgggagttcgccgaaagggaaggtttgcagctggttgtgctgaatccagggactactctgggcccatttttcatgtcatcagtcaataccagcctgaataatctgttgcaactcctaagagtcgttcgcgtgggttgaaaattaaccagaccaacagcttgagttggaccctatcaacacagggtgggtcgatgttagaaacatggcacaatctcgatcatgacgtatgagaacccatctacacagggttgtgcttggcgtccatggaatgtttgtttgacttcaccgatagaattgctgatatgtaccatgatttcccagttcacagaatcaactatcaaggaggacaaacatgttggttgatgagagcaaaggagccctccaagaagttgatcgatctgggcgtttgtttccttccgtttgatgtgaccatcagggagaccgtcgattgcttcagaagcaaagggctcatctagccctgtgaacatttccagatgtacgttttattctatagaactgctacagtaatacttggctcatacaaattaaaccgcctaaacgcactggaaaaaattaaactacacgatgatgatataggtaccagggttactattgcttactagaatgaggcgagagctgcttagctcctttgacattccttctacttagtggcaattggtttggttacttgaacctatgctccatatgatccacactgattgaattttggtttgttaatatgttttgggcaagcagtgctatgagatggagatgatggttaggcatgatctttctataggttaaaagaacagattatccaacagctgatggaacctgcattagagatattatgttgatgtcacagatttagttgatgctcatgtgaaagcgctcaacaaggcagacactagaaaagtcagtatttacaacgttggaacaggaagagatagagaggcccgcaaatagttaatctgggacaacatatctctgtactggccatagaggacaacaaaaaaaatcaaaagttgaagaatcaccaacggtgcctcctttgcaccctccagctcaagaacctgggcccgagccagttcaacaagtcatgcccacagctgaagtgctgaaccaacagatttactgtgggaatcaatgaatcagcccgaggcacatctgaaatagatcaaaacaaggtagtcgccttggtcgtggttccacatgataatccgccaaaagcacttgcttctaccagtcctggaagcgtggcgactagctggagcaaatcagattctgtgcgatgaaaagcaagtgaaagaggctattgttcaggtactaatttgccatagtgttggtctatgactgaatggtacaaaatacatgcaatgaatggatgatactttccagttaaatcatgtaattggaatacagtggtgccgtcagcggtgcggattgggggcttctagagaaagggtctagcgtcgtgccctgcttgacgaacagtgtgttgatatgtgccatcatcgcactgggaacgaacgtgatggctagcacggggagcatcttgagcatctgctttgtctccaccactcaccatgctctgagcctgtgttggtatgcagacttttccctttgtttcagaagaagatgcagttgcattgcacattgttggaacccacgatcaccacaaaattgagggaatatgtcattactcatttgcataactcattagtcattaccttgtcaaggtttatgctttccatcacgaacggttggagttgcaacataacgatactttggtataccaaataaagttactctgttcacc

SEQ ID NO: 38790 - DNA, 531 bp, Zea mays
  unsure (1)..(531): unsure at all n locations
  Clone ID: MRT4577_13537C.1
cattgggtacctcgaggccggccgggaatctcgtgcacaggtacgcatcccctctcagattgatcccctccccagcttgtctgaccctctctccatttcccgaaggtagaaagacgtcacacaatctacgcatgaggggatacgaggaacggatcagcgcgggaagcttctagccctagcacaacaatgacgcgttgaagcgagcacgcggcgacgctgctacagcgccccgcggcggcggagatggccggcgacgtgctgctctgagcgacgccgatctgggccgccgtcatggtcagcctctccactccgtgggcctgtagcccgagatgcacttcagtgctcttcctcggcctccggagccgcctccgcatcctctgggtgccgtgangnctcagaanccgnactatcagcactacctgaacagctgctctccagctgctcgggtgcgaccaatatcctctcctccggattcggcagtccaccagcctagcattggcacaggttctcccccaacaataatgccgctgc

SEQ ID NO: 38791 - DNA, 486 bp, Zea mays
  Clone ID: MRT4577_135380C.1
aaaaaaaaaaaaaaaaagaaaaaaaaaaaaaaaaaaaaaaaaaaaaaaaaaaaaaaaaaatttaacctagaaccaaaacctcacttaagagtaatttgtacctcatttccatacccctgtcggggcgatttcccttgcattttcctggccctggtggcccttttagcgtgtctttttaggctccactgcccctttttttgccccttcttacctggacactgccctggctttacccactttaatcgtgttaaaaccctttctctttccaccttttggggttttaacaaaatgcccctttccgatcttccttccattgcgaagggccccctgattggggactgtcccccccctgtcccgttttttaagcagtgggggggtttgttcgcgcattagcccgttcgcttgccagtccctcacgccgggtcctttcccttttcttactttcctttccccccccgtttgccttttttccccttctttttttaa

SEQ ID NO: 38792 - DNA, 1325 bp, Zea mays
  Clone ID: MRT4577_135381C.1
atcatgaatcaactatcaaagaggacaaacaggttggttgatgagagcaaaggagccctccaaggggttgatcgatctgggcgtttgtttccttccgtttgatgtgaccatcagggagaccgtcgattgcttcagaagcaaagggctcatctagccatgtgaacatttccagatgtaccagggttactattgcttactagaatgaggcgagagctgcttagctcctttgacattccttctacttagtggcaattggtttggttacttaaacctatgctccatatgatccacgctgattgaattttggtttgttaatatgttttgggcaagcagtgctatgagatggagatgatggttaggcatgatctttctataggttaaaagaacagattatccaacagctgatggaacctgcattagagatattatgttgatgtcacagatttagttgatgctcatgtgaaagcgctcaacgaggcagacactagaaaagtcagtatttacaacgttggaacaggaagaggtttggtaacacgagaattgtttatttatttgtataactattatttattcatgtggatagttgtaccctgcacaggttttaatcaatactttacttaatttacatggtaacaagatagagaggcccgcaaatagttaatctgggacaacatatctctgtactggccatagaggacaacaaaaaaaatcaaaagttgaagaatcaccaacggtgcctcctttgcaccctccaggtcaagaacctgggcccgagccagttcaacaagtcatgcccacagctgaagtgctgaaccaacagatttactgtagggaatcaatgaatcagcccgaggcacatctgaaatagatcaaaacaaggtagtcgccttggtcgtggttccacatgataatccgccaaaagcacttgcttctaccagtcctggaagcgtggcgactagctggagcaaatcagattctgtgcgatgaaaagcaagtgaaagagtggtgccgtcagcggtgcggattgggggcttctagagaaagggtctagcgtcgtgccctgcttgacgaacagtgtgttgatatgtgccatcatcgcactgggaacgaacgtgatggctagcacggggagcatcttgagcatctgctttgtctccaccactcaccatgctctgagcctgtgttggtatgcagacttttaccctttgtttcagaaagaagaatgcagttgcattgcacattgttggaacccacgatcaccacaaaattgagggaatatgtcatatcatttgcataaaaaaaaaaaaaaaggcgggccttttaaa

SEQ ID NO: 38793 - DNA, 258 bp, Zea mays
  Clone ID: MRT4577_135382C.1
cgacaacaaaataattcggccctagaaaaccttcttcttttgggcttaaccacattcatggaagtcctgttacccccattggtaatgctggtcgtgttcttggcccacccccccttaaatggtgttagccgggtaaacctccgtgacacccacccttaaaagtttgcctttttccccggcccccatgtttgggctcggcccaacgataacaaacttgggcttgacccccttcccttgcttgttttgggcattcctgac

SEQ ID NO: 38794 - DNA, 2919 bp, Zea mays
  unsure (1)..(2919): unsure at all n locations
  Clone ID: MRT4577_135383C.1
gccggncgttaatccattgggcgagctcgggatctccgggccccatcccgcgcgtccatcttggtcaagaaaccctaaccagcacatccatcccacaggcctgccgacggcgcgtcgcccctaaaccctagaccccctgcggaaatctctagagcctgggccagctctgtgcgccagctcttgctccatctccccgcggcggcagcgcaacaaccgcacccatgaaagtcgccatcctcaccccccgcgagcctgccccatcctgcttagtgtcgtcccccgccaccgcgcagccgcaacccatctggataaggatgcatccgcttctcccatagccgccactacccctgcctgccctcggctacgaacacgaagatcccctggatggaggtggagctctcagaggcttatgatctagaactctatctcatactacggattccacagggtgaggagagatacgagcagggtcccaccggcgatgcgggtcccatcttcggcattgggagcaatccgcctactcggacacgaaggttctctgaggcggtgtagctatagatcatgcgggcaacggggaaggacgatagctacgcagcccacatcacgaaggcatataagtgggagttcgccgaaagggaaggtttgcagctggttgtgctgaatccagggactactctgggcccatttttcatgtcatcagtcaataccagcctgaataatctgttgcaacacccacgcgtccgctaagaggttggttatccattatcattcactgcatcacaactgaatcgcaaatgggttttcatgcaataaacaaacttatagcgcaagtcgttcttgaaggttgaaaattaaccaggccaacggcttgagtcggaccctgtcaacacagggtggtcgatgttagagacatggcacaatctcgatcgtgacgtatgagaacccatctacacagggttgtgcttggcgtccatggaatgtttgtttgacttcaccgatagaattgctgatatgtaccatgatttcccagttcataggtcatacattttctaagaacatgcatcaggtttgtgtaagcagggctagctgttcattttggtaatgacatttttacttttttcacatcagaatcaactatcaaagaggacaaacaggttggttgatgagagcaaaggagccctaccagaagttgatcgatctgcgcgtttgttatcttccgtttgatgtgaccatcagggggaccgtcgattgcttcagaagcaaagggctcatctagccatgtgaacatttccagatgtacgttttattctatagaactgctacagtaatacttggctcatattaaaccgcctaaacgcactggaaaaaactaaactatatgataatgatataggtaccagggttactattgcttactagaatgaggcgagagctgcttagctcctttgacattccttctacttagtggcaattggtttggttacttaaacctatgctccatatgatccacgctgattgaattttggtttgttaatatgttttgggcaagcagtgctatgagatggagatgatggttaggcatgatctttctataggttaaaagaacagattatccaacagctgatggaacctgcattagagatattatgttgatgtcacagatttagttgatgctcatgtgaaagcgctcaacaaggcagacactagaaaagtcagtatttacaacgttggaacaggaagaggtttggtaacacgagaattgtttatttatttgtataactattatttattcatgtggatagttgtaccctgcacaggttttaatcaatactttacttaatttacatggtaacaagatagagaggcccgcaaatagttaatctgggacaacatatctctgtactggccatagaggacaacaaaaaaaatcaaaagttgaagaatcaccaacggtgcctcctttgcaccctccagctcaagaacctgggcccgagccagttcaacaagtcatgcccacagctgaagtgctgaaccaacagatttactgggaatcaatgaatcagcccgaggcacatctgaaatagatcaaaacaaggtagtcgccttggtcgtggttccacatgataatccgccaaaagcacttgcttctaccagtcctggaagcgtggcgactagctggagcaaatcagattctgtgcgatgaaaagcaagtgaaagaggtatatcttttttacattaaaatatcaaagtactttgcagattttatttcagctctgttgcatgatgcactcgcgctactgtctactgcaagtaccatcaccataaactctgaacgctctatgttcggtttcatctttttctttaactagattcgctttcatgtttcttataggctattgttcaggtactaatttgccatagtgttggtctatgactgaatggtacaaaatacatgcaatgaatggatgatactttccagttaaatcatgtaattggaatacagtggtgccgtcagcggtgcggattgggggcttctagagaaagggtctagcgtcgtgccctgcttgacgaacagtgtgttgatatgtgccatcatcgcactgggaacgaacgtgatggctagcacggggagcatcttgagcatctgctttgtctccaccactcaccatgctctgagcctgtgttggtatgcagacttttccctttgtttcagaagaagatgcagttgcattgcacattgttggaacccacgatcaccacaaaattgagggaatatgtcattactcatttgcataactcattagtcattaccttgtcaaggtttatgctttccatcacgaacggttggagttgcaacataacgatactttggtataccaaataaagttactctgttcaccaaaaaaaaaaaaaaaaaaa

SEQ ID NO: 38795 - DNA, 412 bp, Zea mays
  Clone ID: MRT4577_135384C.1
gccacggagctcggaattcggctcagcgcctctagaacgcgaggtatgggaaagccggaaaggcccccccccgcacacgcgaccggggttgccaattcgggctacgaaccacacccgccgtagtccagtcagtccaagcggttccaggcgaacctcgtgactcgccttaccattggaccgagctgggtccacttgttttgcagtcgcattcgacggcatccatgccagcctattcgtcctatatgtgaagcacccggtcgctaggctctttacgctcatttacagcaaactaagcgagcggcggccgcggcagacacaacccgcattcacaacttgcatcgacacagacggagggttgagagcctctcgcttcgtaccccactcgctctagagactctgtgcaacaagtgaa

SEQ ID NO: 38796 - DNA, 580 bp, Zea mays
  Clone ID: MRT4577_135385C.1
aattcgagaaaccatttaaaaaaatgaagaaaatcgtaatacagggataacaccaagaaaaacgaaacaacggacttccaatgagtacagggtataaaatcagaacacaacagggccgaacctttgaccttgacttcgcacaggttcatggttttttgcgcttgcgcctttacttaatacaggtccatgacttcatataccgagaaataaagctgtcaccgaaaacaatgtctaccagacagggatccaaacagctccaatagacgaccatcaccgtccactgcactatcatgctcacaaaaagggtttggttcttataatatcaaccattttacgaagggtgttttgccagcagttccgacagtcgttgtttttcttgtttcgatattccaggataaatcttaggaaggttgctaaggaatgatttcgcctctaccatccttccatgtctagagtagccctgcagtattgaattgaaagttttctcatttggcctgcaaccttgggtaaccaaataggggactaaatcaatagctttttcaaacattatggtgggaacatagcttttggtgaaaatatt

SEQ ID NO: 38797 - DNA, 896 bp, Zea mays
  Clone ID: MRT4577_135386C.1
cattgggtacctcgaggccggccgggttgtctcgccatcctcaattgtcgcagtcatgttatgcagtgtcttcttgcacacctcagtggctcactgacattgtggactcttattctcaagatgttgcagctgcggatatgatatctaagctggctgtggacgcggcagcaattcctcattttacatggaaggatggtctcctacgttacaagaatcatatatgggtaggccagtctcattctttgcagacccggttgatatcagcgttccattcttctgtcattggtggacattctggggtgccagtgacctatgctcgcttgaagcagttgtttgcttggaggggcatgaaacattcagttcagcagttcgtcagccattgtctggtatgtcagtaggctaaggccgatcgctctcgattgccggggcttctccaaccgctactagtgcctgagtccttgtggcagataatttcaatggacttcattgaagcgttaccgcgatcacagtcatacacttgcatcttggtggttgtcgatttgtttacaaaatatgctaatttccttccacttcggcacccgtttacaactctgacagtggcgaagctttttcatgaccaagtctacaaacatcacggcctgcctcagtcgattgtgtctgaccgtgaccgtgtgttcctaagaactgggggaagggaggttggttccgttttgggcgatgtccagcttcgtatgagttccgcttatcatcctcaaacggacggccaaacggaacgcatcaatcagtgtttggaaacctttttgcgctgctttgttgatgcgtgcccaaacaatggagtctctggctgtctgttgcacagttctggtacaactcgtctcctcattcagcgattggac

SEQ ID NO: 38798 - DNA, 566 bp, Zea mays
  Clone ID: MRT4577_135387C.1
gccggccgtgtccgatgagaaagtggctccactccaatgttagccctgcagttgctgaattgacaaggataatttatggaggtagcaccactaccaatatttttaattgtgttgcatctcagttctttacaatatgttgaaaaccctgccacaaataactaaatgtcttattcaaatgtcactcgaaggggttacaaaccctgggaaatgaggggaatcccaagaggatttatgtttccaaactagcccttaggactggttgtggaaccgggaaactaagcataacctatttttgtagaatgtcgaattcttgcatacagctcccagctagcttatcattgctctgaactagggattgctactgcgcatcacaaacccttgcgttccctctccaaggcctgcaaatgcagcctacctgcaaacaacttgcagctcaacctcacgacgacggcatccttcgtgcgtggaccctcatcgaagtctgaattcgtgtacatcatcaagtccgccactgcccacacctccatctgcctaccgtttcgactttcaacgcacctggatgcctt

SEQ ID NO: 38799 - DNA, 429 bp, Zea mays
  Clone ID: MRT4577_135388C.1
gccggccgggtcgcggccctccacccccgctcttcctcactccctcctctgcctcgcgcaaagcgcaccgctaccacaggcgcgacgaccgcacctcttgccccagatgctgaatagtctcctatctcctcgagtatggcgtgacgacctcctcagctcccccctccgcatctcacgaagagaacgatagacctgggatacaagggatgcaactcttgatcactagacacaagttgaccgaaggactgtcctgatgaggaaagacgttgacgtgttgacattttgcgaatgccaagaactatctttttggatatgagatggccccacatatgttgcgctcgacgctcatttcttaacagctatttctgtgatcgagaaactccgtttattgtatcgccaggaataccagaacctggcatgtccatggcg

SEQ ID NO: 38800 - DNA, 396 bp, Zea mays
  Clone ID: MRT4577_135389C.1
agttggctcactcttttctgtctgttgttcatagtatttgtcaaaagtgaggggggttgacccctggtgttttgctaaccaacttttagtgtctcaactgcgctgtgccatgtttgatacagtaccttgtacaaaaatgtcaccttggtggtgtggcatcctaaagttcatgcattcattctgccatccatgttttttgaatttctagtggtgtttcttgttgcagccttttggattttgaatttgctgcatactcaggtatggcgacatggcgttgagattttcagtgggcttttaaaagtgtgttgttgtagcttatgatcactggttaaggagctttttatatttggtgccttaaaataagcaaaagaagaaatgtatggcatgtaagccata

SEQ ID NO: 38801 - DNA, 403 bp, Zea mays
  Clone ID: MRT4577_13538C.1
ataatatataaatatacagttttttttttttggggggttttttttttttggtgggtttgggaggcactcaaaacatccaccaaacttattttccaggaagtttgggtgaactagtttgtgttttttaaaacaaactaaacttcaagcaattccacactggtttgtaaattttttttggggtttcccctacattaacctctcgaaaaagcgcaaaaggggagatgtttctgcaaaaccctgttggccatttccccgtaaggattggcagaacccctcacattaataacagctttttttaggggccccatgtttttcaaaacctttttcacattaagaccgaattaaaaagaaatattttgctttttttgaacgaaattgggtggggggcttgtcccattttcca

SEQ ID NO: 38802 - DNA, 151 bp, Zea mays
  Clone ID: MRT4577_135390C.1
gaaacgcattaattgagtgcggcgatgattggttgcatgggtccagagagatgatacccggactgggggtgatacacaaggccagtctcgtacatgaggacagggggagggactgttcgacagtcaccgtgctcgcactgcactcgccgga

SEQ ID NO: 38803 - DNA, 304 bp, Zea mays
  Clone ID: MRT4577_135391C.1
ataaaaaaaaaaaaaaaaacaaatataatttaaaaactaaaaactaaaactaaaaaagaaaaggggacacataaaaaaaaggcaaacaatataatgaacacacacactctataacaaaaaaggggcgttcgcgtctttggctcccctttctaaaaaccccagtctttcaaccttataacttgctaaaacgtttcccctatatccatgtctcggcccgttttaaaacacccctctttccagataaccccctttcgaaccccctcttaaccccctggcctaccctccctttttccccctcggtttt

SEQ ID NO: 38804 - DNA, 350 bp, Zea mays
  Clone ID: MRT4577_135392C.1
cacttatggggcctggataagagctggcttgatgccttgggcaggtcccttggggtgacggggttcaaacattacactacatgattggctgtgcgaatacttgatgcgaaaggatgagaaggtacctgttgtctgactgaacagcatgatctagtgcatctgctgaaattgattgtgggcgctttaagtattatatggattgcgagaacgagacctgtactcatcatgtgatactagcataataactgcacgaagatacctgacattgctatacattctgctagctcaagagtttatagcgacctaggagcgttactgacgccatatggagatagtttgtgtatattatg

SEQ ID NO: 38805 - DNA, 425 bp, Zea mays
  Clone ID: MRT4577_135393C.1
attggccaaacacaagaacccctttttttccttgggaaaaacccaaaacatcacccataaggggaaacagcttccatggtcgccacaaaccatggtggtagagggagggacacccatgcccccagatagaaccacccctttaaaaacggacaaagggggcccttggaaaaaaaaacacaggggggccccaccaaacgggacgaacgaaaaaaaccccttgggactggggaaaacatcccgggggcaaaaaggaaaatttgggcgggggggccccaccggtaaattcctcaatttcccgggggaattgccgaacccccccccacggttgccacccccgaacccccccccaccccccccgaaacccccgcccccaccgaagccccccccccccccggcgaaacccccccccaataaaggggcccccc

SEQ ID NO: 38806 - DNA, 384 bp, Zea mays
  Clone ID: MRT4577_135394C.1
ggggggccaataatataaatattatacacctgactagttttttttctctatcataaccatcattcagactatggggataacaacacaactaaccacccatgcgaagaactaacagccgcaaggggcgtgctccactggtagtaattagaatggccagtccttttttaagtaccaaaactgctctagcacccacttcaaatgatctcagaatataccctcccctaaccaaatcgacaggacattctactcccttttgttttcctcatcatcgccttcaaaatctgttaccggattcacgtcctttggtgctttggcctttggcgcagaagataaactccaaccgttcttggaagcactcggcgctggcctaattaatgacagatt

SEQ ID NO: 38807 - DNA, 292 bp, Zea mays
  Clone ID: MRT4577_135395C.1
gcggttagttttgagatgatggagagggcggccccagggggggagttcttacacttcacgggcgggcctctcgcgtgggctcaacccgatagctcctctgagtaagcaccaagtgagacctaccagaccacggaggaattcaggaaggtggtgcttggtagtgagaacaccgagagaggccgacggatgtaataagtcgaatgcgaggactacatggctcgcacccaaaaaaaatggtgactcacggaacggaatgtttaatgcctagagagacttggatttctgaataatt

SEQ ID NO: 38808 - DNA, 790 bp, Zea mays
  unsure (1)..(790): unsure at all n locations
  Clone ID: MRT4577_135396C.1
ggaccctcgggccggccgggcacatctcgtttattgaccttgaagtacatatttcccttagacgcaaagtatccaatatgccgcacgagaacaacgagccagatgacaccatacatatccttcatctttcttacgacaatgaagaccgctctgcgttgacgattctggcaaacgacgtccgcttccagatcattgctgaccccaaatcgctccaaaagtcaagcgacaagacgctatactatgaatatctcgacaaagtatacggactccgcgatgcggagcagcgagagtacgaggcatcgcagcagaagcccaaggacgagagacgaaagaagagtgaagaccgcgacagcgcagtggacgtgactgccgacgaagatggggacgaagaagacgaagaccaagactcgttgagtgctgcggtcgatttgaagaaatggctccttgctggcatgaccgacgttattgcagaatacgcgccccccgatcgcacaccagaaccctctagcctgtatgattggtatcatggaccgacatatttctatgatttggccataagaggcggaaagctcgtgccggaattgcttgaggagaatgatgagatgctcgcacgcattgaaaaattgtcaccgcgactgaagatgccccagtacattcagaagattgatgttccctggatagatgccaatgacttgactgtagagtctgaagtcgactttccagagccagcgcatnnctggtanagtcactgataagaatggcgacatatttttctttcaacctgtagtct

SEQ ID NO: 38809 - DNA, 270 bp, Zea mays
  Clone ID: MRT4577_135397C.1
tgagtcgtattacccgcgccgagcgcgcgcgggcgccgtacgtcgacttcctcaagcccatcatcgccgacggcgacacgggcttcggcggcaccacggccaccgtcaagctctgcaagctcttcgtggagcgcgggggggccggggtccacctcgaggacgagtcctccgtcagcaggaactgcggccacatgtcggtcaacgtgcgcgtcgccgtctccaagcacgtgaaccgcctcgtcgccgcgcggctccagttcgacgtcatgg

SEQ ID NO: 38810 - DNA, 902 bp, Zea mays
  Clone ID: MRT4577_135398C.1
ccggccgggcaaattgcaatgcaaagtcgcacggcagcaccctgcgctcctcccccaaactgaattcgctgcgctgcgcttccctcgtcggccccggcccgtgcgcgggcgtaccggctctacctcacaaaatccgccatggctggcggttcgctcgagccaggccaaactggagccgcgcccaaccagcgcaagaggaaggctccggcccctaccgcagacgctgaggacgaggcggaggcggaggcggaggcggaggcggaggagctgcagagtgtggaggagctggagagagaggtagccgatctggaccgccgcgtcctcgaacacgtccgcggcaccgccaccctcctctccgacgctattgtctcccgcctcgacgcgctccgcccgcccgctcgccctgaagctgcagttatctcggaaacatcagttaccgaagacgaccaggagcttgagaagaaagtcaagatcctcaaatctaagatcgaagctaatattgcagacctgccgaaggtacttgaaaaaataaatgaaaccgttgctcggtgtgagaatttcacgaatttgaatgttaatgtcgatcctgtgtttcgaaggaagttgtagagtttgacacatcatgcatgagactggctgattcagtattatgtgtttaggtgtatttgatcagaaaacatttgatttgagtgctgtagtttcggcgctgaccattttgttgcgtgaaatatggtagcagtgctatgtttatgatgcggaagccaagtgtaagttaaaactggaaaagagatctattcagcagaagtatttagtaggtctggcattttctgcattaatatttaattgctggttaacatgacaccatgttggtcaaaaaaaaaaaaaaaaaaaaaaaaaaaaaa

SEQ ID NO: 38811 - DNA, 288 bp, Zea mays
  Clone ID: MRT4577_135399C.1
cagactatagctatttgaagaaaaatcaccgggatatatgcatacgtgaaggttagcagcgggattacatattttattggactgagtcaaggcaagctgtggacaataacacatcgcgactgaatgtacagacaggtaggttgcccacaccatgtgttgatcggggtgcaaaagctacaagaaggtatgaccagccatatagacacgctggtcaagctggtgcttttgctagaataaccaacgctggttctggtcaattcggagagcacacatagcgcaggaggttga

SEQ ID NO: 38812 - DNA, 1280 bp, Zea mays
  Clone ID: MRT4577_13539C.1
gcctgtacggcgacctcccgccgccgtcgtcggccggcgatgaagacaaggcctccacggcttccgtttggtccagcgccaccaagatggcgcctcccaccctccgcaagccgtccaccaccttcgccccacccccatctattctccggaaccagcacctgccaggcccaacgactacgaggactaccggaaggacaagctccggcgcgccaaggaggctgagctgaacaaggagcttgagaggcggcgccgcgaggagcaagatcgggagagggaacgcgagcagcgggagagggaggcccgcgagcgcgaggagaaggactaccaatccagggcctcctccctcaacatatccggcgaggaggcgtggaagaggagggcagcgatgagcggtagcggttctgctgctagaaccccatcgtccccacctcacggtgatggcttcgccattgggagctcatcttctgctgggttgggtgtgggtgccggcggacagatgactgctgcccagaggatgatggccaagatgggatggaaggaaggtcaggggcttggcaagcaagagcagggcatcaccgcgccactagtggccaagaagaccgataggaggggaggagttattgttgacgagagcagttctaggcccccagaaaagaagccgagatctgtcaactttgatgggcaaccaacacgagttttgctgctccgcaacatggttggtcctggtgaggttgacgatgagctggaagatgaggtggcatcggagtgtgccaagtatgggacggtttctcgggtgctgatatttgagatcacacaggcagacttcccagctgatgaggctgtaaggatattcatacagtttgagcgggcggaagaagcaacaaaggcaatgattgatctgcaagggcggttctttggcgggcgtgtggtgcaggcaaccttctttgacgaggaaaggtttgggaggaacgaactggctccgatgccaggggaagtgccagggtttttcgactaaagaaagaagttttcatgtggtatcagataagtggtgggttgtgaacttgtgattctttcttttaatcgagatgaactagaacatacagtcaggcaatttacttgctttgtagtgctagtgcagtgtactggaaatattatggatataaattatggtttttgagctgtgcctcctgctgctgaactactaccttgtatagttgtatgtacatgagcattttgaccgctttagcatgctttgtcgtgcagttatcttgattttgatc

SEQ ID NO: 38813 - DNA, 1062 bp, Zea mays
  unsure (1)..(1062): unsure at all n locations
  Clone ID: MRT4577_1353C.1
ccgggnatctatccaagcaacaaacttggcattcttgcctgttcttaattattgccaggaccagganaaacaaanatgaggcctcagctgatactcgtcggcactctggctgttctcgccatcctcgcagctctcggcgaaggctcgtcgtcctggccctgctgcaacaactgcggtgcttgcaacaagaagcagccgccggagtgccagtgcaatgacgacgttctcacaaacttctgccagagcagctgcccggaggcgccggcgccataggcgggtggccggtgtcttcttctgacgtacggcatgggaccaagtcgagtttgcttctctccagtttcgtcagagaaaagaaataaataaataaataaatgtcgccggccgctctgttcggtgcttgctcttgttcgtcgtccgtgtattagtactctcttttttctttttctttcttgaataaagagccatatgctgcatatgccatgctcaaagcactgttggttggttttggttgttgatttatgggctaggccctaccgtgaaattttattaaattctataaaaaaaaaaaaaaaaaaaaaaaaaaaaaaaaaaaaaaaaaggaaggaaatctatccaagcaacaaacttggcattcttgcctgttcttaattattgccaggacaggagaaacaaagatgaggcctcagctgatactcgtcggcactctggctgttctcgccatcctcgcagctctcggcgaaggctcgtcgtcctggccctgctgcaacaactgcggtgcttgcaacaagaagcagccgccggagtgccagtgcaatgacgtgtcggtcaacgggtgccatccggagtgcatgaactgcgtcaaggtcggtgcaggaattcgtcccggcatgggccacaggccccgtcgtcacctaccgctgtgtgacgacgttctcacaaacttctgccagagcagcttgcccggaggcgccggcgcccataggcgngntggnnccggtgtncttcttctgacgtacggcatgggacgcccaagtcgagtttgcttctctccagtttcgtcgc

SEQ ID NO: 38814 - DNA, 547 bp, Zea mays
  unsure (1)..(547): unsure at all n locations
  Clone ID: MRT4577_135400C.1
gcctcctctctcttctcgtcctcatccaactgggtgcgggggcggcgacgctcggcctccctcagacggcctccaccagcggcgcctagccctctgactcaccagctgcgcccgactcccctcggcttccagagatctctagcctccacgagcggcgcccgaccctttgattccactggcgggtcccctcggcatccactggtggtgcccgggtttctaggtgacagtcttagttgaggaacacacttgtacttccagtgctagaaggaagaccacgagtcctactagctcttgggtagcatcaaaggctggttttttctctgcacaggttgaggacatnacaaacactcacaatagacatgtagtgaagtcatatttgcatgagtgtacatgcctngagtggcaggacaccgggaaaccttgcccacatgcattggccttgattataacacaggagagtgtggatgtggaattggaggatgttgtgcatgaatactactgagtccaaaggttgaaaaatgcatacgaggaggataattgaaccact

SEQ ID NO: 38815 - DNA, 361 bp, Zea mays
  Clone ID: MRT4577_135401C.1
gaggggacttttcttaaaacagccaaacttgttttaatacaaaatgagaaacctgatcctttttttttaaaagacacacacagtgtaaaaaaccccaaaagtgtctaaaccaccacaccacacgttgccatttttaaaaaaaaccccccccgggcgtgaacctttctaaaaaggggaaagccccaaacaccagtgggcgaagagcctatattagctggggggataaaaaaaccattttgatccgctccaattaaaaatctaaaattcaacaaccccctaacagcttagatgtttaaaaaaaaaggttcaaacccctcattttgaaccctaaaaccgaaatacaagcctacccacgctaaca

SEQ ID NO: 38816 - DNA, 435 bp, Zea mays
  Clone ID: MRT4577_135402C.1
aaaaagcggacacaaaaaaaagggagtccaatttacacggacccccaaaaaccggggggaaaagggaaaaagggggcaaacaattggggacccaaaaacaaaagggcggggcaaaaaagggggggggggaaccaagggggaggggaagaaaaggggcaatagaaatatgggggaaaccagaataatcaaaaaaaaaggtcggggtaaccgggttttttttccccccggagaagagaaacttttgaaaaaaggaaaaaacacacccgtccaaaaaaaaaaccctcctgaggcgcccctttttttttcaaaccctcctcttttgacgcgaggcgggggcattggctttgggggccctggggcccctgaaaaggggaaacctcccattgggggggaccaaaaaaccctttcccttaggaaccaactccccggggaaaa

SEQ ID NO: 38817 - DNA, 234 bp, Zea mays
  Clone ID: MRT4577_135403C.1
cttgtttaagtttgcgtccttagctgaggtatttgtaccggtcttggtgcatcaattaatgttgcaaaacctacgaagggttcgacagtggctgttttcggcttaggagccgctggacttgccgatgcagaaggtgcaaggattgctggagcgcgaaggatcattggtggccacctgaaccccagcagattcgtagaagctaggacgttcggatgcactgtattggtgaaccca

SEQ ID NO: 38818 - DNA, 272 bp, Zea mays
  Clone ID: MRT4577_135404C.1
gcgtcagattgagaccaactagcatcatagaaggcagattattgttgcattaatggcagccaaaatattttgcctccttaggcaccttggtctttcagcaactgctgcaacggcgaccattttcccgcaatgctcgcagactcccatatcttcacgtcatctcccgtatctcatacctgcggtatcgcctgtaagtgacaactcaactcttcacacctacacgatcgaaaacgcaatcatcaagtggcaacttatatttaacacccctgatc

SEQ ID NO: 38819 - DNA, 588 bp, Zea mays
  Clone ID: MRT4577_135405C.1
ctcgccggctccagcgagggctatgccgtcgccatccacctcgacgccggtgtcgcgctcctcgacacctgcaacgccatcgtcgcgcgcctccaccgccttcacaggcgcagcctcctcgcgtgcctcgcgcggtcatctcatttgccgagcagtgttgaggcaagcgatttgaagtcggactaagtctgcatggaggaaaagtatcatttatctttatcaatgcaaggtcatggcgctggaaaaggagatattcagatatagtccagttgcctacacataaagactttgaacaaaccaggtaaatgacatttgctgcttaaaaaatattggatcaatctcctatagtttaaatgcatcgctcttctgtacatactcatattatctgcctacatgaaaaagataccatttattatacttacacctaccgtactaactagcacagtggcactaggtctgtcataaaacaggctttggagtatgcctcatcagattgaaactgttaagaattcgccttgaagtcttaccatcaaagttcaaagctactatactctcagaagcactatgccataattcacaatgcttttg

SEQ ID NO: 38820 - DNA, 165 bp, Zea mays
  Clone ID: MRT4577_135406C.1
caatgggtaattcagggaattgtttacactgacactgccacccatggtgatgcgtgacacattattacttattcatagtcgttaaatgacttaactagctagcttgccagcggttttactacaatatatagtttctttagtgggggacacctccgtcatcagttt

SEQ ID NO: 38821 - DNA, 488 bp, Zea mays
  Clone ID: MRT4577_135407C.1
tggggaaagcgcacgcgcccgcaagcccggatcctgtatagcgggcgcgatctatgcgttcgttcaagggaccacctgtcgtctttttcgacagagagcagcaagcgagggtgtaaccttatatttactacgctatctgtatgaatcggcagtcacaatggagtccagatgttcagccccttggacatcccacatagggactgtttacccgctgacttcaccttcggagcgcgcgcttgacctatcctaagcgcacgagcttgacatgaaaatggaacgggggaaagcaactggaatcacttttgcctcattcattccgaaaggatactggacgtaagcaaatcgaacattgaagcaaagtgttaccctctgtacaatacggacatcagattgctcatggaactgggcatggacacatataggtactctatctcttgacccataatactgcggcatgcttccaatgactgaggcatgctccctgatgg

SEQ ID NO: 38822 - DNA, 779 bp, Zea mays
  unsure (1)..(779): unsure at all n locations
  Clone ID: MRT4577_135408C.1
ccggtccggaattcccgggtcgacccacgcgtccggcagaatcgcaggagacgggtaaaatcccgctgattcgctcggtcctcgcccgtcggctcgctcgaggcaccggctccgacactgcttggcgatttcccccgtgcgacccccggcgatctgagcgcgtgactccgctgcccgccgccgggccccttctccgcgccagcggtcgtcccccctcctcccgcggcagccgtcccctccccgagggtcgacggccgtgccctcctcgagggtctaggtaaacttttcgatctattgcgatcccagagctctgccgccgttgaaaccacgggctcgtggtaacttgttgtcgtcggagggatccccgatggccgcggaggcagatcagaaagtcgtggtgcacgtgcggtcaacgggcgatgcgccgatcctgaagcaatccaaattcaagatttcaggacgagataagtttctgaaggtcatagagtttcttcgtcgacaactgcatcaggatacactgtttgtctatatcaacagtgcattttcgccaaacccagatgaactggtaatagacttgtataataactttggaattgatgggaagctagtggtaaattatgctttatcggcagcatgggggctaagtctgtcttgcagcaaatggngaaaaagtactaccattccgcatgacgattgtaaatcacatctagttttagtactaaatcagacactggcaatatcctatagagcttatgcatagttcaacactcaancctact

SEQ ID NO: 38823 - DNA, 664 bp, Zea mays
  Clone ID: MRT4577_135409C.1
cccgggaaagaaaatttgggttttttaaagggggcgcccccctttttttttttttttttttttttttttttttttttttttttttttttttttttttttttttttttttttttttttttttttttttttttttttttttttttttttttttttttttttttttgaatctgaaagtgatattccacaaaaactggattttttatatttggtttctcgagttctgaacataacaatctgttcattatatacaaaacacatgctaactctacaagtttccaaacataaccatcacataagacgaggcgctgcatccaaggcaccaaaacagtaggcctattactacctaatcttcttcgaaatacttctcctctgcgtcatagttggcttctctggaccagtggtcatccagcatctcatcgttatcgatccgtgagtagtccatatgttcggtgtcttcaccggacaggaacttctgttgcatcacatacgtgaactgctccagctggtcctgcatctcttcagaagacaacgtttggttcaaagcccttgcagcagagcctcccccattaccgggctccacttgtgcagatgcatcattttcgaccacctcagtcgcaatctgcttctcgacctctggacgaatttcctacaacccttcttcccc

SEQ ID NO: 38824 - DNA, 1797 bp, Zea mays
  Clone ID: MRT4577_13540C.1
ttctttggcgggcgtgtggtgcaggcaacccttctttgacgaggaaaggtttgggaggaacgaactggctccgatgccaggggaagtgccagggtttttcgactaaagaaagaagttttcatgtggtatcagataagtggtgggttgtgaacttgtgattctttcttttaatcgagatgaactagaacatacagtcaggcaatttacttgctttgtagtgctagtgcagtgtactggaaatattatggatataaattatggtttttgagctgtgcctcctgctgctgaaaaaaaaaaaaaaaaaaaaaaaaaaaaaaaaaaataccaatccagccgcttctcaccccctcccccactcaagcagccaaaccctagattgggcaagatgctcggcggcctgtacggcgacctcccgccgccgtcgtcggccggcgatgaagacaaggcctccacggcttccgtttggtccagcgccaccaagatggcgcctcccaccctccgcaagccgtccaccaccttcgccccacccccatctattctccggaaccagcacctgcgcccgcccaaagccgcccccacctccgtccccgctccctccgccgttgctgccgaacccgccgcggccacctccttccagcccgcgttcgtcgctgtccagcccaccgtgctggaggagtacgaccctgccaggcccaacgactacgaggactaccgtaaggacaagctccgacgcgccaacgaggctaagctgaacaaggagcttgagaggcggcgccgtgaggatcaagagcgggagagggaacgcgagcagcgggagagggaagcccgcgagcgcgaggagaaggactaccagtccagggcctcttccctcaacatatccggggaggaggcgtggaagaggagggcagcgatgagcggtggcggtgctgctgctaggactccctcgtccccacctcacggtgatggcttcgccattgggagctcatcttctgctgggttgggtgtgggcgccggcggacagatgactgctgcccagaggatgatggccaagatgggatggaaggaaggtcaggggcttggcaagcaagagcagggcatcaccgcgccactagtggccaagaagaccgataggaggggaggagttattgttgacgagagcagttctaggcccccagaaaagaagccgagatctgtcaactttgatgggcaaccaacacgagttttgctgctccgcaacatggttggtcctggtgaggttgacgatgagctggaagatgaggtggcatcggagtgtgccaagtatgggacggtttctcgggtgctgatatttgagatcacacaggcagacttcccagctgatgaggctgtaaggatattcatacagtttgagcgggcggaagaagcaacaaaggcaatgattgatctgcaagggcggttctttggcgggcgtgtggtgcaggcaaccttctttgacgaggaaaggtttgggaggaacgaactggctccgatgccaggggaagtgccagggtttttcgactaaagaaagaagttttcatgtggtatcagataagtggtgggttgtgaacttgtgattctttcttttaatcgagatgaactagaacatacagtcaggcaatttacttgctttgtagtgctagtgcagtgtactggaaatattatggatataaattatggtttttgagctgtgcctcctgctgctgaactactaccttgtatgtacatgagcattttgaccgctttagcatgctttgtcgtgcagttatcttgattttgatc

SEQ ID NO: 38825 - DNA, 247 bp, Zea mays
  Clone ID: MRT4577_135410C.1
ttcaactaaacatgtcaatccacccacaggtgcttttcttcctccattaccaatttaccaagtgaacccttgatacaaaaacccaatgcatgcatgcatgcatgcgtgtgtggactccgcacctccctcctttttttctagtggtggatggcggcgccaattgaaaggaggtttcctggctgagcttatgtagctcccggtcctggtcagtcatgaccgactgggctccccatctcctgaaaccctc

SEQ ID NO: 38826 - DNA, 1020 bp, Zea mays
  Clone ID: MRT4577_135411C.1
gcgggggccgggccgcggtcttcctctcggcctgcgcagaatcgcaggagacgggtaaaatcccgctgattcgctcggtcctcgcccgtcggctcgctcgaggcaccggctccgacactgcttggcgatttcccccgtgcgacccccggcgatctgagcgcgtgactccgctgcccgccgccgggctccttctccgcgccagcggtcgtcccccctcctcccgcggcagccgtcccctccccgagggtcgacggccgtgccctcctcgagggtctaggtaaacttttcgatctattgcgatcccagagctctgccgccgttgaaaccacgggctcgtggtaacttgttgtcgtcggagggatccccgatggccgcggaggcagatcagaaagtcgtggtgcacgtgcggtcaacgggcgatgcgccgatcctgaagcaatccaaattcaagatttcaggacgagataagtttctgaaggtcatagagtttcttcgtcggcaactgcatcaggatacactggtagcaacataattgttggttctatgagaatttaatctgtgacattggaattttactgagttgttgtctgtgttgccaacagtttgtctatatcaacagtgcattttcgccaaacccagatgaactggtaatagacttgtataataactttggaattgatgggaagctagtggtaaattatgctttatcggcagcatggggctaagtcggtcttgcagcaaaatggggaaaaaaaagtgctaccattccgcatgacgattgtaaatcacatctagttttagtactaaatcagacactgcaaatctcctatagaagcttatgcatagttcaacactcaagctactttgtggttaatattacttttttttagtttaatcaacttgcaaattcccattgcggttaatattactttttttttagtttgatgtgattggacattcctatttgctccaacagtgcacatgaatcaaccagtgctggaaaaaaaaaaaaaatttgcg

SEQ ID NO: 38827 - DNA, 313 bp, Zea mays
  Clone ID: MRT4577_135412C.1
taccccctaaacccaatccgcgcgtgtctgaagaggatccagccgctacctacctccgaagatcgcccttcttacaaatggagaagccattctctattatgcttcacttccacaactatctctgcactatcacaaactagatcaaaccctatctggaacgaacatcaccccctagctaggccgacgccatactcctgaccatctcgatgctcctaaacagaaaaacgctacgcaatctctcaatcaacatcgtacgtacctgctccgctcgcacgaccacaaaggacacacgctggttgtcttctacatccaa

SEQ ID NO: 38828 - DNA, 397 bp, Zea mays
  unsure (1)..(397): unsure at all n locations
  Clone ID: MRT4577_135413C.1
ttggacctttgggctgatttatgtgcttgtttatgtgcttgtcttgttatggttgtagtgcttttaatgagtgtggntctactgcgctactcgcggagaatggtatgaagttggagcctgggtcggttttgtacggggctgagtaggtgtgtgtggttggtgaaaagccttggaaggagtccgatgagaccggcgcgttggcgggccttgctaagacctgccatctgttgcctctatggattattgagatggtcagagcggctgttggcgcgtctggtacttttcccgaagtcttcagccgtgaagtggcgtcgggatcctgcgagtgtcatcccgggttactacacgagccatccctatacgacaagcacgtagatacacgggtagcagacgaagt

SEQ ID NO: 38829 - DNA, 559 bp, Zea mays
  unsure (1)..(559): unsure at all n locations
  Clone ID: MRT4577_135414C.1
gccggccggngtcaaacaagacacatcgccacgaacccatttttcccccacacgtatcctcccctccatccccattccctgaggatccttgtacgaggcgccactcgacgaatagaccctcgactccggcaccaagagctgctgcccatccttatgcagaaatcacgacaggtggatgcatagtgggctcgctggtctcatcctatgtcagtgcctacccgtctaacacattatatctcggacaaaaatgccttcctaggtagccccccccggactgcatctgacaaatggcgcggcttagacacctacacctcattacagcaccgatctcgcactgtagctacatccagagtcatgagccccaacaaaccacacaacttcatcgtgaacctatcataatagagctgtattggataatatgatccagctacctgttgccgatcatgaaaacagagttccttttccctaggctcactcaactgtcaaaaaacagaagtaccccccggactgctttgagactataacttgatcatcgataccacactgctccattcacctt

SEQ ID NO: 38830 - DNA, 283 bp, Zea mays
  Clone ID: MRT4577_135415C.1
ggaaggggcgggccaaatctgaattttcgatttttggggggatccccccaaaaaattttacgggtttataaggggccaaaaaaaagttggggcccaaaaattccccgggtttggggaaattcaacagggaaaactggcccattgggttaaaaagggatttcccaagggagggatcggtgatctgggctctaaccaatgaaggggctttgtacatgggacaaaaaaaaaactatccctttatgtttttgcccaattaaggggctcaaacaggccctaacggggt

SEQ ID NO: 38831 - DNA, 102 bp, Zea mays
  Clone ID: MRT4577_135416C.1
ggcccagcctcaaccgcgcactgaagctgcgggacgacgactgcgcctggtggatgtcgccggcagtgccggtaaaggacttgaccatcgcaccaccggcac

SEQ ID NO: 38832 - DNA, 181 bp, Zea mays
  unsure (1)..(181): unsure at all n locations
  Clone ID: MRT4577_135417C.1
cccaccagtattaccgcgacctactgcatcatataggaacccacagcacgtcatagtcgcggtggacgggacaccgatcagggacttcaagaaccacgaggcccgtggcgtggcgttccccaagagccagccgatgcgggtgtacgcgagcttttttttcgcggacgggtgggggacncac

SEQ ID NO: 38833 - DNA, 448 bp, Zea mays
  Clone ID: MRT4577_135418C.1
aggaacatcactgaaagcgctaaattaacggaaagcaaagccgattcttatttacaatccattcaacattgtctcacttataggcttcctgttgctcgctacaacttactcaaaaaccaataaaacggtgatcaggcgctggctcttatccgctgacacctttctcccttgtccatctgatacggtactggcactccaaacaaggggcttaactcgaatcccaaaatgatccacatcaggtgtgcaattggcaacatacaaagtcacatgccacattaacgccaagcccatgggcatgtctacaatcttccatccaactgatttaatagacaccgatcaataaagcatacaggtgcatcagataaaatataaaaaccacctcactcctttggtccttttgtccttgcagatatgatgatcactgaatcctcaagcactgctgcaatct

SEQ ID NO: 38834 - DNA, 634 bp, Zea mays
  unsure (1)..(634): unsure at all n locations
  Clone ID: MRT4577_135419C.1
tcactcaaaactcagcttacaaaaatatatccatmttygcacatmcatmaatsaattctaactttatttataaatccttaccctccaaacaaagnntaaatwttrkctttsrcgttaartaactccttttcagaakactcacccagagcattttcsarttctttgasrtkgttkgtctgacggcgcsggggttggtgtaasscggcctccaatttgaacacatactscttttkkaggkccaaattgtcctttgaagcaagagtaagattttccttgtcatktcttccaggagggttcagggagcgggatrgttttgattttkctccggggtactttgtgtcgaaggakacsatcacattttgcbagcaacttntagckttggngcgatgaatcagggkgacagaatcagargtaaaccgktctcgatcatrtttcktcgtcccgtkacctcaagakactccargggggtctccggakcttcctcctttagtstttaarsaactccccagcaaatccctccccncttgktctcgaaccttascgtcctcscggggracttcsgccttcccctgtggtccgtgcgtccctttntagaagacgsccggggtaatgcctgacaaaaccgcacgagggg

SEQ ID NO: 38835 - DNA, 443 bp, Zea mays
  Clone ID: MRT4577_13541C.1
gcgagccgcacacggaggtctgcaacaggaaggcagaagtcgccacgagcgcagactgggtgaacatcgcggtaactacagctacaagagccaaaataaaagtacagtacgctactgatgtgcactagtctgactgacgaaccggcgtttctctccgcccctctcgatctggatcgcagagctttgtgatcgccgtcgtcgtcatcgtggcggcgaccttctcgacggggatcgactccaagtgcctccagttcaagcaggcggagggagagtcggaggaggacgacatcccctacggcctgggcttcttgcacctggtgttcgtcatgggcgccatgtacttcgccatgatcttcgtcggctggaacgcgagccacaccatggagaggcatgcgagctcgatacaaaaaaaaaaaggtatgacttggtggcctgaatgaatg

SEQ ID NO: 38836 - DNA, 516 bp, Zea mays
  unsure (1)..(516): unsure at all n locations
  Clone ID: MRT4577_135420C.1
gcgcgcgctgggggggggggtgttttttttttttgcgaacaaaaaccttgctcattcttctctcgtgtcgtttcatagcgggggcgaccaaagcgaacaaaaggggggccaacacctaatccaaagggggaacgggcactaacacggggacagaagcgagcggggacacgatactatagataggtaagataactcggccgaagccaggatggggccacacatcaggccctccagcgcgccgccgccgccgccgtaaccgccaccaccaccctcgcgccgaccggcgtaaccgccaccgccttcgtagccggcggcaccaccctcgggcggaccggcgtancccccaccgccgccataaccgccggcacggggccgcgcaccatagcgcgcggcggcgcgaccggcgccttagccaccggctgcggcgccgggcggcgcgccacaggactgggcctgggtaacggggatgttacgggcgggaagctccttgcggttcatgtgtctcatagcggggga

SEQ ID NO: 38837 - DNA, 703 bp, Zea mays
  Clone ID: MRT4577_135421C.1
cactcgcaccttcttccccggatggacgaacccgccgccggttccttcgcaaggttgttgtggccaaccaccttgccgagattctctcccctacaggctgtataaaccaaaccgcggcggcctcctctgccgtgaattccattcccctccgctcgctcatggtgcaccacctcggggtctgcaagatgtcgctgccgcccaaggtcagcccgcacaggcccttcgccatcatcaacggcgcccaggaccagttgttcggccccgtgctgcgtagcgggtacagtgaagacggagtggagatctccatctccaacgccgggctcgccaacctcctgcccgccgacgccgactctgactcgaccggtcttggcatgggcgatggtatgagcgcgtccatcagtcggctctgctcttcgatgtacgactgccaaaacacctggccgttgttgttcgcctgaggctagcggcaccgcaacaccactttccgttgaggttaggacctctgtacgttatccttctgctgtgcggtttctaggctacgttgtgtcgcacccgttgatggaacctgggggtactaggttaccagtgtggtgtgtatcggggtattgagataagagaatgcagaaggtaggagacagaggtaggagagaacgaggagctctattcagagttttctgttgttcagatgaataatgtccacgcg

SEQ ID NO: 38838 - DNA, 294 bp, Zea mays
  unsure (1)..(294): unsure at all n locations
  Clone ID: MRT4577_135422C.1
cggggcggcccacaccancccggacgccagggcagcancaacaccaacccccgagngtgagaccacccctncccgacggcacccccnagatatagctgggctccccctaaatctccaaatccccaccacacccagaggcccacacagaccggccaaacccaaaaaccttgtttcataccctactctcacaaccaggaggggggcgccattgactacaccgtacaccgtcgtagaaaccaatcggccgaggtctgggcttccccagagacatcgtgtgactacccgtgggaattc

SEQ ID NO: 38839 - DNA, 216 bp, Zea mays
  Clone ID: MRT4577_135423C.1
ggccgacgggcacgcgctttttttttttttttttttttttttttgttgtcaataaaagggaacatgcttgattgtgaataaagtgacactcgccaaccatggggaagcttaacacattattcctcaatcatggccgctcaatggcccaactaggtagatagccagcggatttactacagctcatagtttcttcaactgggccgaaggccgcttata

SEQ ID NO: 38840 - DNA, 635 bp, Zea mays
  Clone ID: MRT4577_135424C.1
ctcctctgttgcactagctcgctccctgtcagccttgatgtctcggaaccgtccgaggactgactgacaagctgactttcctattcagggatctaaaagcgcatggtggtctccttctcatccataccctcgacctgataaagacttttccagcatgatcacaacggcaactctatgcatcagctgcatcagatactttctgagagtgctgctctgatagtagtcgcaacgagtaagctgcaccctttagtagacattgttcgtgatgctcacacaagaatgttcttcctcatcatgagtggagtcggtatgacctcatgcgatcgtgtctgagactacattaccatcgaacagtatctgagatgaatgagttttagatagacctcagtgctgactacgctgaagtgaacgtacaggtgcaggatggactctccatcatactatgttgtagctcgacgtcgatatagaggccttcaccgcctactttcctcatgcttacatgtacaagtgcataggaaaagtggtgcaattccttaactgatactctgtgatccaagaggttccaagacaaggcgagttagtaccactagctgaacttcctcgaggatcataacgacaaagcctcaagaatgatg

SEQ ID NO: 38841 - DNA, 230 bp, Zea mays
  Clone ID: MRT4577_135425C.1
gcggagatgaagccaccagtataagtagacctcaggcgtggataaggatgtataagacgaccgtagtgatgaagcccatggccgagatgcggctgccctcgtccaagtcctccggcaaggagggcggcgagaagaaggggaagaagaaggccaagaagagcgtgtagacctacaagatgtagatcttcaaggtgctgaagcaggtgtacccacgacagtcggcatatatc

SEQ ID NO: 38842 - DNA, 211 bp, Zea mays
  unsure (1)..(211): unsure at all n locations
  Clone ID: MRT4577_135426C.1
atcccaaaccatcacncatcatcaagccgcccatttcaaacaggtggggtagcaaacaacaaacttttcataaaaataaaaattttccaacctttttatccataccacaattcaacacacatttcacccaatattattttttaccctatcattccacaaacaatcaaatccccctatattatctcaatccattacttttcccaattcccca

SEQ ID NO: 38843 - DNA, 323 bp, Zea mays
  Clone ID: MRT4577_135427C.1
ggagccgttattaaaaaagcgttttacccaggggggcaaccatttcttcccaatttaaccatccgttggcttcattaagttttgataatagttaaggcgggaaccaaacctcaccactggatttaacctatgacgaagtgacagaaacattctgatctgtcagaggcaactaagatagatttgcagagctaactgacatactcacgctcaaagcctaactaaatttattgatttctgcctaaggcgaccggccgatgtgcaatgaatggccctagttgggggcgaagaagatctcggagtcgagccttttggaccggaagagc

SEQ ID NO: 38844 - DNA, 168 bp, Zea mays
  Clone ID: MRT4577_135428C.1
ataactacacatacatcaaaagaagaacttgattttataagcacatgataccaatggtgatgatgtcatactgtcacatgctctacaattcttacaatactccatatgaagaaaataccatactttcttatcttatcatacgttatgcataaacaaataaacctcttc

SEQ ID NO: 38845 - DNA, 119 bp, Zea mays
  Clone ID: MRT4577_135429C.1
cgctgtatcacagtcgcagcacacacgtggaggtgggtttaactagctaagagagggtggcccaccatgacaggttgcaaacagccaaggtcaaagcgaaggacattgttatctgagcg

SEQ ID NO: 38846 - DNA, 140 bp, Zea mays
  Clone ID: MRT4577_13542C.1
tccaagcttatatgcaagcgagatactaaggtccagtgagcgtggtgacagaagagatgattatatattatattgtctatatctctacatggtgaatgtacacagattaacaacagatagtgtatgtcgtcactgactgt

SEQ ID NO: 38847 - DNA, 255 bp, Zea mays
  Clone ID: MRT4577_135430C.1
cgccaagatgcagcaccgctggccgccctgaacagctaatatctaccagcccggggccaacatgaacttatcgagggtggctctcagcggcacccaatctgtggtatgattcgaaccatccaaagcccatggagaaaaggtcaacctgaggatatattaccggtggctctattcgatcaagttctcagtccccctttgttcctgatccgaaagggtctggaacttgcctgccttcactaaagggcaaaccttccg

SEQ ID NO: 38848 - DNA, 2973 bp, Zea mays
  Clone ID: MRT4577_135431C.1
aattcgccgagtccatctccctccccagcctctctggtctctccggcgcctcgactgcgagacccaccgcgacgccccaccgatatggcgacagccggtggcgccgcaccggcggcaatggacgagaaggcgcggcgcacgcgcgacctccttgctagcttctacaacaccgacccgtccgcggccgccgggggtgccgcggcccccgcgttcctggcgcgcccgtcccctaccgccgcgcccgcatcgcccctcgactcaatcaactccacctccttcgatcccgacatctacatgaatgtcctggtgcaacaatccaatctggaaggtcttctacaaaggcatgtgaagatggctactgagatcaagaacctagacacagatttacagatgctagtgtatgagaattataacaagtttattagtgcaactgacactataaaaaggatgaagactaacattgttggaatggaggcaaatatggagcagctccttacaaagataacatcagtgcaatcaagaagcgacacagtgaatacatctctttttgacaaaagggaaaacattgagaaattacatcgcacacgcaatctgctccggaaagttcaattcatatatgaccttccaactcgtcttaacaaatgcatcaagacagaagcatatgcagatgctgtcaggttttttactggagcaaaacctatttttgaggcctatggagatacatcctttcgagactgtaaaaaggcttctgaggaggcaatggatgtagttatacaacaccttcagacaaagttatactcagattctgaacctattgaagcaagagcagaagctgtagttctccttaaacaattgaagtttccagtggacaacttaaaatcgaatctacttgagaagctggaagaatgtctcttgaatttccagaatgagactacacatgcttcaattggtgacatctcaaagacatttcgtgcttatttaataatatttcctgattcagaaaggcgtctcattgaacttgcacaagctttgttcttaaaccgatatgagacagtcagagagaatctgaagaaaagaattccatcaacagatctactggcaatgctacgatccttatgggaggatgcaaccatcatcgatgaggttatttcagaggctgcgctaccagctttttctttggagactactcgagacattgttaagcaacacatagcaactgcatttctccatcttcaaagtgaaatatcagaggcactggttaggacacattcaacatcaaatgagaagttggaagagtcacagctgcaaactgctatggagacaagcaaaatcaaagtatcccaaggatgcatagatctcctgcaggaatttcatcatctggtagatggcaatatagagttgcttgttaagctgagggatttgattattgattgggtacaagaaggttttcaagagtttttccagaaacttgatggacattttcatgtgctttctgggagaagcaaaacaaatttacaagagccaactatggattctatgcaaactgataagaccccaacagtcttggtacttatgcttgcacaactctgtgtttacattgaacaaacaacagtccctaaagttacagaggagttagcttctttttttggaggtggtgcacatagctacgaatatggaccaccttttgtgcctggagaaatatgtcggctatatcgatcatctggagagaaattcttgcaccattacataaatatgaagacccagaagatctccaaacttcttaacaagcgatttacaacaccagtttggattaagcacaaggaacctagggaagtgaacatgtttgttgatctacttctcctagagatcaatggtctggtatctgaagtcaagcagatcttacctggtatggttcggcgacatcggcattcagatagcactggtagcacgacttcctccagaagcaatccaatgcgagaagacatgttgaaccgatcaaacacacatcgtgctagaagtcagtttttagaaaatcacctggcaaagttatttgagcaaaaaatggaaatattcaccaaagttgaatacacacaggaatctgttatttctactgtcctcaagctctgcctgaaaagcttgcaagaatttgtccgtcttcagactttcaacagaagtggatttcagcagattcagctggatatggaatttctcaagacctctcttaaggaatttgtggatgatgaagcagccattagctttttactcaaagaggtgaacaatgctgcccatgagagatgtcttgacccaatccctcttgagccccccatattagataagctcataaatgcaaaactagcaaaaattaaagagagaaacccaaatatgcggtagctatgcacagattggtgtcgtttactagaattcagttctgtccatttgaatgcactattcagagttgtgtgtgcaacttcatagagtttagggcacatagcatggatgaaaatctggagtcagactcagatttgaataacactccccaaattgtatactggtatacttaatttggggtggtcgagctgttagcatccccttgcttgtcaggctaccgtcaagttgtcttctgtgcattgttttcttatcccaggtcaggtactggtctgaatttaatcaaatgagcatcgagctgttagaaaaccaaggcaccaactctaatagattcaccatctggaaagcgagggcagttatcatgccttgtgaagatggtttgttgggattgcgattccctttatgcgtcctgtttttttatttgtcatcttctgctgtatcatcctttctttgaactatattttcatgtggtacatgataccttttgttaccttcgccacagtactgctcacgaatagcattttgagccattttgctatgccttggaataaaacttttatcctcgatcctaaaaaaaaaaaaaaaaaa

SEQ ID NO: 38849 - DNA, 770 bp, Zea mays
  Clone ID: MRT4577_135432C.1
ccgggtcaccggccaccgcgaagccagagccccacgccccgtccgaactccgaaccccagaacagagcaaagcctcctcggcctccctgtccccagccttccccgatggcccgcacgaagcagacggcgcgcaagtcgacgggcggcaaggcgccgcggaagcagctggcgacgaaggcggcgcgcaagtcggcgcgctgcgcgagatccgcaagtaccagaagagcacggagttgctgatccgcaagctcccgttccagcgtctggtccgcgagatcgcgcaggacttcaagacggacctccggttccagtcctccgccgtcgccgcgctgcaggaggccgccgaggcctacctggtgggcctcttcgaggacaccaacctctgtgccatccacgccaagcgcgtcaccatcatgcccaaggacatccagctcgcgcgccgcatccgcggcgagcgcgcctaggcggttcggttgcggcgcctgctcgctactgatggaggtgcttagtttagcacgtcatggttgtgttataggtgtgcgttgttgttttcaagaggtagcttcttgctatgtgctgatgttaacggaggattatgattagcagttctgaaaaaaatgtaatggatgtgatctgctctatctacatgttttctgtctttgtcctggaatcccatggtgtttagcattgatttcacatgtcttgtttttctctgaatcctgcttgtaatgacatcgacatctgttacacgatctgcttcaatttgtttt

SEQ ID NO: 38850 - DNA, 3492 bp, Zea mays
  Clone ID: MRT4577_135433C.1
ctctcgtgtcacctcccccgtttgttaccccgagaaggcaagccgaggcggagccggaacgggaaggcgccgaagcgttcgcggtcgcggcttcgcgatttcggcaggaggatcgcctttgagagcttgcgctgggtggtggtggtggagcggcggcgaagatgacggcgccgcgcggtggcggagatgagccgccgccgtcttcggctgcggcggggcacgccgcggggaacgagccagtgacgccgacttccgcgctcgtgtcgggactcaaccgccgcgggtcgaggggtgcgggcatggccaccttctcgatggaggtcttcgacaacgaagtcgtcccatccacgctcaacagcatcgcgcccatcctgcgcgtcgcggccgagatcgagcacgagcgcccccgggtcgcgtacctatgtcggttctatgcatttgagaaggcacaccggctggatcagaactccatcggccgtggcgttaggcagttcaagacagctctgctccaacgtcttgaaaaggataatagccctagtcttgctaagcgcgtgaagaaaagcgatgctcgcgaaatcgagagtttttaccaacagtactacgagaactatgttcgtgcacttgacaaaggggaacaagctgacagggctcaacttgggaaggcctaccagactgccggagtcctctttgaggtactctgcgccgtcaataaaaatgagaaagtcgaggagctcaatcctgagattattcgcttgcacaaggatgtgcaagagaagaaagacatctacacaccattcaatatcctgccccttgatgctgccagtgcatcccagtccatcatgcagctggaggagatcaaagcagcagttgcagccctccgaaacattcgaggcttgaattggccttcaacatttgagccgcagaggcagaagggtggtgaccttgatttgttggattggttgagagctatgtttggctttcagcgagatagtgtgcggaatcaaagagagcatttgattctcctccttgctaatgtccacataaggcttgagccaaagcccgatccactgagcaagcttgatgaccgagctgtcgatgtggtgatgactaagctattcagcaattacaggaagtggtgcaaatttttgtcacggaagcatagtttaagatttccacaaggcgcacaaccacaagaaattcagcaacggaagattctatacctaggtctttatcttcttatatggggtgaagcagcaaacatcagatttatgccggagtgtctttgctacatcttccataatatggcatatgagctgcatggtttgctagctggaaatgttagtattgtgactggggagaatatcaggccatcttatggtggggatgaggaggcattcttgaagaaagtggttacacctttctatagagtcatcagaaaggaggcaggcaaatcacaacatgggaagacaccacattctgcgtggtctaactatgatgacctaaatgagtacttctggacatctgattgtttctcgcttgggtggcctatgcgggatgatggtgactttttcaaatccgtgcatgattcaaggcctgtaacaacggctggaagctcaccacaaaaggattccacgaaaagtacagggaagacaaatttcgttgagactagaacattttggcacatcttccgaagttttgaccgaatgtggactttctatattttggctctacaggcaatgctgatttttgcttggaatgattattcagtgaccgaaatccttcggaaagaccttttgtattatctatctagtgtattcgtcactgcagcatttctacagttcctccaaagcattttggacttcattctgaactttcctggtagtcatagatgcaagttcgttgacgtcatgagaaatgttctaaaaatgatagttagtgccatgtgggctgtggttcttccctttttctacattagcacagcatctaaagtcaatttattaccattcaaggacttggaaaaatggctccgttatgtcaatggggtgccacctctatatatcctggctgtggcagtgtacctaatacctaatatccttagtgcggcactcttcctgtttccaatgttccgaaggtggatagaaaattcagactggcatattgttagactgcttttgtggtggtctcagaaacgaatttacgttggccgtggaatgcatgaaagccaagtttcactttttaagtatacatttttttggattttgctgctatgctccaaattttcgtttagctactttgtccaaattcagcctctaataaaaccaacaaaggatgtaatgggtgttcataatattcattacgagtggcatgaattttttccaaatgcatcctataatattggtgccatcatgtctctatgggctcctgttctactggtctatttaatggatacacaaatttggtatgccatcttctctacgatatttggtggcatgactggagcacttgggcgacttggggagatacgaacattgggaatgctgagatcacgattccattctttgcctggagccttcaacacatatttggtgccttcagataaaagcaaaaataggcgcttttcactctcaaagcgctttgctgaggtttctcccaacaagagaactgaggccgccaagtttgctcaattgtggaatgaagtaatatgcagtttccgggaagaagatcttataagtgatggggagatggacttgttagtggttccttattcgtcagaccccagcctcaaattgatgcagtggcctctgttcttgcttgctagcaagatacctatagctttagacatggcggcacaatttagacctagagattcagatctttggaaacgtatatgtgctgatgagtacatgaaatgtgctgtactggaatgttatgaatcattcaaactcgttcttaatttattggtggttggagaaaatgaaaaaaggattattggtattataatcaaagaaatagaaggtaatattggaaagaatacattccttgccaattttagaatgagcgcactcccagttctttgcaagaaatttgtagagcttgtgtctaccttgaaagaaagagatgcctcaaagtttgataacgtggtgctgttgcttcaagacatgttagaagtgataacaagagatatgatggttaatgagattagagagctggctgagtttggtcatggtaataaggattcagttccaagaagacaactttttgctggttctggtacaaagcctgcaattgttttccctcctccggtttcagcacagtgggaagaacaggttatataagcaaattgttgattgcctgtattaccaagcgtgtgtcttagagtatattgtcttgtataacagtgttcacaaactccaatgtctacagattaagcgattgtaccttcttttgactgtgaaagaatctgcaatggacgtcccaacaaatttagaagct

SEQ ID NO: 38851 - DNA, 620 bp, Zea mays
  Clone ID: MRT4577_135434C.1
cctcgaggcggcgggcgcctcgcatcaaccactctttcccaatccaccgccggctcggctcgcccatcttcgcgccaagcaccgaatctccgatggcccgcacgaagcagacggcgcgcaagtcgacgggcggcaaggcgccccgcaagcagctggccaccaaggcggcgcgcaagtcggcgccggcaaccggtggcgtgaagaagcctcaccgcttccgccccggcaccgtcgcgctccgggagattcgcaagtaccagaagagcacggagctgctcatccgcaagctgcccttccagcgcctcgtccgtgagatcgcgcaggatttcaagaccaacctctgcgccatccacgccaagcgcgtcaccatcatgcccaaggacatccagctcgcgcgccgcatcaggggcgagagggcttgatctcccgttgtcgtcgtccacgttgttgggcctttcctctgtgtctctgcttgtagaatccttgcttctgttcggttccttctgttcgcatgatggtgttcgtagtgttaggagttgcattttctaatctgcttgttcttgcaccggtgcctctgaagtggcgtttccctctatcttaatggaaatggaatgtgcttt

SEQ ID NO: 38852 - DNA, 278 bp, Zea mays
  Clone ID: MRT4577_135435C.1
agcgtatccatcacttacaagaaccgcaagggtaccaccgactgtggcctcagttcctgtgttgtcaccgccaccgttcagggcgttaccaaggtttcgacgacaccttcaacttctatcccattgcggccaacatcctcgccacgtctggtatctcgtcctttacagttactgttaacaacgccgatggcaccaaggatgtttacgacaacaacggccaagagtacccaatccaggatgcaatcgtcttccaggctccccagagctgcgtccttgga

SEQ ID NO: 38853 - DNA, 613 bp, Zea mays
  Clone ID: MRT4577_135436C.1
gcacccgatctccttacagaaccaccaccacccgcgccgatggcccgcacaaagcagacggcgcgcaagtccaccggcggcaaggcgccgaggaagcagctggcgaccaaggcggcccgcaagtccgcgccggccaccggcggcgtcaagaagccccaccgtttccgccccggcaccgtcgccctccgcgagatccgcaagtaccagaagagcacggagctgctcatccgcaagctccccttccagcgcctcgtccgggagatcgcgcaggacttcaagaccgacctccgcttccagagctccgccgtctccgcgctgcaggaggccgccgaggcgtacctggtgggcatgttcgaggacaccaacctgtgcgccatccacgccaagcgcgtcaccatcatgcccaaggacatacagctcgcccgccgcatccgcagggagcgcgcctagatttggggtcgccggtaatactgggcagtatctgttcttgtcctgtgattcgaatgtgtgttgagtgcctctgtttgttggtgttgatatgatgtgtcgtctgttcctatggatcgtgatgttcgaatgaaatggcaatggaagttcagttatcatgtgatgc

SEQ ID NO: 38854 - DNA, 653 bp, Zea mays
  Clone ID: MRT4577_135437C.1
aactcagatcgccgccgcacccgatctccaagaacacaccaccaccagagccgccgacccccaatccccgatggcccgcacgaagcagacggcccgcaagtccaccggcggcaaggcgcccaggaagcagctcgccaccgaggctgctcgcaagtcggcgccggcgaccggcggcgtgaagaagccccaccgcttcaggccgggaaccgtcgccctccgtgagatccgcaagtaccagaagagcacggagctgctcatccgcaagctccccttccagcgtctggtgcgggagatcgcgcaggacttcaagaccgacctccgcttccagtcctccgccgtctctgcgctgcaggaggccgccgaggcgtacctggtggggctgttcgaggacaccaacctgtgcgccatccacgccaagcgcgtcaccatcatgcccaaggacatccagctcgcccgccgcatccgtggggagcgcgcctaggttcgtcctggtcgccggtaatgcttgctagctgttcttgtcgtgtgatcctggtgtgtgcctggtgcttctgtttgtcggtgtcgatatgatgtgtcatctggtcctatgtatggtgatggtcgaatgaaattgcaatggaaagttcagttatcgatctgatgctcgaacg

SEQ ID NO: 38855 - DNA, 788 bp, Zea mays
  unsure (1)..(788): unsure at all n locations
  Clone ID: MRT4577_135438C.1
cattgggtacctcgaggccggccggctcctcttccgccgtccgcgtcctcgactctcgcgcccaatccatcgacttcaagccaccggcgatcaacaaccagttcaagactctccataaaccgtcaatatggttctcgcagttgaccttctcaacccctccccggccgctgaggcccgcaagcacaagctcaagaccctcgtgcccaccccccgctccttcttcatggacgtcaagtgccccggatgcttcaccatcaccaccgtcttctcgcacgccaacacagtcgtcgtctgccagggctgctcgcaggtcctgtgccagcccactggtggcaaggcgcggttgaccgagggctgctctttccgaaggaagtaagcgactcgttgtagtgacagcggggattgaagggttacgatgacgactatcatggcatagggtgtagatctcattggcgccgctcggctcgaccgcaggatagaagagggatctttcgactcgagtcaatacaaaagtcaacaaaaacgggagttccggatatcttagcgctcatggaccacccttttccctcgattctatnttcctttttttgttcggcatggtctttcagctttcatgtacatgcatgtgggaaggagagatggcatctcagagcctttggattagtcgtccagggtgaggaccggtttgcaatcgaggatacctacgcatgctagcggtcccttgtaaatcaaaacgtcaaatcctcactcgtttcgcatcaattgtagcaagtgacttgctattcgtg

SEQ ID NO: 38856 - DNA, 648 bp, Zea mays
  Clone ID: MRT4577_135439C.1
accttacaacaaagcgcccaagcaatcaacaacctccgaagcagcctcccctccccacccccaccccgcagcaatggctcgcacgaagcagacggcgaggaagtcgaccggcgggaaggcgccgaggaagcagctggcgaccaaggcggcgcgcaagtcggccccggccactggcggggtgaagaagccccaccgcttccgccccggcaccgtcgcgctccgtgagatccgcaagtaccagaagagcacggagctgctgatccgcaagctgccgttccagcgcctggtgcgggagatcgcgcaggacttcaagaccgacctccgcttccagagctccgttgtttccgcgctgcaggaggccgccgagtcgtacctcgtcgggctcttcgaggacaccaacctctgcgccatccacgccaagcgcgtcaccatcatgcccaaggacatccagctcgcccgccgcatccgcggggagagggcctaggtagcggtagccgcgtgcgtgcgttatcagagagtcctactgtgatgttccggtttcagagcttggtggtgtagcttaacatgttcctgtccgctctcatcgttgtcttgccatatgtagctcctcgctgcgatgaattatcaatgaagagtgcagttatcact

SEQ ID NO: 38857 - DNA, 442 bp, Zea mays
  Clone ID: MRT4577_13543C.1
gggccggaacaaaaaaatctggggaaaagcggttatggccctgaaaaacaaaaccagccttcaacaggggaaacaaaggggtggggaacccccccccccccttggcgggtggggcttcacaggcgggggagggaggcaatccccttttataaacgggatccccccggacggatatttatccccaaaggaaaccccgggttacatgggggggagggggggcaaaaccttgatagggggcaaaagcttgatcgggggcaaaagccctcacaatcgaagggcattcgggcccttcattagggcataagggggcccgggtttcccacccgaaatacaaaaatagcctttcagtccctttttggcaaagggggggatcatcactcccattttggaaagggcttccttaattttctttgaatcctttccgggagggaccccccaaaaa

SEQ ID NO: 38858 - DNA, 720 bp, Zea mays
  Clone ID: MRT4577_135440C.1
gcgaatcctccatctgcccttgccgccgccgccgacggatccaggtctgtagactgctcactcctctacgctccgctccgaatggcccgcacgaagcagacggcgcgcaagtcgaccggcggcaaggcgccgcggaagcagctggccaccaaggcggcgcgcaagtcggccccggccacgggcggcgtgaagaagccgcaccgcttccgccccggcaccgtcgcgctccgcgagatccgcaagtaccagaagagcactgagctgctcatccgcaagctccccttccagcgcctggtccgcgagatcgcgcaggacttcaagacggacctccggttccagtcctccgccgtcgccgcgctgcaggaggccgccgaggcctacctggtgggcctcttcgaggacaccaacctctgtgccatccacgccaagcgcgtcaccatcatgcccaaggacatccagctcgcgcgccgcatccgcggcgagcgcgcctaggcggttcggttgcggcgcctgctcgctactgatggaggtgcttagtttagcacgtcatggttgtgttataggtgtgcgttgttgttttcaagaggtagcttcttgctatgtgctgatgttaacggtggattatgattagcagttctgaaaaaaatgtaatggatgtgatctgctctatctacatgttttctgtctttgtcctgcaaaaaaaaaaaaaaaaaagcggcc

SEQ ID NO: 38859 - DNA, 113 bp, Zea mays
  Clone ID: MRT4577_135441C.1
tcaattcttacagagctttaagcatttctactatatttctatggatgtgcctgagactgctagacaattacggataaatgaatcagaataattcagggaaaatatcataagat

SEQ ID NO: 38860 - DNA, 516 bp, Zea mays
  Clone ID: MRT4577_135442C.1
ctcaccggccaccgcgaatccagagccccacgccccgtccgaaccccagagcagagcaaagcctcctcgacctccctgtccccagccttccccgatggcccgcacgaagcagacggcgcgcaagtcgacgggcggcgtgaagaagccgcaccgcttccgcccgggcaccgtcgccgcgctgcaggaggccgccgaggcctacctggtgggcctcttcgaggacaccaacctctgtgccatccacgccaagcgcgtcaccatcatgcccaaggacatccagctcgcgcgccgcatccgcggcgagcgcgcctaggcggttcggttgcggcgcctgctcgctactgctggaggtgcttagtttagcccgtcatggttgtgttataggtgtgcgttgttttcaagagtaggcttcttgctatgtgctgatgttaacggaggattatgattagcagttctgaaaaaatgcaatggatgtgatctgctctatctacgaaaaaaaaaaaaaaaaaagcggcc

SEQ ID NO: 38861 - DNA, 2502 bp, Zea mays
  Clone ID: MRT4577_135443C.1
gggtccctcgggccggccggggatgccgataggggtctttcggtaatttttcgaggagttggggagggagggattcgaccggcggcgatcgggataggcggaggccggcgagagcgatggaggaggaggtgacggggagcggcgggggaattgggcggaagatggcagcgggggaggtggatcttaaggagaaatcggggacggcgtggagccactcgtacctcaaccagaagccgtggcacccgctctcgtacccgaaccagcgccgcaagtggatcgccgagcaggtccacgccaatcacgcgcgccgccaggaggaggtgcagcgggagttcgcacaggaacaggagttcttccggcagaccgcactcttctctaagaaggacaaggagaagatggaggtaatgaaagctgtgagttttatgtacgtgcgcccaccgggatacaatgcagagagtgcaaaagctgctgaaattgaagatgagaagaagaggtcggatccaggtgacatgggtactgcatctgcaagtacctcttcaatacctgacaagggacctgaaaaggctaaatcaggcgcagataagaaaaataggccaaaagatgtttttggtcggccattggcaacagaacaagaatttgaagttctcaagaatgctccaaggttagacacaggtgctcctgcaagggtcaaaccatttggagttgaagttcgtaatgttagatgtttaaggtgtggaaactatggtcaccaaagtggtgaccgggaatgtcccttgaaggatgcaatcatgcctaacgaggaaagtctgttgaaaagagacgatccacttacaactataatggcgcagacggattcagtgagcctctgaagtgggaacttaagcagaaaccatgcatgagccctcctcgtggtggatttgacccagatgatcctaatcagcagattgtggcagaagacatctttgatgattatggaggttttctgggcaactgtgcgatcccagctctcatttccaatttttctgctaccaaatccaagaaacgttccaagaagaaaagcaagcacaagcaggctaagtctgctattcatgaggactctggtagacatgaaagcagttaccatctatcatcggactttgacaatgagaagagaaacataacatcaagaagcaagagaaagaaagcaaactgttctgattcatcatattctgattccgagatagatgctagaaaaggcaagagcaagtcaaagcataagcatacgaagaaataccagttagagtcttctgattcagaatttgatgtccgtgaagatacaaggcggcgtctgaagagagaccacatgaaggagaaaagagatgagtcaccattgccgttctctaaggatcaaggagacacagaaggcaagaggcattcaaggtgttcaagggagaagcacaactacagttattcatcgagttcttctgagagaggcaggcggcgttcgagggagaaacgtcactacagttattcaccaagttcttctgagagaggcaggcattctctacggcacaaggagaaacaatattacagtgactcaagttctgatcggagccatcgacactcgagaagatcgagggagaagagacatgatagagactcaagttctcctgatgccatcaggcgctcaagtagatcgacggagaaacagcgccgtcctgatacaagcccacgtcatgccaacgggcattcaaagaaatcaagtggcaagcaagactatactgagcgtagccgttacgaaaccagtagacattcaaggagatctcaggagaaacggcactaccctgattctagcgtctctgattactcggactctgatcagcacaaaaaacatcgccaccatcataggagaaaatgaactggcagtgtataaggtaaaatgccctatctgaagtagtgatatttatatatctggggaccgctctggatgtgacgcattaagggtaccttgtccctttcttgagatcaccagaatccgcctggagtcttgtgctcggtggctgatctcagggctttgtgatgttattacagtaatgtacacggtgtaacagagtttcttcatactgggagaatggttgtttgggtcttcaaacggttgtgttgttgtagaacgtggtggggggcgtaacgtcacgggctgtttagttctgtgcctgagctagccttctgatctactgtggactcactaataagcttcatgtgaaatgtgtagcacttgtacgcaagagtgcttcccaaatgccaggacttcattgtttatggctccaacattgaacgttttatcttttcttagctgttttagaagttgtaacgtccttactaaggctgtatgcatggaagtgcaaaagactggaacttgtttccattatagaaaaaaaatgacaggacttcagaaacacttttgagaacctggaatggtttacctactcccggtggcaatacctaccaaacactttggcctct

SEQ ID NO: 38862 - DNA, 813 bp, Zea mays
  Clone ID: MRT4577_135444C.1
ggccgggaaaccccagcgcttaaaaacgcacccgaacccgccactccgaaatctccaaggacatccagcccaaacacggtcaaacacgctccagcctccacccgcacctccgctcccacaccgatggcccgcacgaagcagacggcgcgcaagtccaccggtggcaaggcgccgcggaagcagctggcgaccaaggcagcgcgcaagtcggccccggcgaccggcggcgtgaagaagccgcaccgcttccgcccgggcaccgtggcgctccgcgagatccgcaagtaccagaagagcacggagctgctcatccgcaagttccccttccagcgcctggtccgcgagatcgcgcaggactttaagaccgacctccgcttccagtcctccgccgtcgccgcgctgcaggaggccgcggaagcctacctcgtcggcctcttcgaggacaccaacctctgcgccatccacgccaagcgcgtcaccatcatgcccaaggacatccagctcgcccgccgcatccgcggggagcgcgcttaggcgtttacggttgattgtcactactgtaggtgtttaggctatgttctcgccatgttctaggtctgcttcgttcttatttgtttttttggtttcatcctgtacgttgatgggtgttgatgagctatcggtgcctgtctgagaaatggagtgatctattggcgccattgttgaacaccatgaagttgcgagctcggacgttataaattcctaccagacataaatatgcatgaacaataccattaactggagatatactgttagactagtatgtctactacg

SEQ ID NO: 38863 - DNA, 658 bp, Zea mays
  unsure (1)..(658): unsure at all n locations
  Clone ID: MRT4577_135445C.1
ctccactctcgaaccttccaagctcctcccggcctcccctcgcttccaccgagtccctccgatccgatggcccgcaccaagcagactgcgcgcaagtccaccggcgggaaggcgccgcggaagcagctggcgacgaaggcggcgcgcaagtcggcgccggccaccggcggcgtgaagaagccgcacaggttccgccccggaaccgtcgccctgcgcgagatccgcaagtaccagaagagcacggagctgctgatccgaaagctgccgttccagcggctggtgcgggagatcgcgcaggacttcaagacggacctccggttccagtcgtccgccgtgtcggcgctgcaggaagccgcggaggcgtacctcgtcgggctgttcgaggacaccaacctctgcgccatccacgccaagagggtcaccatcatgcccaaggacatccagctcgcgcgccgtatcaggggcgagagggcctgatgaacgaattctctctgtctctgttctctgccgccgttgatgttcttggtgtcgtcgtcgtgtgttaggatttagaaaatgttgngttgtcgcctgctgcttaccattactagtatcttgtagcgatggttcgcctctggaatgtcgttcaatggaatgttaccgctgcttcattgctttg

SEQ ID NO: 38864 - DNA, 655 bp, Zea mays
  Clone ID: MRT4577_135446C.1
gttttagcctcctgcgtccctcccctgttccctcaacgcttctctcctccacctcttctcgacagccgctgccacccggaaccttctcgcagcgacgctatgtgggctctccgccgagctggtaaccccctcaggttccatgcccaaaaagttgtgagtccccgtggttgtgcgagccttgaggtgctgctaactgctgatgcaaaaaatgttgaagaacaccatgaggcagactgtcagaaagtgtgctactgtcataagccaaagccaccatccttcttattgtcattttcatctggcccatttgcttggagtaggggtttctcctctcagccaggtgcaaattctagtgacaaggatgatgagttagaggatgtattttctgatctcaatgttccaccagaagctggtaaaaaggatgctgggttgacatctgaagatacttctgatgaggatgccactgatgaaattggcttgcctagtatggatgctgatgcaaaacctgagacggagcacattaaaaggacttttggttccacccttctcaagactgtgttggaagctccaaggcatcaagtcacttcagcgcttgagaaatgggcaaaggatggcaatgcacttgataggggcgaactctattatgtgctccttaatc

SEQ ID NO: 38865 - DNA, 360 bp, Zea mays
  Clone ID: MRT4577_135447C.1
gtgttaccatctcaccacacacacgctcacaggcggttttacagcaagcgcggggtttattaccacccaccatatcagggctagctcaacgcatctcgttatgacttccgaacagaggctatgtacctgagaccctgacttccattacctctaacaactcaccacctacattactctccatgaatgccaccacaaccgggttttctatctcacacttgccccaaccttacatcgccctgcctgcgctaactgtccgcctacttcacaagcttcgagccacctaacaacacagccaggctcatgagcaagattacttggtcttggacaggaacatgcccccctactgcagcataaacagga

SEQ ID NO: 38866 - DNA, 525 bp, Zea mays
  unsure (1)..(525): unsure at all n locations
  Clone ID: MRT4577_135448C.1
agcccgtgctggtcgctctgggccntacgctgctgtcctctgtgctgactatgccgctcaatcgttgatgaccttgcacactgaaccccaacgccaccagccaaagctttacgtgggcggtcctcggccacgacgctcatgtacgctcacgccgcacgcctgcaacacgctgggcggcttgctcaagagccactgctgcaggtatgacacgggtgagcaaggccaccgtgacgtgaaccaacaacacggcgtactgtcactaggaccacaagcactcgatcactgaatactaaggctacatatgtaaacagcgagcatacccgaggccgaccatggcaagcgagtgctgctcttgctgctacgaccgctggaccaggaccactatctgcgtatgcaccataaagtggtgatcgctaacaccagcgagctaaactacaaatacctaagatacaggccgaatatatggctcgagctcgccggatgtacgaagacgacacgaataatacaaggctatgcgtattaaaa

SEQ ID NO: 38867 - DNA, 268 bp, Zea mays
  Clone ID: MRT4577_135449C.1
ggacaaactgaatgacctattcgagagaacagggtgagacttctaattttttaagattttttttgttaccactactgtgagaatataaattagccagcgtaacttctgcagatgttccaaaaccgtgatatgacattcccatttatgtgttttggattttgttagtgtctgtgattttattggttcagttggttattgataaaaataactaaaagctatccatttctacacatcttgaggaatactaaattggtagcacatatgtaag

SEQ ID NO: 38868 - DNA, 411 bp, Zea mays
  Clone ID: MRT4577_13544C.1
cagcaccggcactgacaaaggtaagtgcggatgatgccgcccgtaaaccgctccctccttgctgcctcaagtgccaaagcgcgtgtgcctgcaaaccgagccaactgccatgatactggggatgcagggtggttcacgggaacccaaatcgcgttctggtatataacaagcaaagtgcatgacttcaataacccgatgcggcctggagaggctcattcctttgaaatgggataagtcttgtttcaagggaaactcgcctctaccaagaaattttaggtttcgagtcttcaacctatggaaatgttcttgtgcttgacggtatatttcaattgactgtacaaggatgattgcgcatacctagaattgggtactcaccttccactgtgctcaattcctgcgccgaacatgtta

SEQ ID NO: 38869 - DNA, 251 bp, Zea mays
  Clone ID: MRT4577_135450C.1
tcaggacgcaggctagcagcacagcagcagtcagagccatcccctgtcctcgctacgctacgcttcctcggcgccgattcctcctcctcctcctcgatcctcgtccgcccccttaccggcgcaagagctcgcccgagatggcgaacgcgagatcaggtgtcgccgtgcacgctgagtgcatgctgacgtctggcgagctgcagtcgacagacgatgcaccgcttcataactggcaagatggacgacacagt

SEQ ID NO: 38870 - DNA, 288 bp, Zea mays
  Clone ID: MRT4577_135451C.1
gttctgcttctgctacataaaattagaggatccatgggtattggttctatgaagtgaaaggaaaatgtgcccttggaccatttctataatgttttggtgattaagtgtccaacacatagtgagtgagttattatgtactaaacaaccaagaagtgcaaatcatataacaaggtatgtttctagacttagtaaattggtttttgtatactaatgtgtttgtctaagtgctagaaacagtgaccaaagaaaaggaaaaagagttggctatgtgcagccaacaccaacttt

SEQ ID NO: 38871 - DNA, 434 bp, Zea mays
  unsure (1)..(434): unsure at all n locations
  Clone ID: MRT4577_135452C.1
catattacctcaacccaacgaatantttatagctctcacatttcatcataatggatgcatttcttgaaaacttactcatcactcctcacgctctattcatccacaatttcatattatattactttcttattctatcttccctcatactattcaacaaatcttcattacaactatctaactcctactccaacatcctattgcagatcaaaatcgaccatatcaaaatatcacttccctagacattcccatgcattaaactttacattaaacctcctaaatcatcttcattaaataatcatcaaaattcatcacacacataataataatccccattatttcataaaccgacacttatctaataccttacttccattgaactttgaatttatcgtcattaaataatcaaagcattatttattcatactcaataatat

SEQ ID NO: 38872 - DNA, 335 bp, Zea mays
  Clone ID: MRT4577_135453C.1
aagagggccaaagcccctcatacatttattacttcatttagggtacctgaaataagggaaggataaaaataaaatttatgggatttattccctttaagccctggctgggggaactagagacaaatagtttagtctttgttttattcccgccgtttgacattttgggggctgagggggactaatttttagggattaatttttagttcctcaaaacaaacaaaacaaacgggacctaactctagcggtggcgggaccagatgccgtggaaaattcgggcccatgcgagttgcggtgacaaaaaaaaataagtgggggcctatgagtgacggggtcct

SEQ ID NO: 38873 - DNA, 792 bp, Zea mays
  Clone ID: MRT4577_135454C.1
attgttggcactttctctgccattcctacatggctttccacattcaggacagctataaagaggaccccaaggctcaagaattgttggtgcaactcgccagcaacccggcagcagtacctgagtacaccctacaacacggtatcctccgccacaagggtaaaatccttgttggttctcacttgcccacccagcagtccattatcggcgccttccataccagcgccgtgggtggtcacagcggtatcccagtcaccacacgccgcatcaaacaactattctgttggcggggactcaacaagtccgttactgacttcgtcagttcatgttccatctgtcttcaggcgaaaccagaccgtgcacggtacccagggctcttgcaaccattggcagttccaacagcagcctggcagacaatatcaatggattttatttccggtttacccaagtcaggcaatgctgacggtatcctggtaattgtggacaagttcaccaagtacaatcactttttgccgattcaccacccatacacagctacttctattgctcaattatttattgatcatgtttacaaacttcatgggcttcctcaagcaattgtgtcagaccgtgatccagtgtttaccagcaagctttggcaggagctgttcactcgggccggagtcagtttacacatgagttcagcctaccatcctcagtccgacggtcagacggaacgagtcaaccagtgcctggaaacgtacctcagatgttttcgtcacacctgcccctccaaatggattaatggctatccct

SEQ ID NO: 38874 - DNA, 361 bp, Zea mays
  Clone ID: MRT4577_135455C.1
acgcccacgcgtatgtcgagacgttaatatcgatctctgctgacactattctctcaatgggactggtgttgtcactgggcagcgtttaacatggtgactttgcagaggagtccgtcaagagcagaacgaacgctaacattgcgagtactgtgacgccgtgcatcgaaagggtgaggatcaatgctcaatgggtcaacaacatgaaggacgaggctgactttggcaatgttctcaagaacctggcttactagcactgatcatagaggctccacttagatttctgggttattgctaatacctttatgtaaccttgttctttggaattagtcgattaataattggcacttttgtatgtttatta

SEQ ID NO: 38875 - DNA, 618 bp, Zea mays
  Clone ID: MRT4577_135456C.1
gttcctggaagatcccgtagcctgccttccttcttgacaggctgatttaggggtgctccccaagaagatcaggactgctgaaagaatgaagaagaacttacttggcctaggatgtggctagagaacggagcgcactttcacttacctggcaaggtggttttggaagtttccacagaagccttcccagggccgctgctgcccgtcctcgcctagaagaattccattctcccatcccaggaaggagagtgccctgcgtgccacgaaagagcccaggacccacaggacaaatacgtcactggcagacctgccttcgccagcgccagcccatctctgaaacctccagcatttgtgccccggtccggcccctcccaggcctgactctttccgtgaacggtcactgcgcaggatcaagctacaatgaagaggagggaggcagtctgcgcgcaccgccattttctaggaactgggaagccccccccaccccttaggaagatccatccctgtggaaccttgcccaggcttaccagcctttgctgaggttgatctattgtccctccttgtccccatcaaaatatccagcactccaccttcagggagtagacttgaccctcaaatagc

SEQ ID NO: 38876 - DNA, 288 bp, Zea mays
  Clone ID: MRT4577_135457C.1
gagagtacaacaggaaaagttaccatggaatctgccttgagttgaggatactatatgcaccataaagtacagcacaggcaggacggagacatataatttcacattttacttggcgagaagctgaggagcagtctcaattaaaataaaagtatacctatttggtgtcacgaatctttgtatccctctccgtcattttggctttgactctccggtgaagttggaacgactcgtcataacttgcaacgaacggagatcacggctgtaaccattcatcgtcgtttactgtca

SEQ ID NO: 38877 - DNA, 156 bp, Zea mays
  Clone ID: MRT4577_135458C.1
aacctaactcttaactctgccacaactatactttaaaattctaatacatcttcacttacataaacacctttttatatactaaccaaaacattcattcatctacctacattcaaattccaccatattcccctacaatctctaatcacatactcacaa

SEQ ID NO: 38878 - DNA, 613 bp, Zea mays
  Clone ID: MRT4577_135459C.1
ggtcccccttcttttcgttcatagactggtgtaagtttcaaccgaacattatgtcaaatgcaggtcaccttacgctggaaaaaaaaaaaaaaaaaaaaaaaaagaaaaaaaaaaaaaaaaaaaaaaaaaaaaaataaaaaaaaaataaaaaaaaaaaaaaaaaacgaaaccaggacaaaaaaaccgaaacctgacctggcccaaacggaatctcaccattgacataaactaatgcaaaaggaagatcaggcatctcttgactccactcccgcccgcgaacacgatcacagttgctggaggaggtgaccggctccccgcgccaccaaggccggggggggggccgaagcggaccccagcgcggtgaacccactgttctggaggggcatcttccccatcgtcatgggcaacaccgacctggacgtcttcggtgcttcggagcgggcgcggaacaggacagactcttttcgggggggggacgccgccgccgctctctacgccaggctcgtctccaactacttcggcgtcgtgacgggggggggctcccccacgttgtttcggggggacgcccgggggcgtcaacaaccgcgccggtaggaagcgtgccgggggagcg

SEQ ID NO: 38879 - DNA, 275 bp, Zea mays
  Clone ID: MRT4577_13545C.1
attcttatctctgggcagccacccaacatcaaacaaaggggggtattattgaactataactcataagaaatctaaaagagggcaccaccactgccggcccctgtctacatggctagctatgcagatagatccaggggccggagggcgcaaacattggggcggaaaaaagcgttgcatgatgctagccaccacgtgctgatagaacggcaacaactgtggttgtatcaagaaggtagcagggctcacaccagctagctggctgaatggtagaagtt

SEQ ID NO: 38880 - DNA, 822 bp, Zea mays
  unsure (1)..(822): unsure at all n locations
  Clone ID: MRT4577_135460C.1
ttgggtacctcgaggccggccgccagggctacattgccagcaactaccagttccaatttgattctccacttcaagctggtgctcgtgagtctactggcttctcggtctgcggcaacagctcgctcgccctctctgctcctggccgttcctcgccagctatctggtaccagtgcctctctggtaccttctacaacctatacagccagagcactggtgcgcagtgtattccaatctacatcaccgccgttcagcaaggcggaggtgcttcccagatcccggatggacagcctcaagtaactcagccaccccgcgtgtcccagatttccgatggtcaacctcaggctactacccctcgtcccgtcatctcccagatcagcgatggccaaccccaggtcggcacacccaggcccgtcgtctcccagatctccgacggccagccccaagttggtactcctaggcccacaacccgccctgtcgtctcccagatcagcgatggtcaacctcaagtcggcacccctaggcccgttgtctcccagatctccgacggccaaccccaggtcggcacccccaggcccgtcgtctcccagatttccgatggtcagccccaagctcccgtccagactggaaatgccactcgtcccaacgcgacccgccccgcaccttcccagttcacaggcgctgctacgtccggtatggccccggctggcgctctcgttgctggtcttttcggcctcttcggcatgctataagcatctcaaacaagttcaattgtcattagcgaccttttgcatcattgntgcgagggctgaaaaggcttagcca

SEQ ID NO: 38881 - DNA, 437 bp, Zea mays
  Clone ID: MRT4577_135461C.1
ggccggatgtccaactcggaaggcctaccacccgtggcacgggtccctcggttctctttccaggaagcgctcctcccgccacgggggaaaggggaagccattacccagggctgacccctagaagcctggccaacccactgcacttacttggttgcaacgtatggcatgactgacattgtccgtgaggctgataagcgcgcaaccctaactccataagactgaaactcgggaggatctgaccatcatcgaaacccctcctcttgccacttggagggctcggggcatatatgaagatctcctatgggcctaaacaacacttaactgtgctcggctccaacatgttatcgaagaactgacgagatggacctacatgatctggcgcaagagcaccaagtaagctctgacaaagaatgctctcaaatatgaaaatgatgctg

SEQ ID NO: 38882 - DNA, 464 bp, Zea mays
  unsure (1)..(464): unsure at all n locations
  Clone ID: MRT4577_135462C.1
gtttttgtttttttaattttttttttttttttttttttttttttttttttttttttttttttttttttttttttttttttttttttttttttggggggaaaaaaaaaaaatgttttttatactggaaaactatatttaaatggaaaaaaaaaaagaatggggaataatttcaggatcaaaaaaacccaaattacgccaaaatgagttaaggaattcaaaacaagcccgggcaaaaatggaaagggaacttatgcaaaaaaatcgggggaaccttgggaaaaaccttnggnttggtccttttcttgccaccccctggttataacggcggttcctggtggccttccttgaaaaatttttggtaaaaaattggcccccgtttttttttttgccgcttaatggcctttaaaaggccttacaatttttaaacaaagggattcggaaaaaagggggggggggggggggaa

SEQ ID NO: 38883 - DNA, 406 bp, Zea mays
  Clone ID: MRT4577_135463C.1
tatgccgctaaatataggcactataggtatattattatcccacaacgaatgatcctgagaaagatccatcctaattcagacatctcaactagatgcaaacttttttggggaaaccgaacaattggttttattcctctgagctcctttgaacatattgcaatgtatctcctttgaacagttgttcctttttattcctttgaggagctaagtacccttttattcctttgtttatgtttatgttgtaagtatatttgaaatatgatttgtgctggagatatttattaacttatctattgttttatcttccaggcccaacgattgtggttcagctctgtttatcaactccctttcgagaagagatggccaccggcaggaacaacttatcgacattagtggccatgggaca

SEQ ID NO: 38884 - DNA, 483 bp, Zea mays
  Clone ID: MRT4577_135464C.1
ggaaagcaaagaatggcgattgacaaacatgcacaccatggccaaggtaccggcccagccgagccgagccgatggacaagcacacatgtggcgggaggagagggggccaggggcccacggcccagacaggcaggctggcgcctggagccctctagaagagctcccactccaaccgcggggacggcgtggtggtgctcgtcactggggccgccgccgacgtcgacggcggcaccgacgacaggaggtcgaacgagtcccagctcgccgccgtctgggtctgcggcgccggcgccgtcgccgtggtgggcgccggcggctggaactgccgccgctgctggttctgcgggcgcggcgggaggtgcgctggccgccgtgtcctgttgctgctgggcgccgccgccttgttcttggcgcggatggcgtccagcgtctccacgtgcctctgcacacgcctctcctgcgcccgccgatgcgccttggcgt

SEQ ID NO: 38885 - DNA, 146 bp, Zea mays
  Clone ID: MRT4577_135465C.1
attagaatatttcttataaatctgtttactttttatattaagaattaaactgtacctaaaaaaactctgactattcccatttgtcagtttagcattacattgtcttgagcaccagaaaataaaatccatatattaataaaaaccta

SEQ ID NO: 38886 - DNA, 474 bp, Zea mays
  Clone ID: MRT4577_135466C.1
tttttgtttttttttatttttttttttttttttttttatttgttttgtttctttttttttttttttttgtttgttttttggcaaaagggggggggaccagcccccgacataatttggatgggagagggaaaatattttacccgaccggggggccattttcccccccctgcaaaaaaagagggtgaaattgacgccggggaaacaacaaaaaagtttaggacggccccctcccaaaaaaaaacccccaaggcgcggcaagtttaaaaaaaaccaaggctttatatctcttggggggggcgcaggcacccatacccctaaatattacccttgatagggaccccgacgaggaccataacccttcgcccctgtattttttccccttctgcacgagcccggaggggtgtctttttgtaggaaaccttccttttttttaaagcccactaaaaggcccttttttaaccccctttattggag

SEQ ID NO: 38887 - DNA, 218 bp, Zea mays
  unsure (1)..(218): unsure at all n locations
  Clone ID: MRT4577_135467C.1
ggtgggtctgtgatggggaggtcatattatgatggtgaggnnnaagcttgggnngtaatcacagtttgtaatacttacaaatgcaatgaactgtctaactcccgacacatccaataantgaatatcgaactgggggcgngaaaacgcccccaaacacaccaaagnctgcaaatggaatgtgggtctacttttaacatccatgttcgtggtaaccaaca

SEQ ID NO: 38888 - DNA, 783 bp, Zea mays
  Clone ID: MRT4577_135468C.1
ggccctaggggccttttttttttttttttttgctgtaaatgccaaagtcaaaaggcatccctcgatgttttggtgagtttgagcaacgtgcttgcaaacataaattattgaatggcattgaccatatccattctcagaactacatataaccaaaattggacacaggtggccagtgtttagttgtcagccacttcaatgagggtttgctcgtagtcagcaggggcctcaaatccgtggaggttcatcacggttgcggctacgttggcgagcccaggggtttggatgtcgttccggaatttcactccagggtgaaggccagggcctccaatggcaaccgggaccggctgaagggtatgcgaggtaagaatctggatacggtcattcttgtcgagcaacggcttgccagacttgttccttttcaccatatcctcagcattgccatgatcggcggtaacaaggtaaataccaccaacttgctcgacagcatccaaaataatcttaacagcttcatcagctgccttgcaagcaactacggtggcctcaatatcaccagtgtgaccaaccatgtcaccatttggcaggttgacacgtacctggtcaaactttccacttaggagagcatccctggctttctcagcaatttcaagcgcctttcatattgggtgcaacattgaatgtaataccactgtcactaggtacttctacatactcctccttagttgcatcaagtatcccgaacggttaccgttccagaaaatgtgacatggccaaattttactgtct

SEQ ID NO: 38889 - DNA, 417 bp, Zea mays
  Clone ID: MRT4577_135469C.1
tctttgaccaactggcagcttgcatatttggaggataggtgggctactggtggtggagctagaggtcctgacaatcaataggactgcttagttggtgatcctagcataccaggaccagcagatgtctgaaaccgcacccaaaggacctgactgtgcgacgacgaataatcagtggtggcgcgtccagagcaccagcttgaccgagcgaggacctagcacgacctcctgaggaagtgtgactccatatgcacaaacatgggcccggtttacatggacaagggcgcatgcaagctcagatgccagacatcacatcgcgatatctgtaaatgtatgatgcactagagactgatacaactccaccatgtctgtgcggcacacatggacagagagacgattcttcaataaggaagaggctct

SEQ ID NO: 38890 - DNA, 603 bp, Zea mays
  Clone ID: MRT4577_13546C.1
cctcgaggccggccgggccgacctcctgtgtgcctcgcaacgctcgcctccgcacctaccgcctcaacctccatttctgctccacggtccatgcttgatgcccccgtcgtcacctcccctcgccaacaacctgatccgaccatgcctcgcaaagcctgcctctgcacccgccgatgtatcctccgcttctgctccgcgctccatgatcccgtcgtcatccatcccgcctccacgcccgctattgtatcctccgcttctactctgcgctccatgcccccgtcgtcatccatccatgcccaaactttatccgcgcctcccgccgccatcaacaacaacctgccccgcgccccctcctcaccgcgcatttgtctcattcatgtgaaatctacatttgcagcagtgagccgaccgagtagcaccgatggtagcgtacatgtgcgtggcggagaagatgccggccctagagacgtggcccccaacacggccaagcactttgagtgcaagctagaggagcggggcctccaccgctttgagcgacacctagcgaatgcgccccatggcgtgggcatcgacgccccaccacccaagtctgggtgcggtggc

SEQ ID NO: 38891 - DNA, 181 bp, Zea mays
  Clone ID: MRT4577_135470C.1
ccggtggaggcggcgcagcggcaggcggtcgaggcgcaggcagtctcgcaaagcctcagagccaggatcagggagagagcagaccctctctgcgcggtgtccccggccgagcggggtagagatagcgtgctccgcgatcgcatttccgagatgcgaggcaaggaggggagggatggagtag

SEQ ID NO: 38892 - DNA, 557 bp, Zea mays
  Clone ID: MRT4577_135471C.1
acactcccaccacaacctatccctacgcacacgtagcacccagtggcatagatctcagacaatgagactgaaacagaataaaataattatgactctgcagacgcaagacacacaggtgccactattcctggctctacttactcctcctcagctcgatgcgtgtcccagcctctctcactcgccacagctgtagatgcgcccggatagacgagaataccccccctacatgcatcatctagctcccgtgcaccttggatgcttattaccgcaataacacctcctattccctcatcaactacttcaccggcgaaggactccatgaagaagaggataattgtcataaccaccgaaacgcttgagtacagggaccacacccactgtataggagagatctgcattgagaaaggattgaaccgcctcatcttaacaaactacacaactgtgcaagtctgtgtaccagtctcacaagctgatgaagtctatccactgagcagttgttcaagctgcaaaatctactcttgggagtatatgattaagacgatacaccagcatgagca

SEQ ID NO: 38893 - DNA, 187 bp, Zea mays
  unsure (1)..(187): unsure at all n locations
  Clone ID: MRT4577_135472C.1
gcgggtangcggcagtatataaagcggggtgggtggtgggctattcatcaagagaaataaaaaaaaaaaaataaaaaaaaaaaaaaaaaaaacaaaaaaaaaaaaaaattcccaccctctctctttagcgctcgacattctccctgctgtgcaccttgcaacacacttgtcctgcggaaccaaaagg

SEQ ID NO: 38894 - DNA, 331 bp, Zea mays
  Clone ID: MRT4577_135473C.1
acatgcgtccggaagggcgctacacgacgaagtcatgcagcacgatgtagccgccactgaatctgaacatatgcgtgcgtgtaaaaccgataagaatcgaggaaaaacgggtttgacctacgggcctcatgtgtcagcgacaagagcatgtgaggcggttgcctcagcgcgatacggcgatggcagggaaaacgatgtacgcacaatcgttgcatgactacatgacatgaggtaagactgatggacgactcgacgtagacagttggtacacaaagggagtagtccacagctcgacgaggtagtcagggtatcagatgcaagcgacttgctg

SEQ ID NO: 38895 - DNA, 416 bp, Zea mays
  Clone ID: MRT4577_135474C.1
gacctcgattgctgatgctaaacaaatcacagctggagggattgagaactaaaatgaaatggattacactattctgaccccaacaataacaccagccacattgaaatatcagaaatttactgtggctgccgactacatggttatggtgggggaagcgggctactccccggatgctgatagaaaactcgcctgatttgctacgcaagaagttcttccatatccaaacgacaaccacgttgggctaatataacatattttagtgaatctacttcctttctcattccttgatatggtaggtcccatttttgcttattttttgacatatccctttatgatgtcgctccccctgcaggcggttgatttacccctacccctctgttccccgactcaatcctcttagtggtacctccttgtct

SEQ ID NO: 38896 - DNA, 1933 bp, Zea mays
  Clone ID: MRT4577_135475C.1
gccggggcttctggctgcccgctgtcccgtggtccctctctccctccctgtcctgtccgccgccgccggtccccgacggcggctctgcagccacacgcacaaggactagagcggacataatacggtgcaagcggagggacgccggcgcaaaagcgcacagttcccgttccccctccgacccgttcattccgcttggttttctcctcctccgtcctcttcgctccccgtcagaccatccctgtgaggctgtgacgcaaccgggcgccggcggtctctcctgcaccacagggcacgccgcctcccgcgcacgtgttctcctcttccggggattcagatctggggattgctattctgtccgtctgactccgtccgtcccgaggcgcggcgaggggagcgagatgggttacattggccaccacggcgtcgccacgctgcggcgctacaagtacagcggcgtcgaccactcgctcgtcgccaagtacatcctccagcccttctggtcccgattcgtcaacatcttcccgctatggttcccaccgaacatgattacactgacaggtttcatgtttctactgacatcagcattccttggctttttatattcaccccatctagatacagcaccccccagatgggttcaccttgctcatggactgcttctctttctttatcagacttttgatgctgtggatggaaaacaagcaaggcgtaccaactcatcaagtcctctaggcgagctttttgaccacggatgtgatgcgcttgcgtgtgcttttgaatccttggcttttggaagcacggcgatgtgtggaaaggctaccttctggttttggttcatttcagctgtcccattttacttcgcaacctgggaacacttttttacaaatacacttattcttcctatagtcaacggaccaactgaaggccttatgctgatctacttgtgccattttttcacctttttcacaggagccgagtggtgggcacaggattttcagaagtcaatgcccctgctgggttgggttcctcttatctctgaaatccgggtgtatgacattgtgctatgtcttatgattgcttttgctgtaatcccaacaattggatctaacatccacaatgtatataaagtcgttgaagcaagaaaaggaagcatgcttctggcactagccatgctctttccttttggtttgctcttggctggagttcttgtctggtcctacctttctccttcagatataatgagaacccaaccacatttgctaattattggaactggttttgcatttggatttcttgtgggaagaatgattctggctcacttgtgtgatgaacccaagggtttgaaaacagggatgtgcatgtcccttgcgtattttccatttgcaattgcaaacgcgttgactgcccggcttgatgatggaaatccactcgttgatgagcagctagtgctcctgatgtactgcctatttacagtggctctgtacatgcattttgctacatcagttattcatgagatcaccaatgcactcgggatccactgcttcaggatcactaggaaaaaggcatagttcctcctccacgggcatcagcgttgccctggattgtgatgttaatcaatcacaattcacaaggtggtgcctgacagacaagcaatttttcatatttaatggatgctacttcctgattactcacatggatgacgtgccccgccccttgaaattcacatcggcatgaacgtgcggatgagaaagcagtgttttttttgaaacaattagcaacatcatgctgtatcttaccaattttttgtggaattcgttgaacttgctgatagtgatgtattgcaaattaagaattgtttttgttttgtttaaaggaatgccccctcaatgcctcccaaaaaaaaaaaaaaaaaaaaaaaaaaaaaaaaaaaaaa

SEQ ID NO: 38897 - DNA, 285 bp, Zea mays
  unsure (1)..(285): unsure at all n locations
  Clone ID: MRT4577_135476C.1
tgcggcgctcgagncagncgggcttgcatagtctgacgcctcaccggccctcctcctgctgttaagcccagaggccagagctcccgtcccgagggtttcagagatcgcatccctggtccgcgggatccgatgagatgcgtgggtactcccgcagtccgaactcgtagcaggcatggctgaagcggccgcatcttcgtcttcgtccggatcctgcgccccgcgccgcctccatggcgccggcatcgtcagggacgcgctcacgtacaatggcctcgccgcactccc

SEQ ID NO: 38898 - DNA, 827 bp, Zea mays
  unsure (1)..(827): unsure at all n locations
  Clone ID: MRT4577_135477C.1
ccggccgggtttcttatttttcttaacctgatgccgaagctcgataacttcggactgtaaatttctgaaggctatccaagtgcttttatcttcgacatccttcttagactttagtgctttgattagaataagtctctacacatcatgaagttcaaaaatttagctaatcaaattttaactgcaaaaaagacaatgtgtaaaactatatgccaaccttcaaagtgttataagccaagcaatatgcaagttgatcctttggcatagccgataattcacattccagcttaggataacccatcttatccatcatcttgcggcatacctcaagttctctattgtctaggagacaatagagatagtcatcctcatcatttccaccatagacaagagaggtcgatgggtactttagatcttcagcataatcttggacttcggcaatttgctctacagtcagtccccccccctaagcatgacaacgatgtactcgtgtcgtctaggaggtaccatctctatggacactgaagttgtttcctctttagagccctcatccttaggacctacaacttcatccctctcttttcccaaatcaaggtcaaccttcagactaacaaataactccgattcagttttcatgctctcagcaatagacgtgctaagaggagtttccacgaactttgccacggtaggcgaagccaccttcgtaggctttagaacagctttcagaatgttagccatcgtattccctttccggngtgttcccctaaggattgtcttaaagcttcgccaagcctctagcttcgtcggtgcttctggttgcaagctggtca

SEQ ID NO: 38899 - DNA, 871 bp, Zea mays
  Clone ID: MRT4577_135478C.1
cattgcggccgggccggggtgtcatatctacctcgaaagagaggtcgcagacggaacccttccaccctcccgacaccaccttcgattcctctgcgatttccccccgcgcgctcgccgattccttgatcgactcccgcgtgattcgctttctggtcggattctctctcctcaagcatgcagtcggatcagcctgtgatcagcttgcgccccggcggcggcggcggcccgcgcgccggccgcctcttctcccccgcctttgccacctccgtttccggagacttcctccgcctgcacgtcggtggcgcctccggcatctccaagatcggtgattcacattttgagccacgtgagcgtgttcgttacacaagagatcaacttctcgagctgcgtgagcttgttgatgtgtctgaggacattttaaggctcaagcaagagattgatatagagcttcatggtgaagatcagacctggattcacaatgattcagctgttcaaggacaagtccaaggtcaaacacaagcacagaatcggtatgctgagacggataatcgtgattggcgtgcacggtctgcacaaccgccttcggctaatgaagagaaatcttgggacaacatacgcgaggctaaagaagcctacacctctagtggtaggcaacaagagcaagctaacagacaagatcagttaagctcccagtttgcttcgaaagctcagtttggctctacccctgctcttatcaaggctgaagtgccctggtcagcccgaagaggaatctctcggagaaagaaagagtgtgaaacagtgaaagtatactgaacaaacttacccagagaaatcgatcttctgagggtcactaaggaagctggaatactac

SEQ ID NO: 38900 - DNA, 444 bp, Zea mays
  Clone ID: MRT4577_135479C.1
atggataaaagagctaccctcggtggattggagtctgaggacgacgccaagccgggccacgggcttctcgccgtttttcctagtctatggggccgaggccatcttaaccacggacttggaacacggttccccgaggacaaaggcatacgacgaccaaaacaaccagaccagccgagaggattcattggaccagctggaagaggctcgggacgtagccttactacactcggcgcggtatcagcagtttctgtgacactaccacgcctgaaggattcggcccgaagcttccaagtgggagatttggtgcttcggctacgacaagacgcccgagggcgccacaagcttactcccccctgggaagggccgttcatcatcgccaaaattttgaagcccaggacatacaagctggcaaacgatcaaggcaaggtctacagcaacgcttag

SEQ ID NO: 38901 - DNA, 246 bp, Zea mays
  Clone ID: MRT4577_13547C.1
caatttattttcgttcttacttgatagcctaaacctactaattgatgtagtggaacagtggatgggcaaaggtttactgcatctagaattctgaactaaacaagaacacaaatagttttgttaagaatgctcatccattcacatactataaaaatttcaaacatgaggcagccatttcggttggggaaattgtcatgccagtgttttatgacttttaaatattgcgtgaatgtgttatcctgtagg

SEQ ID NO: 38902 - DNA, 870 bp, Zea mays
  unsure (1)..(870): unsure at all n locations
  Clone ID: MRT4577_135480C.1
gggtacctcgaggccggccgggaactccctcccgcccatccgacttctcatcatccttcacatttcatcacaatggcatctgctccgcgattgtcaagcgctttccgcgccgccacccccctgcggaccacagccttcaatggcctccgcttctactccagcaagactacgtcgctgaaggagaccttcgccaacaagctgcctggcgagatcgagaagatcaagaagctccgcaaagagcacggcaacaaggtcatcggcgaggtcacccttgaccaggtctacggcggtgcccgtggcatcaagtccctcgtctgggagggttccgtcctcgactccgaggagggtatccgtttccgtggcaagactatccccgaatgccaggaactcctccccaaggcccctggtggccaggagcctctccccgaaggtctcttctggcttcttctgaccggtgaggtcccctctgagcagcaggtccgcgacctctctgctgagtgggctgcccgctccgatgtccccaagttcgttgaggagctcattgaccgctgcccaagcgacctccaccccatggcccagttctccctcgccgtcactgctctcgagcacgagtccaacttcgcaaaggcctacgccaagggcatgcacaagtcgcaatactgggagcacaccttcgaggactccatggacctcattgccaagctccccaccatcgccgcaaagatctaccgtaacatctacaaggacggcaaggtcgctcccatccagaaggacaaggactactcgttcaacctggccccaccagcttggtttctccgagaacaggnactttgttgagctgatgcgtctgtacctcaccatncacactga

SEQ ID NO: 38903 - DNA, 1759 bp, Zea mays
  Clone ID: MRT4577_135481C.1
ctcgtggtgaagaaaggcgggagctggagagcaacgagacaagcacggcggtgtgccgtgtgcgtgcgcacaggcactagagtgagacagctctagaagagagcaagccgccgccgccgccgcatcatcgtcagaagcggccactcctacctctgatcctgatacaaaatccaggccagagggcaggagcctccaaaagagatccactcccccggatggcttcttgcttctgcttccgcagacgccgccgcccaatcattgcctcctctgtccccttattcctcctcctcgtctccttcctcgcctcggcctcggcctcttccgcgacgacgacgaagctgctaggcagcggcaataatgccacgcggcgggtggcgttcagctcggaggagctgcgcgggttgcggagcatcacggcccggcttgcgcggctcagggacgcgtccgtcaagacgatccagagccccgacggcgacgtcatcgactgcgtgccggcgcacctgcagccggcgttcgagcaccccaagctgaggagccagaagccagaggaggagcccgaagagaggccgaggagcagcgctggccgcttctccgacgctggccaggacgaggacgacgacccgttgccgcaggtgtggcggcgctccggcgagccctgcccggaggggaccgtaccagtgcggcgaaccacggaggacgacgtgctcagggccaccgcctcttccgccacccggttcgggatgaaggcccgcggtgcggggctcgggttcgcgcggcgcgactccaccggcggcggccacgagcacgcggtggggtacgtgaccggcgggcagttctacggcgccaaggcgagcctgaacgtgtggccggcgcaggtggcgtcgccggcggagttcagcctctcgcagatctgggtcatctccggcgccttcggcaacgacctcaacaccatcgaggccggctggcaggtcagccctcagttgtacggcgacaacagccccaggttcttcacctactggacagacgacgcgtaccaggagacgggctgctacaacctccactgctcgggcttcgtgcagaccagcagccgcgtggccatcggcgccgccatctcgcccgtctcctcctacgccggccgccagttcgacgtcacgcttctcatctggaaggacccgcgccggggccactggtggctgcagctcggctccggcgcgctcgtcggctactggccctccgcgctcttcacgcacctcggctcgcgcgccgacatggtgcagttcgggggcgaggtcgtcaacgcgcgccccgccggcgcgccgcacacgcccacgcagatgggctccggccgcttccccgccgagggatacgcgcgcgccgcatacttccgaaacgtgcagctcgtcgactgggacaacaacctcgtaccggccgccgggctccgcctgctcgccgaccggccggggtgctatgacatcgccggcggcagcggcggcgcgtggggcacctacttctattacggcgggcccggcaggaatgcacggtgcccgtaactttactagtatttagctaggaacggaatcgaatgcatgggatgggtgttgtatcgtgtgtttcgtacgtgcgcactcaagcacacattagcagaggctgattgctatatattactccaaatgagtctgctttcactttttttgatctctccatgtgaatatgatgccgttgtgatcatctaactatttgctcatttaaaaaaaaaaaa

SEQ ID NO: 38904 - DNA, 227 bp, Zea mays
  unsure (1)..(227): unsure at all n locations
  Clone ID: MRT4577_135482C.1
ttttgtcacggggggggggggggggggatcaaaataataccnatagtaaggaagtggcccgctaganttggcccgggtgtagtagaaggtaaaaagaattaggcaataagagcccgacttgacgataacaaaaatgtggggtcttcataatggcccaatancgaannatgaacaatcggtaacttggttattggcgtgtccgcccccagctttgtcagttaacaaca

SEQ ID NO: 38905 - DNA, 981 bp, Zea mays
  Clone ID: MRT4577_135483C.1
gcagcacgcggtggggtacgtgaccggcgggcagttctacggcgccaaggcgagcctgaacgtgtggccggcgcaggtggcgtcgccggcggagttcagcctctcgcagatctgggtcatctccggcgccttcggcaacgacctcaacaccatcgaggccggctggcaggtcagccctcagctgtacggcgacaacagccccaggttcttcacctactggacagtaagagcagctccctcgatcatccctcgtcaccattttttccggccatcaatcaagtaaaaaaatggaaacgcaacgcaggacgacgcgtaccaggagacgggctgctacaacctccactgctcgggcttcgtgcagaccagcagccgcgtggccatcggcgccgccatctcgcccgtctcctcctacgccggccgccagttcgacgtcacgcttctcatctggaaggacccgcgccggggccactggtggctgcagctcggctccggcgcgctcgtcggctactggccctccgcgctcttcacgcacctcggctcgcgcgccgacatggtgcagttcgggggcgaggtcgtcaacgcgcgccccgccggcgcgccgcacacgcccacgcagatgggctccggccgcttccccgccgagggatacgcgcgcgccgcatacttccgaaacgtgcagctcgtcgactgggacaacaacctcgtaccggccgccgggctccgcctgctcgccgaccggccggggtgctatgacatcgccggcggcagcggcggcgcgtggggcacctacttctattacggtgggcccggcaggaatgcacggtgcccgtaactttactagtatattagctaggaacggaatcgaatgcatgggatgggtgttgtacttgtacgtgtgtttcgtacgtgcgcactcaagcacacattagcagaggctgattgctatatattactccaaatgagtctgctttcacttttttt

SEQ ID NO: 38906 - DNA, 154 bp, Zea mays
  Clone ID: MRT4577_135484C.1
cggacgcgtgggcgcgtgcgtcggctgcttgcttccacgtgtaacttggctgccgtcgacacgcggacgcctacacggtacgccgccatcgccatggctgcccagttctgtacaaccattgtcctctcgtgacattccatagaggactgacagc

SEQ ID NO: 38907 - DNA, 646 bp, Zea mays
  Clone ID: MRT4577_135485C.1
gctataatttcagtgtctgagcatttgtgcccgggcggcacgtaataatcaccactatggccagcggacggagaaagagcgacattccagctgtggggtggtggctcatggcagtcggcaccatacgatccgccatcgggaggccctgcctcttaagttctagcagcgctctgcttggccgactacccgaaaatgaccggggagcaggagcgagctatggttgacaggactctgatatcctgcactcttagtttactgtgcgcattcaacatggagagcaagcctttatacgtagctactgttaatgtgcttcgactacgtcgccgtctacactgctcgtgaagggcttgttgtaccacagaatccatgcagccagtatcgatgcgtactgctacatggcaggtacatccagggtttggatgctgctacaatggaactaccatggacgcggccgccgtccctgtgaggctagcaaggagccctgagccaccctttatggttctttcgccatcgatgagattggggcggtctactatacagacgatgaataaatatttatttacaaaacattgtattatagatataagcatgcccaccgagttacggtgttgctgttgacttgctgtatgtaagaagtgacgactag

SEQ ID NO: 38908 - DNA, 629 bp, Zea mays
  unsure (1)..(629): unsure at all n locations
  Clone ID: MRT4577_135486C.1
acttcgccgacgccgccgccgtctacgacgtcggcttcttcgaccagatccgccagatcgaggcgttcggcgcatggcccgtggcgacggtgtcggcgggcgagaagaaggtgacagtggaaggtccgctgtgcagcgcctcggaggtcgtgggctggttctcgagggacttggacgatgacggcaccacccgttcggtggcatacgacaggcgggaagccgacctggatcctgccgctgccggtacgcgagcccgcacgacgacgacgatcggcgtctcgggcttcgcgttcaacagctccattctgtgggatcccgagcggtggggcggccggcgtcgtcgtcgttgccggacacttcacaggactccatcaagttcgtggaggaagtggtgctggaagaccgagctaagctgaggggaatcccctctggctgctcccaggtcatggtgtggcagtacagcgacatgcccagctcgcaacagtagatggcagccggtggagtcgatgtaaatgcggtgggcgatagcanaaggaaagggaacaaggttgattctgttgaaactacgttaccaccgatcatcagctccgctcccttccctccgtcagcagtaaaggcgcagaagctgt

SEQ ID NO: 38909 - DNA, 746 bp, Zea mays
  Clone ID: MRT4577_135487C.1
ccggccgggatctccgacgtggaggtttctgtctaacgttccagaggcgcagggcgttcggcgcatggcccgtggcgacggtgtcggcgggcgagaagaaggtgacagtggaaggtccgctgtgcagcgcctcggaggtcgtcggctggttctcgagggacttggacgacgacggcaccacccgttcggtggcatacgacaggcgggaagccggcctggatcctgccgctgccggtacgcgagcccgcacgacgacgatcggcgtctcgggcttcgcgttcaacagctccattctatgggatcccgagcggtgggggcggccggcgtcgttgccggacacttcacaggactccatcaagttcgtgcaggaagtggtgctggaagaccgagctaagctgaggggaatcccctccggctgctcccaggtcatggtgtggcagtacagcgacatgcccagctcgtaacagtagatggcagccggatgtgaggcgtcgcagcctcctggccggacggggaaggggaggactggaccggtggagtcgatgtaaatgcggtgggcgatagcaaaaggaaagggaagaaggttgattcatcagtaggccgtgtatgcaagattgcgtttcattcttcttcctttgggtcccatttttctttctctcagttttttggtcatcaagttttggggcgccatgaatggtgatgagctgcctgtgctgtgatagtgttttattcagattcattttgtg

SEQ ID NO: 38910 - DNA, 2084 bp, Zea mays
  Clone ID: MRT4577_135488C.1
aattcggcacgaggattcactacatgccaaatctggaggcaagagaaccgggagagggcgtgttgggttgctcgtcgtgatcccggacggcaatacctgcccttgcctacttgccactgcttgcgtacactgatgtccttattcaatcccctctagaaagtagaaacattgcttaattggcttggctattgctgttagctccacacaaaagagagaaccggcggcgagctaggagctagccatggacggacacggcgcggtctcgccgtggagcgtgctaggcggggcggcggctgtgctgttcctgtggttggcgtcgcaggtgctggagtgggcctggtgggcgccccggcgcgtgaaccgtgcgctgagggcgcagggcctgaggggcacccggtaccgcctcctctgcggcgacctcatcgaggagcagcgtctccgcgcggcggccctggcaaggcccgtccccgtggatcgaccacacgacttcctccctcgcgtcgcgcctttccttcaccgcgtcctccaagagcacggcaagctctcgtttacatggtttgggccgaccccaagagttctaatcaccgatcccgagcttgcccgggaagtgctgtcgaataagtgtggcgacttcgtgaagtcgctgctctctcccctgtcaacgctgctggttgctgggctcgtcgtccttgacggtgaaaagtgggtcaaacatcgaaggattctgaatccggcattccacgcggagaagctgaagggaatgctgccggcattcttagcatgttgcaacgaactggttgacagatgggagaaacagatctctgcttccgctgaaccaactgagctggatgtctggccagagttccaaaacttatcgggagatgtgatttcaagagctgcattcggtgttagctatgaagaaggcagaagaattttcctacttcaggcggagcaagctgaacgccttgttcaatctttcaagacaaattacatccctggcttctctctcctgccaacagaaaacaacagaaggatgaatgaaatcgacagggaggtgaagacgatcctgaggggcataatagagaagagacagaaggcagccaagaacggtgaagcaaccaaggacgacgacctgctgggcttgctactggagtcgaacatgaattacagcgactcggacggcaaatccagcaaggggattacggtggaggaggtgatcggcgagtgcaaggtgttctacttcgcagggatggagaccaccgccgtgctgctcacttggacagtggccgtgctaagcatgcacccggagtggcaggaccgtgccagggaggaggtcctgcaggtctttggtgaaaacaagccggacttcaatggtgtggcacgcctaaaagtggtcaccatggtgctctacgaggtgctgcgcctgtaccctccggtggcggccatcaaccgccggacacgccagccgacaaagctcggaggcgtcacgtacccggcgggggtcatgcttacgacgcccgtcatgttcatccaccgggaccctgccctgtgggggtccgacgccgacgagttcaacccggggaggttcgccgacggcgtgtccaaggcgtgcagggaccccggcgccttcgcccccttcagctggggcccgcgcgtctgcatcggccagaacttcgctctcctggaggccaagctggccgtcagcatgatcctgcagcgcttcgcgttcgaggtgtcgccggcgtacgtccacgcgccctacaccgtgctgacgctgcacccgcagcacggcgctccggtcaggctgcgcaggctatgaatacacgatcggtgcttccgttaagcaatctctctccaatacccgaagactctgtttattcatttcaaagttacgactacaaaacataatgcaaaatctcaaacctatatataccagagcatgtaaaagctagcaaaagctatattgtgataacgaaccaacaatatattactcctatatataacaacaaaaaaaaaaaaaaaaaaaaaaaaaaaaaaaaaaaaaaaaaaaaaaaaaaaaaaatccgcggaggggggccggtacc

SEQ ID NO: 38911 - DNA, 281 bp, Zea mays
  Clone ID: MRT4577_135489C.1
cctttattaatattttttggggtttttttttttgtttttctcggttgttccccctctattgagggtaacaacctcctattgtctcggatttgaaccaggggcatgaacttccactacaccccaagggcttcggctgtaaagaccgtatgtgacagaaatttcggtggctgacacctttacccggttttaatttacatatgggggactgtaccaggaggtccttgccctttgacgcattcccgaaacgcggtggaggccccctaaacgcccccccccccaaa

SEQ ID NO: 38912 - DNA, 506 bp, Zea mays
  Clone ID: MRT4577_13548C.1
cgttgctgtcgggtgaagaacccaagcagcaatggcgttctcacggcggcggccgccttttccgacagcaaggccatgcgggagagcggcaaggcggcggcggcgaggccgtacaagggggtgcggatgcggagctgggggtcgtgggtgtcggagatcagggcgcccaaccagaagcgccggatctggctcggctcctacgccactcccgaggccgcggcgcgcgcctacgacgccgcgctgctgtgcctcaagggctccgacgccgtcctcaacttcccttcctcgtccgcgtcctcgactcaccggcgtgctgatgacagcagcggcggccgcccggacgacgacgacccgggtgccagcggcggcatgtcgccgaggtccatccagcgcgccgcggccgcggctgccgcggcgttcggcgacgccgccggcatcggcgccagcgcgacgacgacgccgacgcctgcctcgctgtcgacgcagggcagcaccgatcacgccca

SEQ ID NO: 38913 - DNA, 259 bp, Zea mays
  Clone ID: MRT4577_135490C.1
acaatgaagggttgtaatggaccaacttgtcagcggcaactggagaagggccacgagcttccaaacgggccgttacaagctggttgagactgcttgggtgtggccgtgatggggtgcccatcctttgccttggtgagctgggggggggccatctttactccggctgtttgggggttaggttggggggtgtgggcttgcaccgcgggggtccaccacgggcctggggggttgtgtgtggtgcgggaacgggggtgtgggc

SEQ ID NO: 38914 - DNA, 124 bp, Zea mays
  Clone ID: MRT4577_135491C.1
attcgctttgacacgtggtccgacgaatttgtcatatattgtacctacccatgatgttcagggaggcgtacgcgcgaaatgtgcaccagctaggaatcagagtcgatacaggggcatatgagtg

SEQ ID NO: 38915 - DNA, 329 bp, Zea mays
  Clone ID: MRT4577_135492C.1
gggcacaaaacccccggtttgtatgaaaaaaaggggggaataattaccactaggggcccacaacccaggcggggaaaacatttctttttcaggagaaccccttacgggttccaggaaggccccttatgcaaaccattttatttatccccctgagggggttttggggaaaggggttccaccccccacctaaaaacgaataaccccaagcggcaaaacaacggaataaacacaaagctgaacaggtaccaccctggtcgtaaactttccccccacacaggggagctgaagggttttttgattcccggttccctctcccgggttttttggaa

SEQ ID NO: 38916 - DNA, 204 bp, Zea mays
  Clone ID: MRT4577_135493C.1
tcgcgatcagaaccagtgttcgacttgtaactcttagctttagaataagatccatgcaaatcgtgcttggaaaggaaatgttgtacatgaaagtatagacacgtggactggttcctgatccctctatatcgttacaactataaggagggatcaggaaccagtccacgtgtctatacttatagttgtaacgatatagattttttc

SEQ ID NO: 38917 - DNA, 298 bp, Zea mays
  Clone ID: MRT4577_135494C.1
accttgctcggttagaagggcttcatctaaagatgcatcgcggcgctctgctgctgctagatctgccagatgtgcttcgactaggcaaaccccccttccctccgacgccaggctttaagcctttgacaggaacagatagatcttctccacccatagctgcagttgtagctacacatacttgttgagctattgtgatttgtccatctcagtactttttgatttaatattaattattatctttgattacaatgcatgtcctgctctttcttctacatctttagcattacactcactacta

SEQ ID NO: 38918 - DNA, 163 bp, Zea mays
  Clone ID: MRT4577_135495C.1
gcggccacgctccaactccagatcactctcacctcaacccagacaaaccaatgcaagcctagatacgaccatggacaccacaatcaccgcagcaagaagaaaccaaaaaaacaaagctaccagcatcaaacacctcaacccaaaaaacaagcacaacccacaa

SEQ ID NO: 38919 - DNA, 308 bp, Zea mays
  Clone ID: MRT4577_135496C.1
gccgcaagccgctgcgcgggcactgccgggacagtggacaaccgtgaataagtacaacgccacgatcgacgccagaacgcagcaagctttcgacggcgtgggggccggcgctacggcacaaaagcggtcccacgccgtggccgccgtgctgcaacagcagctgaacatagacgtggtccctgtccaaagccacgtcttccggagaccagatcacataccttaccgtggcccccgcatacgagaaagccgcgggcaccgtcagcgcggccacgcccgacaagaagatccgcgccaatgagcttcccgtt

SEQ ID NO: 38920 - DNA, 383 bp, Zea mays
  Clone ID: MRT4577_135497C.1
ggggcgcctttttttttttttttttttttttttaactaaggggtgggattccacatgacaatacaatgcatatgcgttattcacaagcgcttgatgcaaatgacacccgataattaattggctaagctgctgaggatggacaagaatctgtggggatgcccctccggactcccggcttggaaagggttggagctgacggacgatccgcccgacggtttgggccagtgtgtgactgcgagaaccctcactctattctgcgcaacttttaacgccgcttaccatgggctcgcagcacacggtcgcaactccccatgtctctgtgggcagtgcacagaggagtcacgcgtcatgacttgaggctgattgcgggcgatgtcagacgt

SEQ ID NO: 38921 - DNA, 203 bp, Zea mays
  Clone ID: MRT4577_135498C.1
cccacgcatccgaggacgcgtgggcggacgcgtgggtgctgcatagagtacttctggcgaggattacgagcactcttctgaactactggataattgggatgcaatggagaacacatcatcacgtgcctagtatggagctggagcattcctcgctgtctggcttcccttggttgtagtgcgatatcacgaggccgtcgagttgc

SEQ ID NO: 38922 - DNA, 646 bp, Zea mays
  Clone ID: MRT4577_135499C.1
actctcctgtccctttacacttagatgagatctgtcgtcttgcgagccgagtgagtactattcagtctacgaatcaactacgtcgggcggcccaggaccgccatcttgctccgaggagaagcaccactactccttgaactaccacgagacggatcaggagcagcatcgacggggactactgctactccgacaccgaggtggatgccgccatcggggaggacaagtacgagaggtacaagaccgacgagaaggagaacgagcacgacgagcacctccccgaggacgctaacatcgctgccggcgctttcttcactgtacgtgaaggactatgcgaagaaggtccccgagaacacgcatcaggaacaagatcgccgatgaggtcgctgacgtgctggccgtcggtgccgatggctacgtattccacgagcagctccatatgaagaacgacgcataacgagcgtcgaggtagggtaccggaaagaaatagctgcactcaccccttcgggtgagcgctgtacctaacaacgctccagcgaactaggtagatccggaacatgcaaacacacacgtgtttaattctgtactgcatgctggcgtagtttgatgatacgctatagtgaatgcctctcctgatcttgagtagatg

SEQ ID NO: 38923 - DNA, 408 bp, Zea mays
  Clone ID: MRT4577_13549C.1
ggggaaaggggggcccaaccgggaacccggtttttgttaatttgcaaaaggggcggggggggacaaaaaaaacgaatacccctcccctgaaaaggaaaaaaaaacggggaaaaaaaaaaaaacaaaattcgggggtcgacgaaaccttaaactacgggtatcggaaaaaaaaagggggggggaaggccctttaaaaccaaagggaaaaccagcctggcccccttaaatggacattttattggccacaaactggaaaaatggaaccggaccccaaaaaaaaaggcgggaaaaacttttccccttaaaaaaaagggtttaattggccacccactttttaaaaaaaaactttcccaacggaagctggccattgggggggacccaaacctggggggccaaaaaaaagccggc

SEQ ID NO: 38924 - DNA, 658 bp, Zea mays
  Clone ID: MRT4577_1354C.1
cgaaaaaaaaaatccaagcaacaaacttggcattctggcctgttcttgccaggagaaacaaagatcgatgaggcctcaggtgatactcgtcggcactctggctgttatcgctatcctcgcagctctcggcgaaggctcgtcgtggccgtgctgcgacaactgcggtgcttgcaacaggaagcagccgccggagtgccagtgcaatgacgtgtcggtgaacgggtgccacccggagtgcaagaactgcgtcaaggtcggtgcaggaattcgtcccggcatgggccccggccccgtcgtcacctaccgctgtgatgacgttctcacaaacttctgccagaccagctgcccggaggcgccggcgccgtaggcggcgtcgctgggtggtgtcttcttctgacgtacggcatgcatgggacgccgccgtacgtcgatctgctgcaagcatgcatgccaagtcgagtttccagcttcgtcagagaagaaatagataaataaatgtcgccggccgctctgttcggtgcttgctcagaaaaaaaaaaaaaatctctctctctctttttttttttctagaataaagagccatatgcatgcatgatgcatatgccatgctcaaagcactgttggatggttttcgtttaccaaaaaaaaaaaaaaaaaa

SEQ ID NO: 38925 - DNA, 364 bp, Zea mays
  Clone ID: MRT4577_135500C.1
cccagaaaagggtgagtgaggtgtggaattgataatttgaatacacatacacccatttaaacacgttttaccagcaacggacaacattatgcaaagcaggatacaagctccatactaaaggcatgtttggttcactacctcagttgtcacactttgcctaatttttctgtctaaggttagttattcaattcgaacaactaaccttaggcaaagtgtggcacatttagccacaaaccaaacaggccctaagttactaactatgttcctattcctaatcagaagagtcgattgaaggaacctttttttcctcactgacgcggaagaatccttcattttatcccaatccttcaatttagaaccaagc

SEQ ID NO: 38926 - DNA, 281 bp, Zea mays
  unsure (1)..(281): unsure at all n locations
  Clone ID: MRT4577_135501C.1
caaaagatnttctgtcaggntagatttttccataccagnaattagnccaaagaaaacactatgtccacctggcttttaagtgtgtattataattatttactgtaacttgactatctgccaaaaatatggagcaagctggattactatgcctggatgtgacgttgtattgttctactagacccccttctctttcgatggctttactaggacttaatatgacgcctggactacctaatgtatgntacagacgggaagcgaagcttcagggagattatgaattt

SEQ ID NO: 38927 - DNA, 185 bp, Zea mays
  Clone ID: MRT4577_135502C.1
gctacttggcaaagacatttgggcacggagaaaggggttgtgtgtagccgtatcggagaaggatcgtatccgaataataacatcatcctatatttaactctgtttcctcagataatcccgataatccccgtgtacagatcaacacccctgagcatattcttaattggtcagagggaggatgcttt

SEQ ID NO: 38928 - DNA, 756 bp, Zea mays
  Clone ID: MRT4577_135503C.1
atggcgcggtgcggcatcgcagtggcagagcaacttcggcgagaaatcgccgcctcccagagagcacagatcgaaggccaccatgtcaccttcatcgtcccgacagtgcccagcgacggtgcccattgccgccaccccaaatgcctagttcatccatcgaactccacccaggaacaacgctattcgaagcaaagctcaaagaaatcacagagggaggtaccataccgacaatggcgcggcgcagagcactatcggcggaaggacgagcccacggcggtccctggcactccgacgaacaatcctccgttgcacatgcgcccgatgatccgcacgcgcacgattccaaaccactggcgagcccccgcgactctcccccgagcaccgactagcgaagccaaagcaggatcaataagaataatagcttcggcagaaggcgaagctgaagctgattactctgtagaaaaagatgctatagaagggatcaggcttcaagttgtggaaaacatcaacaaataccaagctgaaacaataaaatggcgtgatagaaaggttaggctaaagaacatcgaaccaggacatttggtgcttcgaagggtagtcaacccagaaacagtaggcaaattacagctgaagtgggaaggaccttttctggtagtatcttcgtcaagacccggttcctacaggttgaaggatatggacgacaacgacattcctagatcatggaatgcggacgagctttggcgatattatgtttag

SEQ ID NO: 38929 - DNA, 2525 bp, Zea mays
  Clone ID: MRT4577_135504C.1
cattgggacctcgagccggccgggaaaaaaatctctcaaccatcctgctcctgctcccttcccatccggtctccctttcttttcgcggcctcgcctcgcctcgcctcgccggcggcctggtggtcgcggtctcgctccagcaccgataaagcccacctcgagttcttagtccaagtgtctgctctgctccaccccccggcttcagccgcagcttgtggtggaatcggagcttcttatccgagagcagacatggagcagagtagtgatgggttgccaatcagccagcggagggctaacagttcaacaaaacactcaagcaagtcagatgaggttgctgaagacatgttgcagagtaatataccacatgaaactgtgagactgtgccaaggtgtggaatcagaagagatagagggacctcctcacaagaaaattgtccagaacttcacggagagcagtagttccaaaaataaaaaacacagatggtcatcagaggaagatgaggcactaaagcaaatggtaaaaaaatatgggacgaaaaactggcgaactattgcatgtgctatacctggccgaaatgccaactcatgcctttcaagatggaagtaccttctagacccagcaataaacaaagagccttggtcgcaacaggaggaactaagattgatccgtgcgcagcaagtttatggaaacaaatggtgtaaaatggtcaaacatttcccagggaggacaaatgatgcactcaaagaacattggagaagtcctatgaaaagaaaactggattcatatttggcctcaggattgctcgaacatgttccagacctgcaagatgatgtatcatttccacagacacagaacaatcaatcagatattccaaaggactgcaaagctgcatctgatagaaatagattttcatcacgtttatcaacagaccccaaacttaaacaagagctcacagaactggatgaaaatggtaatacatcagcaagaaaaagctctgacttattctatgctaaagcacctgatacccattcagccaaaatctcagaaatgagaatggccaaatcacagcagtgtgcaggaacaagaaagaagctggcttttctgtcaactccagtggagctcaagagtgttgtaccgcatgaaaccaccaaacattgccaagatatggaaccagaaaagacagagggcccactgtgcaagagaaattcccactgcatcaaggatggaagtagtttgaaaattcccgaaagtaccaaaggcaaatggttagcagaggaagatgaaattctcattaaaatggttaccaaacatgggaaaaactggcaaactgtagcatttgctatacctggccgagaagcaaaacaatgccaaatcagatggacacgcagtcttgacccagcaataaagaaacaggattggtcagaacaggaggatctaaaattgattcgagctcatcaaatatatggaagtcagtggcttaaaatggtcaaacatttccctgggaggacaaatcatgcactcaaagaacactggagaaatcgtatcaaaggaaaactgaatttttatttagcctcaggattgctagaacaagttccggacctggaagaaggtggtatatcagttccagagagcagtcagtcagaaattccgaaggacagtcagggttcagctgacaggagtggaccgccaccagttttacgagcacagcccaaatctaaaccggaactcccagaaaacgctggtacatcaggagaaggaacttctgattccattcgtcttaaagggcccaacgcccatccaaccgaagtttctgaaaaggtattggctaaatcaaagcagcgtgccagagccagaaggagattggattttctgtcaaccccagtggagctcaaattgtgcactgctgcggcaagttgtcaaaggcctccccagaaaatggatcaaccgggtccagtggccgagaacatctctccgtcagatgcatgtcaagacatttcacagaatgttccaccagagcgtgcggatgccatcacaccgctggctgctagtaaccaccattcaccagcgacaccagttgatccattctctctcgaaatgcatgaggcgaacgcatcagatcttctggacatgtcctactgtgatggcttgataatcgattctcctcgtgatccacatgacggtagcctcatgtagaagaaaaagttaccaacgcaaaatgacacttttaatagcaagagacgatggactgtcttcctgaaatccagcaactccctgtataaaaatcgtgttgcatgttggatggaacttgtatcttgtcttggcaaaaataattgcattgctgttctgttaatgcccctaactggtttggagagcatttttcttttgcaggtttgaagagcattttgaggggtgttgtaggtcaaaatgattttttttcgttgttttgggttggacaggtccccatcactctttttatgcaaagcatagcacgccccttataaaccccataaaaaaaaaaaacaagc

SEQ ID NO: 38930 - DNA, 369 bp, Zea mays
  unsure (1)..(369): unsure at all n locations
  Clone ID: MRT4577_135505C.1
acaagatagtgaaacagatttcagatacaaaaataaacgacaatgtttccttctaagaaaaatagtgagcaaatgtggaacatgcataatttctaattagtaggctccgtgtcttgatgaatgatatatggcgctaatcaacaaaagcaagacatggtgttcaatgagacttcttcagaacattcaccttaatatacttcttgcgttatcctgcactccaaaaaccagggcaccagcaaaaacgccagagagagtctcgatgccaaagaggttccatcaatgagggagtcagcatgaccagagcaccccaaggaatcatctccttgatggaagaagcatcagtgcaaatcttcacatangttgcatagt

SEQ ID NO: 38931 - DNA, 505 bp, Zea mays
  unsure (1)..(505): unsure at all n locations
  Clone ID: MRT4577_135506C.1
atttcccagggaggacaaatgatgcactcaaagaacattggagaagtcctatgaaaagaaaactggattcatatttggcctcaggattgctcgaacatgttccagacctgcaagatgatgtatcatttccacagacacagaacaatcaatcagatattccaaaggactgcaaagctgcatctgatagaaatagattttcatcacgtttatcaacagaccccaaacttaaacaagagctcacagaactggatgaaaatgaaatgagaatggccaaatcacagcagtgtgcaggaacaagaaagaagctggcttttctgtcaactccagtggagctcaagagtgttgtaccgcatgaaaccaccaaacattgccaagatatggaaccagaaaagacagctatatgattatacctgngccaattccaagccatatttctttcacacactgctggagggcccactgtgcaagagaaattcccactgcatcaaggatggaagtagtttga

SEQ ID NO: 38932 - DNA, 1770 bp, Zea mays
  Clone ID: MRT4577_135507C.1
ttattcggcacgaggcctgcgtgctggtgcccgggccatccgggctccctttcttttcgcgggctcgcctcgcctcgcctcgcctcgccggggggctggggggcgcgggctcgctccagcaccgataaagcccacctcgagtgctgcgctgctccaccccccgggaccggaatgcagaggcggaggacctggattgattccttcttctgtgagcaatcaaaagcttcagccgggggttgtgggggaatcggagcttcttatccgagagcagacatggagcagagtagtgatgggttgccaatcagccagcggagggctaacaggtcaacaaaacactcaagcaaggcagatgaggtggctgaagacatggtgcagagtaatataccacatgaaactgtgagactgtgccaaggtgtggaatcagaagagatagagggacctcctcacaagaaaattgtgcagaacttcacggagagcagtagttccaaaaaaaaaaaacaaaaaaaaaaaaaaaaaaaaaaaatatcgtacgtcgactcaaataatgctgacactattcatttgttattcattgttgttaattagaagcctttatggtttggaatatttactagctgagaatgtccattatgcagactgcatttaaatgttcattagaactgcatgccttttcttcactttgtgctgatgggccttccatatagatggacacgcagtcttgacccagcaataaagaaacaggattggtcagaacaggaggatctaaaattgattcgagctcatcaaatatatggaagtcagtggcttaaaatggtcaaacatttccctgggaggacaaatcatgcactcaaagaacactggagaaatcgtatcaaaggaaaactgaatttgtgtttagcctcaggattgctagaacaagttccggacctggaaggtcagtcagaaattccgaaggacagtcagggttcagctgacaggagtggaccgccaccagttttacgagcacagcccaaatctaaaccggaactcccagaaaacgctggtacatcaggagaaggaacttctgattccattcgtcctaaagggcccaacgcccatccaaccgaagtttctgaaaaggtattggctaaatcaaagcagcgtgccagagccagaaggagattggattttctgtcaaccccagtggagctcaaattgtgcactgctgcggcaagttgtcaaaggcctccccagaaaatggatcaaccgggtccagtggccgaaaacatctctccgtcagatgcatgtcaagacatttcacagaatgttccaccagagcgtgcggatgccatcacaccgctggcttctagtaaccaccattcaccaacgacaccagatgatccattctctctcgaaatgcatgaggcgaacgcatcagatcttctggacatgtcctactgtgatggcttgataatcgattctcgtcgtgatccacgtgacggtagcctcatgtagaagaaaaagttaccaacgcaaaatgacacttttaatagcaagagtgtcttcctgaaatccagcaactccctgtataaaaatcgtgttgcatgttggatggaacttgtatcttgtcttggcaaaaataattgcattgctgttctgttaatgcccctaactggtttggagagcatttttcttttgcaggtttgaagagcattttgaggggtgttgtaggtcaaaatgattttttttcgttgttttgggttggacaggtccccataactctttttatgc

SEQ ID NO: 38933 - DNA, 219 bp, Zea mays
  Clone ID: MRT4577_135508C.1
attaatatatttttttttttaatttttttaattttttttatttttttttttttattttttttttttttgttcactttatattataagacatttttttcaaccaagaggaaaacacacttgtttacgctttgaaggacagacagggaaatcagccaaatactattttatgacctcccatccatattaggcaaggtattacaagcatacaatttagggaga

SEQ ID NO: 38934 - DNA, 371 bp, Zea mays
  Clone ID: MRT4577_135509C.1
cacaggagtcgtccgaatctttcggctcgtattacatcccttcttcgtcccaagctccggtctttatttggtaatctgtcatcttacagggacatcttacattggaacacctacggatgtgatacgcctcttgaaattccgggaggggcaccatcatcaaacttgtctaccgcgatcgcatgaggcaacgatcccccacacgcgccgagcttgcgcaaaaagaaaattttgacgcccgtgaagtatacatctgataaccccatctggtactcttagcgaactctgaccatcacaagtcccaggctagcaacccagctggaggtgtcctccaaggggaagttcagcacggacgaaccgatgtgggaaaacgg

SEQ ID NO: 38935 - DNA, 687 bp, Zea mays
  Clone ID: MRT4577_13550C.1
agccacgcgcgaggttcagaagccgatgacgcccatactgttccaagttgcatactcccccgaggcaccatccttggatagtatgcagaggaggaaagtgaaagagagactccgagctatttgttctgaaatcccaatctacgtgtttgtcgtgaagaagtcaaacatttttggacaatctcaagatatggtcttctccagaaaatatcctgatgtatgtctcccattcaagagcggagcgttgattcttcagtgtcatggcaagagctgggaagtgattcttgaggttcggaaagatcaaggtgaatccaaaaggcttcgcattgggtgggcaaagtttgctcgtgacaacaatttgcagctgggagatatctgcctctttgagcccctgaagaccatgaagtaccccatgaatgtgcccatcgttcgcagaagagtgagatttgggaaatgatttttgctgttctttgcgacttttgcagcggtagccgttgacagcagtgctttttggtttgataactggtaaaagttgctaatggtcatgtcagccattattagtgccaacatttgcagcagtgatattaacgatttaacgcttttatgcttgggaggctccaactcctttcatcctaaaaaaaaaaaaaaaaaaaaaaaaaaaaaaaaaaaaaaaaaaaaaaaaaaactcga

SEQ ID NO: 38936 - DNA, 1084 bp, Zea mays
  Clone ID: MRT4577_135510C.1
attaggccctctctctggggcgcggggtgaaaagtcaattttctctacaggaaacacggcatcctcgctgacgccggagaagccgaagctacaagttcgcccgtcggagccgcagcacaggcgcttgcaaacgcgatggggagcgcggacctggtgctcaagatggcttgcgagggctgcggcaacacgtcggatctctacggcacggggtgcaagcacaccactctctgcagtgactgcgggaagtccatggcacgctcccgtgcccgctgcctcgtctgctccgcgcccatcaccaggctcatccgggaatataatgtacgagctaattctgttatggataagacatactctattggacgatttgtcactggtttacctcctttctcgaaaaagaagaatgccgagaacaagtggtctctccataaggagggtctgcaaggccgtcagatagccgagaatatgcgggaaaaatacaacaagaaaccatggattttggaagacgaaacaggccaatatcagtatcaaggtcaaatggaaggatcacagtcagctacagctacatattatttgttaatgaggcacggcaaggaatttaatgcatatcctgctggctcttggtttaatttcagtaaaattgcacagtacaaacaattgacactggaggaggctgaagaaaagatgaataagaggaagaccagtgcaactggttatgaacgctggatgatgaaagcagcggcaaatggaccagctgcctttggttcagacatgaagaagcttgaggccacaaatggtggggaaaaagaaagtgctcgtcctaagaaaggaaaaaaaaatgaacagggtaataattccgataagggtgaggaggctgacgaagaggaagcaacacgcaagaatagacttgggctaactcaaaagggcatggatgatgatgaggaatgtggaaaacactacatttcgattcggatgatgaaattgacgaaatgtgatgactgggagcctgaagaaacattcactgacgatgatgaggctgcagacattgttcccagagaacgggcacatttagctccctgaaattcct

SEQ ID NO: 38937 - DNA, 361 bp, Zea mays
  Clone ID: MRT4577_135511C.1
ataagacatactctattggacgatttgtcactggttggcctcctttctcgtaagagaggaatgccgagaacaagtggtctctccataaggagggtctgcaaggccgtcagatagccgagaatatgcgggtaataggtgtgggtgttcttggttttggccttaaggatccgggatcgaggaggagccgtgacgacggcgaggaaaaatacaacaagaaaccatggattttggaagacgaaacaggccaatatcagtatcaaggtcaaatggaaggatcacagtcagctacagctacatattatttgttaatgaggacggcaaggaatttaatgcatatcctgctggctcttggtttaatttc

SEQ ID NO: 38938 - DNA, 492 bp, Zea mays
  Clone ID: MRT4577_135512C.1
ggaatgaaaactggcatagcagcatggccgattgaatccagttctgcccaaattcggtttctgtaagtaatcctaaagacaactacaacaataactactgaccatctcgtgaaaaaaaaagtgatcagtcagcaatcatgtacatgaatcatgattgttgattggcattcctgcccaagattatcagcaaaaggaggttgttaatacaacaccaactagattaacaaaagtgataccttctgtgcatcgcaactaactacaacatgaccacatccctttcgagaccatagccatatcccgctggagaccaatcatatccttattaacttgaacgaacagcaagaaatgcgatttcctcatttcaattcaggggcatatggagcagggcaaggtgacactgtgtggtctggcaagtcgtttataaactcatttgtggcctgcagacaggcatggagcattttcttctccaaccttacaagcctagtagcaact

SEQ ID NO: 38939 - DNA, 658 bp, Zea mays
  Clone ID: MRT4577_135513C.1
attctatcgatctgctctctggcccgtccgccgtctcatctccgcacgaacacgcacagtcccacggagcacacaccaccttccatccctcctcctcctcctcctcctcctgcttcttctctcgcgtacacgctgtccgtgtgacgatggcgatcacgtcctcctaccccacgggccgatcctgcacgctgctgatagcgctgatgacacccctgtccttgcctgcgtccccagcataaatacacacgcctcgaacaggttgccgagactctatctgggcacaccatcaacctgtgccccaacgtgtcgcccctcaagcgatcactctgtcacgcactcgccctacgcttgagatctacttcttgaaccccacctgccgatgctcccacactggctccatcaacaacttcctcaacaccatgcacgttctccccatgctgcccccctactactacacctccgtcgactccacaaagagcaacagcatgaccatcatcagcgccaccgccatgtaggcccccttgcttgcgctccctcgaactctccgtactagatcctgaacatacgggctcatgcattctactgatccagtgactccagaccatcagctctctccgtgctgggttcctcatgcaagagctacctgactatactcgct

SEQ ID NO: 38940 - DNA, 470 bp, Zea mays
  Clone ID: MRT4577_135514C.1
aaaaagggaaaaacaaaccatgagggccccaaacctccaaaaacgggaaaaaaatcccggggggggggcccacccccaagggtctccctttttcaagcccacaacgggcccttttggaaacccggcccgggccccaaaaggggcctgtgatttcagggaaaccttggcccccaggatcttgggcccctttgttctggggacccccccccccaccccgttggcaagccctataaacaaaaaattttcgggggtaaagccggctaaagcccccccccttgaaaacagggaaccccttttataccccggggggcccttgggtggaaaaatttgccctgccctatcccccaaaggagcagggccaaaaaaaaccctgtggccaattggatccgggggggaaaccaacactaaaaccccccccaaaagtggtttaaagggaaccccctccttgaaaaaaaaaaggaatttttggg

SEQ ID NO: 38941 - DNA, 1146 bp, Zea mays
  Clone ID: MRT4577_135515C.1
tggaaagcacgctacccaaaattttaatgtgggaactttttgggttttttttagtgaaattgggaatgttatatgttgatatgcctcgttgaatcaggtctatgtaggcaaagagaaacaaactgttgcagaaatgcttccttatttgagattaggatacatttcagatccagacgaaatgcagtctatactctcttctgaaggagatacatgtccagttagtccatgtacagagcgagctgtacttgatcagcttggtggttacctggaatctcggttggctggttatccaacaacattgaatgaagatgaagctatgttggcagatggcagtttggaaccaaagcaggaagttgctactaggcttgtgaggttggagaagaagatgctccatgcctgtctgcaggccacaaatgagtttataaacgacttgccagaccacacagtgtcaccttgccctgctccatatgcccctgaattgaaatgagattgcatgttttcttttcccagatggtcataccattaagaatgtcaaaatttgatcaatttgcatatctatatgaagaccatatatgctgcaaggtggatatactatttgaaagaatctgctgcttgtttcctttagagattacagatcttaattgcatgctagaaggaaatcgcatttcttgctgttcgttcaagttaataaggatatgattggtctccagcgggatatggctatggtctcgaaagggatgtggtcatgttgtagttagttgcgatgcacagaagaactggattcaatcggccatgctgctatgccagttttcattctagattgggcactactccttctgaggcattgtatggctacagctatttcgggttggaacttggaagcgaatacaaagtagcgtagagaagtttcttagcattgatttacccgatctgttagaggcttttgaggtgtctaaataggtatttgtaaaaaaattgtggagtcgtcttgtcgtaaagagacatctctagctcgtaactcaagtagtcaagtagtaacagatcacagatgtcttcacttctcttactaatacatcgtctgctatattgattcgatgctttatagacacatttacttctatatttattagtagactatatttatat

SEQ ID NO: 38942 - DNA, 122 bp, Zea mays
  unsure (1)..(122): unsure at all n locations
  Clone ID: MRT4577_135516C.1
ggccctccacccacatttcccggtacgccttcttcactctccacacatagccacaggccatgagcactagagcagagtcgtcgtcgtcgggcgtggcggggttcatggtgncgcggntctcg

SEQ ID NO: 38943 - DNA, 2238 bp, Zea mays
  Clone ID: MRT4577_135517C.1
cggacgcgtgggctcatcggaggcccgtgcggcgccaggccctgcggtggagccttcctccgaatctgccaccaacggcttcgtccattggctgcgcacgtgctggtttcccgttggaattagttacattcgggggagggtattgctttggttaaccgagttggtgttgtatcaacaaccccatgtttctgataatcttgggcaggaagccggatatacaatcatcgaggtgtcaatgtgactggtcgttacgctggagcgggtgctcggggatgaatcaatggctgagttgttgacaaacaacaagttatctgaggtggcatgtttggcattcaatttgatacaagaggaaaaagcaaggaaaggattcattttggtacacctacattaaggaacttgaccgacatcgaggaagggggcagctagctgttgaatcaccacttctatggactgaaagtgaactggactaccttagtggaagccccttgaaggatgaagttgttgctagagatgaggcaataaggagagagtataatgagcttgacacattgtggtttatggcaggttcactatttcagcaatatccttttgacatacctactgaggcttttccgtttgaaatattcaagcaggcttttgttgcagtacagtcttgtgtggttcatttgcagaaagttagtcttgctcgaaggttcgcacttgttcccttggggccgccactattgacttacaagagcaactgcaaagcgatgttgacagctgatggtgattctgttcgattggtggtggatcggccatataaagctggagagccaataatcatctggtgtgggccccaaacaaactccaggcttgttctgaattatggttttgttgatgaagataatccctttgatcgtgtagcaattgaggcatctttaaatacagaagatcctcaataccaagaaaagagaatggttgctcagaggaatggaaaacttgctatccaaaattttaatgtctatgtaggtaaagagaaacaaactgttgcagaaatgctgccttatttgagactaggttacatatcaaatcctgatgaaatgcagtctatactctcttctgaaggagatacatgtccagttagtccatgtacagagcgagctgtacttgatcaacttgttggttacctggaatctcgattggctggatatccaacaactttggatgaagatgaagctatgttggcagatggcaatttggaaccaaagaaggaagttgctactaggcttgtaaggttggagaagaagatgctccatgcctgtctgcaggccacaaatgagtttataaacgacttgccagaccacacagtgtcaccttgccctgctccatatgcccctgaattgaaatgagattgcatgttttcttttcccagatggtcataccattaagaatgtcaaaatttgatcaatttgcatatctatatgaagaccatatatgctgcaaggtggatatactatttgaaagaatctgctgcttgtttcctttagagattacagattcttaattgcatgctagaaggaaatcgcatttcttgctgttcgttcaagttaataaggatatgattggtctccagcgggatatggctatggtctccaaagggatgtggtcatgttgtagttagttgcgatgcacggaaggtatcacttttgttaacctagttggtgttgtattaacaacccccttttgctgataatcttgggcaggaatgccaatcaacaatcatgattcatgtacatgattgctgactgatcactttttttttcacgagatggtcagtagttattgttgtagttgtctttaggattacttacagaaaccgaatttgggcagaactggattcaatcggccatgctgctatgccagttttcattctagattgggcactactccttctgaggcattgtatggctacagctatttcgggttggaacttggaagcgaatacaaagtagcgtagagaagtttcttacattaacgctggaaacacttaaaaggtcttgtcgaaagcgtaactcaagtaatccacctctcaggacatggtccactacatatcatgcttgatagccattctatcattagtggccttcttcagatttgaacctcggctattctaagacataaaaaatggtatgtaataccatatacagtgcagtaacacatatatatattggtaggcgtttcggaaaaaataaaaataat

SEQ ID NO: 38944 - DNA, 758 bp, Zea mays
  Clone ID: MRT4577_135518C.1
tttgagattaggatacatttcagatcagacgaaaatgcagtctatactctcttctgaaggagatacatgtccagttagtccatgtacagagcgagctgtacttgatcagcttggtggttacctggaatctcggttggctggttatccaacaacattgaatgaagatgaagctatgttggcagatggcagtttggaaccaaagcaggaagttgctactaggcttgtgaggttggagaagaagatgctccatgcctgtctccaggccacaaatgagtttataactgacttgccagaccacacagtatcaccttgccctgctcaatatgcccctgaaatgaaatgaggttgcatgttgttttctttcccaaatggtcatatcattaagaatgtcacaatttgatcaatgtgcatatctttttgaagaccatatatgctgcaaggtggatataatatttgaaagaatttgctccttgttttctttagagattacgtaaacgcaattgcttgctagaagcttgcgtgttccaggaaatcacatctcttgatgttccaagttataagggtatcagtggtcttcagcgggatatggtaatggtctccaacgggatgtggccatgttggagttattagttgcaatgcaccaaagtagtggcggacttaggatttgaacctcgggtattctaagacataaaaaatggtatgtaataccatatacagttcagtaacacatatatataatggtaggcgtttcggaaaaa

SEQ ID NO: 38945 - DNA, 509 bp, Zea mays
  unsure (1)..(509): unsure at all n locations
  Clone ID: MRT4577_135519C.1
caacaaaacaggcggaaaacagacccacccatgggggaaaacaaaaaggggcaggggccacccgcccacagcagagccaaaaacacaaaaggggtttttccccccaccaaacacgaaaaaaagaagggcgaagcaccccccccagcaggggccaaccaaaaagccccgggggggactagaaaaaaccacccaccaggccaattaactcttaataaaaaccccccaggggggggccgaccccgaaacgggggccgcccctggtccccacccgggggcggcggggggggggggacccacaggggcgccccaaaccccgtcaggaggaggggcgggagcaacaccccagtcggccccagcggcgggaaggccagcagcggggagctgancttccccggccccccattccccgccccggggggcgccgccgggggcgggggtttgcgcacccgggccaaagggaggggcacccgggccctttttcccccgggttggtcgaggtcgccgggggc

SEQ ID NO: 38946 - DNA, 433 bp, Zea mays
  Clone ID: MRT4577_13551C.1
ggggccctcaccccccgacccaactttgggggttaaaggataacaaacaaggtaaaaacttaatccccggaaaaaaccccaaatttaaaaaagggttaaaaaaggggcaaaacaccgggggggaagggggggaccacaacccaacccctgggagggggggggaaccaaaacccgggcacgggggggacccccatactgggggcggccctagggggggaccctggaaacccaaaccgggggctttacccccgggagaacggccatgccaagggcccggggcatttccaggggtttcttggggacggggatttttttgacctggagcgctgactttttcgggaaaaaaataaaggggggctccccctcctttttttggaatttgggggaaaagccccgggcggggcccctttgggagggggccaaaggggggggg

SEQ ID NO: 38947 - DNA, 227 bp, Zea mays
  unsure (1)..(227): unsure at all n locations
  Clone ID: MRT4577_135520C.1
tcgcgatctaggaacttctagatcgcgagcggtcgccctatctacacaggatttttcatctcgtgcgtgccaatgggttcctccgatcaatgctggtgcggctctttattttcatttgtttttttacaagggctatgcacttaacacggttgctggcgaatggtgttgtgggcacaacacaagctgccgnattcagtgtatacatataagagtcctaagcgtaacta

SEQ ID NO: 38948 - DNA, 365 bp, Zea mays
  Clone ID: MRT4577_135521C.1
ctctcccttccctcttctctctcccctcacgggtcctcatactgcgcagggtgcagcaaccgccccattctccttacccggcggtgcaagtgcaacgaccggcgccggcagcaggccacagccgctatatcctcacctcattctccttatccagtggagcgcgcggccccggcgtccgcgtcccccgcggacatacacacgactcgagtactcgcagacgcagtgccgccgtaccagtaatcctcctgccgtcgtcgctgcacagggccgacatcatgaggacagaattgataaacggcaagaactacagcgcccatgggaatggcgtcaactatgataccaaggttggaccggcccggcgctta

SEQ ID NO: 38949 - DNA, 482 bp, Zea mays
  Clone ID: MRT4577_135522C.1
attattatttatttttttcttttcattttactttgtttacatcattcttgtgcgtttggtgatattttaacattccatttctatttgcttcgtcattgcttcctctcagcacccctgaccctatacgtggagtaaattcaatccccaaagagtccttccatggagaaaggcccacccccccccctcggttataaaagcccgcgccaaaaaatcaacgataaggttcactatataaaccccttaacaaaaaatgaacatgtaaaggggtggctataaaaaaaacctaatgaagacttttcttctaataaaaggggagcagcaaaacaaaatctaggggcaaatcacggggcgggccttcacaaacaaaaatctatgggtggctgggataagaggggtaaaaaaaacccccagttaaacaatggggatccgggggcccccattcgcagaaaaagacaaaaaaaaggtccgaaacaaatgggggg

SEQ ID NO: 38950 - DNA, 713 bp, Zea mays
  unsure (1)..(713): unsure at all n locations
  Clone ID: MRT4577_135523C.1
actatctgcacaagaggacgacgcggcagcgaggagggagcaaaggaaaggggatatgtcgaggccgcccaacaggagcgacgcgcacctctccgccgaggacgaggcggcgctggaggccgaggtgcgggagtactacgacgacgcggcgccaaagcgccacaccaagccctcccgcagcgagcactccgccgtgtacgtcgacgcgctcgtcccggacgtcggcggcaactcccacccggagctggacaagttccaagagctggaagcccacaccgagaggttggtgtacgagggcgccaatgtgggagatgagttcgtagagacggagtactacaaggacctcggcggcgtcggcgagcagcaccacgcgaccggaacgggcttcatcaagatggacaaagctaaaggcgcccccttcaaactgtctgaagatcccaatgcagaggagcgacatgcttcttgcaggggaaaccctgctaccaacgagtggatcccgtcagctgacacggtaaagactgggggagcacagtccagtttatcctatgcaggtgtacccggcgtcagacaagccaagcagaagcgacagctgagggactgtatatctccagccatgagaattcagacgagtgctttccaccattagaataaggaaccacactggttgtccaccatatctttactgttctgcgtcnagattcttgtgattctta

SEQ ID NO: 38951 - DNA, 396 bp, Zea mays
  Clone ID: MRT4577_135524C.1
gggacaaagaacacaatttttccttggggggggaacaatagtttaccttgggggacaaaccgaaaaccagggggggctcacatgcttccggacacctaaggggccccgggggggccccccttatttggcggggacaaatttgggggggtagccccaacccttgttgttgacggggccggcaatggggccaggggggtttttgagggggcccttcccggggacaatggcctggacaaaaaatcccaacctggaaaacctgggggggggggcgtttttgaaccccttgaccttgagcccggaaaaggccccgggggccccggggaggcccagcgggtcaaaactccccccggggtaaagggggtaaaccacccccccaagggggcccccgggaatgcg

SEQ ID NO: 38952 - DNA, 396 bp, Zea mays
  unsure (1)..(396): unsure at all n locations
  Clone ID: MRT4577_135525C.1
cggggcgacccacgctcactgggagcgccaaggttgngcgcgcngagcggaccgggggggcnccagccagagagccaaagggacccccctcgcgggccgccacgaccgggagcgcagacagcgacccggcgcccacggacctctagacggagccggagaacagggtgcccggcgtgcgcgcgggtgcgggacccgcgcgcatcgaggagcccgcggccgccgcctcgccggccgaggcacgcgagcacgcggcgggagcgctccggggccgcgcccgccacgagggcaaccgcgccggaaacggggggcgcggagccgggccgacgcaccacgcggggctcgcggaccgggaccgcgccccgggcgcgcgccatgacgccgggaaggcgcggaacc

SEQ ID NO: 38953 - DNA, 941 bp, Zea mays
  Clone ID: MRT4577_135526C.1
ttggacctcgaggcggccgggaatgcgcttgtggtggcaagcctgtctcctcagatattttgcaatgccttcaaaatatctcgttggccctcgcggcacggtgccatcacagccaacgcgggcgaccgcgcgccattatagcacacggggcacggcacgccttcggcctcccactaactgcacaagaggacgacgcggcagcgaggagggagcaaaggaaaggggatatgtcgaggccgcccaacaggagcgacgcgcacctctccgccgaggacgaggcggcgctggaggccgaggtgcgggagtactacgacgacgcggcgccaaagcgccacaccaagccctcccgcagcgagcactccgccgtgtacgtcgacgcgctcgtcccggacgtcggcggcaactcccacccggagctggacaagttccaagagctggaagcccacaccgagaggttggtgtacgagggcgccaatgtgggagatgagttcgtagagacggagtactacaaggacctcggcggcgtcggcgagcagcaccacacgaccggaacgggcttcatcaagatggacaaagctaaaggcgcccccttcaaactgtctgaagatcccaatgcagaggagcgacatgcttcttgcaggggaaaccctgctaccaacgagtggatcccgtcagctgacacggtaaagactgggggagcacagtccagtttatcctatgcaggtgcagggtcggctccaatcggcgtctctactgacgaacgcatcgttaagcaagttgctgttgcttcctttcaggtgtacccggcgtcagacaagccaagcagaagcgacagctgagggactgtatatctccagccatgagaattcagacgagtgctttcaccattagaataagaacacactggttgtccccatatctttatgttctgcgtcgagatc

SEQ ID NO: 38954 - DNA, 1119 bp, Zea mays
  Clone ID: MRT4577_135527C.1
cattgggtacctcgaggccggccgggatgccttccaatatctcgttggccccgcggcacggtgccatcagccatcgcgggcgaccgcgcgccattatagcacacggggcacggcacgccttcggcctcccactaactgcacagaggacgacgcggcagcgaggaggaagcaaaggaaaggggatatgtcgaggccgcccaacaggagcgacgcgcacctctccgccgaggacgaggcggcgctggaggccgaggtgcgggagtactacgacgacgcggcgccaaagcgccacaccaagccctcccgcagcgagcactccgccgtgtacgtcgacgcgctcgtcccggacgtcggcggcaactcccacccggagctggacaagttccaagagctggaagcacacaccgagaggttggtgtacgagggcgccaatgtgggaaatgagttcgtggagacggagtactacaaggacctcggcggcgtcggcgagcagcaccacacgaccggaacgggcttcatcaagatggacaaagctaaaggcgcccccttcaaactgtctgaagatcccaatgcagaggagcgacatgcttcttgcaggggaaaccctgctaccaacgagtggatcccgtcagctgacacggtgtacccggcgtcagacaagccaagcagaagcgacagctgagggactgtatatctccagccatgagaattcagacgagtgctttccaccattagaataaggaaccacactggttgtccaccgtatctttactgttctgcgtcgagattcttgtgattcttacgtggaacaaattaagcgtgctacgagttagacctctgtgttctggctgtaaatggcaaggaatgaagttctaatcgtggttcagcagtcaatcaataaaaaaaaaaaaaaaaggaaaaaaaggcccctaacgcggcttcgtcctgcgcaccgctcaggcgcgcaagcacagtcgcgaaatccgaccgcaccatccttcctcagcatacgcagacgctcacgttctgcgacaccatgtacatgaacacgcaggacaccatcggcgcgtcgcatttggccattacgttcatggacaccgggcaccgtcaagatcatgc

SEQ ID NO: 38955 - DNA, 280 bp, Zea mays
  Clone ID: MRT4577_135528C.1
ggggctcaacaaggtacatgatgcgatggttttccgacacaaaatatccttctaaaaaaattcaatatcgccccgacggcacataaaccggactagctttttcaaaaaattcaaacgcgttggaatacccgacaaaaccggccctggccctgcaggcaaaccagctgtccctatagccagtcgaattacagcttgccgcaatgaagaccctagctcccctgggagggccattgttccccggtgacacttccacatatcatacgaacacggggcttcaaaa

SEQ ID NO: 38956 - DNA, 551 bp, Zea mays
  unsure (1)..(551): unsure at all n locations
  Clone ID: MRT4577_135529C.1
cggacgcgtggggccgcagttcccctgctaggccgccgcagttccctctccgctccgccggatccatccctcgctctgctcatcgccccaatgccgaaaaaggtcgccatgcggcgaggtaagcccgcccccgaccaagggaagaggcggcgccacgggccgcggctgtccaaggtgatgcttcgggagctcgacgcgatggggcctggccctgcccgcggctccgatggtgaggaggacgggtccgacgcggttgccgaggacgtgtacgagtacgaggaaggggtgcccgaggaggaggccggcaagaacggccgctatgacaccgtcgccaagtacgagtacaacttcgacagcgacgcctccgatgcggatgangatgtgccttcggaggaaggcgaggatatggacgaagatgacaatgacgacggtgatgatgaggagaagcagataagaatacttcaggagacgaccggaatgcccagagaagccttcgatggaaagaagaggaaacagccatcggagctgcacctgcagcatggcgatggaga

SEQ ID NO: 38957 - DNA, 424 bp, Zea mays
  unsure (1)..(424): unsure at all n locations
  Clone ID: MRT4577_13552C.1
ggaagggaaagggaaataaaaacaaaaaaaaaaagccggggggggaaaagggaaaacggaaagggccagggaaaaaaaacctggcccccccaaaaaaaggaaggaaaaaaagggacagggggaaaaaaaaaaaaaaagggggcggttattttcaaaaaaagaaaaaaccctggggtggaaaaaaaagggaggccccaaagggccccgcgctggggtcaaaagggggaggaacaaaggccaaaaaaggggggggcccgggtttgtccacccccaaaccgggggtgggggccatcgcccggttcaacccgggcccgattttggaaaaggaaccggccacgggggacaaaagcccctaaaaactggtggtggccccggngttgagggggggcaaccccgggaaccccccccggaaaaaatggggggg

SEQ ID NO: 38958 - DNA, 341 bp, Zea mays
  Clone ID: MRT4577_135530C.1
ttctttttttttcttttgtccagggtccagtactaaatactggccaaaatggggcgagacgcccatgaaactaactttaatgatacatcaccgacttagtgaaaattttcgcctcactcatccttcagggattttggaaccccgtccacacaattcctaacctatggggtgaccccaaaagaaaggtcctgatggatcaaaacatccctcggccttggtgagtagggcattcccttgaaaagttcaaactgtctcaggatgacccccatttatcttgacccggctaatcctgttacttgtggaacccccattccctttttggttctttggggacccccggt

SEQ ID NO: 38959 - DNA, 259 bp, Zea mays
  Clone ID: MRT4577_135531C.1
gttagtgacccaaacgccaaaactagtgaatttttaatgaattagccatctagtctgcagttgaacataccgccaagtagttctttggccaaacatagttcatagcacacccatattgctcgctcatgacctgcacttttattactaagggcgttcttcgtacccattaaacagacagggagtcacttttaggaaacacattctgccgatgtataccaaaactctactcgcgatttgaatgattggataacgtactcac

SEQ ID NO: 38960 - DNA, 594 bp, Zea mays
  unsure (1)..(594): unsure at all n locations
  Clone ID: MRT4577_135532C.1
gaaggccgataggccaggaggtgacaagcatggtaatggtaaagacgactgccatcgttgctgccacaagcagagcaagctgcccgaggacgccgtcgtgatcgccataccggtacgagccgtggagcaccggaaggacgcggccgctcacgagaaggcggaaggcaacgccgccnnnnnatgctgcggnnnnnnnnnnnnnnnnnnnnnnngctgcgcggaagcacacggtggcgaggacgaggtgtgcattgtcatcagcgcgaggtcgccctgctgcagcacggcgaggagtcggtctgcttctcccaaggacgccatgtgctgcggctccggtggtaaagacggcggcgccatctcagccctcgtgtgctgacctgacctcctacaacactagcatttgtggaatatcacgagtacgacttcgtagagtgctcttgtaacctacgctccccttagatcagttgggaatagtggctggctcattgtcnnnnnnnnnnnnnnnnnnnnnnnnccgtcgccagcttgtgcattgcctgtgctctgnnnnnggccatggtgaaatgaaaacaactgttcaattttcaaaagggg

SEQ ID NO: 38961 - DNA, 454 bp, Zea mays
  Clone ID: MRT4577_135533C.1
ggattcccgggtcgactcacgcgtccgaaaaaaaaaaaaaaaaaaaaaaaaaattaaaaataaaaaaaaaaaaaaaaaaaaaaaagaaaaagaaaaataacaatttatggaaaaccaaaataaacaatcactcttacttccatcttattaactcttttttattgccacttaatttcaatctattgccctttttttaacaacattaataacttataaaaccctgacattacccaatttaatcccttttaaaaacatccccttttcctaatttagcttactaccaataaatcccctttcgttcccctttcctaaaatttactcaccctaatttacaattggtacactccctttaccctccctttacccaccttaatctccttgctttaacatccccctttacccatactttttaaatcccattagtcccttacccttttccttttccaacaatttc

SEQ ID NO: 38962 - DNA, 1207 bp, Zea mays
  unsure (1)..(1207): unsure at all n locations
  Clone ID: MRT4577_135534C.1
ctcgaggccggccgggccgggtttttacctttcctcccgtctccgtctcctcgctggctcgctatgctggccgcctccaccgcgcctctccgtcactcccccaacgccatgagtctgtaacggcacacgtaccatgggcaggaccagaggcaacaggggcgtgggcggcgcgaagtcgttcccgtcgccggcgtcgtcctcggcctcgtcgtcggagttcgagttcacggtcacgctgtcgccggcgtccaagcagcggtcggcggagcagctgtgcccggccgacgagctcttctacaagggccagctcctgccgctgcagctatcgccgcgcatctccatggtgcgcacgctgctgctgtcctcggcgtccacgtcgtccgcctccgcgtccgactccaccaactcctcctcccgcgactccaacggcagcacgtcgtcgtccttctccgccgactgcggcgcgctcctgggcccggactcggcggcctcgtcgtctcgccccagctccgccaccgaggacgaccgccacctgcatccgccgtcggccgccgcggggctgctgccacccgccaagcgcaccgggaagcagtacctctcgtccttcgccacgcgcttctcctcggtcttccaccgcggcggcgccggcgctccggccgcgaagaagcagccgtccaagtcgctcgccaaggaggtgatcaagaagtacgctaagaaggtgaaaccgctctacgaaaggctctcccagatccccaacaagaaccagaacaacgtcgtcaacggcaacagccaaccgcagcagaggttcaagaagcccttcaccttctccatccgcaagaaaaagggcgacgccgtcgcggcagtggtggaggcggcagcagaggttggcggcaacaagtacgcgcactccagctccttctccggaaacctctggttcccgcgccagaagcgggccacggcgagctgcccgtcatcgatgcagtcgtcgcctagccactcgggtctgctcacctttggcggggctggcggcgtgggcttccccgacgtgccggccgttgccagcggcattggcgtcggtccggtgtcgttgtccacggcatcgtccatggaggagctccagagcgctatcgagggcgccattgcgcactgcaagaacacgatgggcggaaccgtgtcggtcaaggcggcggcctggccacncagngag

SEQ ID NO: 38963 - DNA, 413 bp, Zea mays
  Clone ID: MRT4577_135535C.1
aaaaaaaaaaaaaaaaaaaaaataaataaaaaaaaaaaaaaaaaaaaaaaaagagagggataaaaaaaaaacaaaatcatacatgcccggtctttcttgctgtttcatgttaacttaaatctttcttgtctagccatcgctatacaatgtagtgactgaaattaaattaactggccacagtttaataactttgcttctgataaacctttgcctttctccaatttaatctttttgcccctcatccatttttcttcagatcccttactatcgctcattcccaaattgttccccctttaaaacggttccttaccctcattgtctattggcattacccccgtcgtgactcattaacttccgcgctttttatggttcactccattgtgtcctttacctttgtcttttcccatactccc

SEQ ID NO: 38964 - DNA, 918 bp, Zea mays
  Clone ID: MRT4577_135536C.1
atgcaagatgtcgcacgacgtgcgctttcgcactacttctcagtgctcagtggggtggtcgatggtctcgacctgaggtattaccccgccgtccacctggcagcacaggagatgtcagacaataggcacagaggagggaggcatgctcagcaggagcaacaagcaccgcaagatgaggcacctcagcagcagttgccaccaccgcccccgatgacaatagagcagatgtttctgatgcagactcagtgcatcagcagcagccccccacctcagcctcagatacctcagatgcctatagacaagtgtgctgaattcatgagaggtcatcccccagtgttcgttcactctgctgaccccatggatgctgaagattggctatgtatcatggagcgggagttgcacaccgctcagtgtgatgacagagagaaggttctgtatggtcctcgtctgttgaggggagcagctcagtcttggtgggagtcctaccttgccacccacgccaaccccgacaccatcacttgggaggaattcagagataatttccatcagtatcatgttccagtaggtttgatgacagtgaagaaagaggaatttctggcgctcaagcaagggcccatgtcagtcaatgtcaacacaaatgctaagaggcagtatcgtttcttgagaggcttagtcgatatccagcactatcagctgatgaaccatatctttcccacatttcagcacctgatcaacagagcaattatgacagttaagaagcgcaaggagagggaggatcgcaagcgcaagattggtggacctcaacctgggagcaacaatcacccccatttctcgggcaacccacctcaacagttcaagcaaaatcagcgcccgcctcagcagcagtatcgccagaatagtcagacaggaggaagttag

SEQ ID NO: 38965 - DNA, 437 bp, Zea mays
  Clone ID: MRT4577_135537C.1
ccggtcgcccacgcgtcgcgcagccgcctaccccgcgagagcaggactgcccagtaaatcgattcaagccggatgcatgccggcagctagtttcttcttgtccctaattccccatccaagtgtttgtctggcagagtaagatatggtggggatcacactacgactggctggttgtagctgaagaacacataccctggctggaaatggcgattatgttctgtcttgcacgtataaaattgccatttatttctgttgtcggatatgtttttgaaaatatctcatatcgatctctgtaccgcctatctgcatactatggttgttgtattgcagcgcctcaccggttgtatattgagattcggcttcattgacttttaaagaaagtgggcggatgagatctaaaatggactactaggaataggttctgcaatatgctgtga

SEQ ID NO: 38966 - DNA, 326 bp, Zea mays
  Clone ID: MRT4577_135538C.1
tgtgaattgggtggaaccttttttcaggaggggttgtttgaaaacagagaagatgacatgggccatgtattcactcggtatagcgatatcggctcttaaccaaccttgatgaagcttctttaggtggttgtaattgcagtcgtgtctgagctcatggtttaaaccacagcgggtgcacatcctctggtcgagtgttctggattgctaacacaaaacgtgacttatgattgttaccaggtgcacataggttgtgcgtgaatctttaaaccacgtaaattggattatcagatattaagacagcttgcttgacgctcgaagatgggttc

SEQ ID NO: 38967 - DNA, 394 bp, Zea mays
  Clone ID: MRT4577_135539C.1
actggattcattccaaattctgtttttttccttgagtctaattatgtattcactattcaacaaacaaaggtgttgatggttgtgggagcaggacggggacctctagtatgagcatcgttgcaggctgctgaagaaactggtcgaaaattaaaagtatatgatgttgaaaaaaatcctaacgctgttattactcttcatgtaagttattgagtggttgttctgtctcatatttcttcaatcatgcatgtccattagtttggtactgaattactaaagtttgtcaatgcaatgattgatgatacaatcatttacttgttcttttactatgtactgctgacatcttgtatcgtataagtggtgacaaatattttgatttgatctattttgggggatg

SEQ ID NO: 38968 - DNA, 516 bp, Zea mays
  Clone ID: MRT4577_13553C.1
actgggaattgaaagcttacactgatcttaacataattatgtattgctgtactatacaaagaccaatggcgagttcacactataggccgttcaattgaaattgctactgactcaacacagcctgaaagaggagcaaactacacacgctacaagtgactcgcttgggaacttttaaacccacgcaaacgacagaaacgcgctattacgagcggcatttgctgatgtacgaataaaccaactttaacataggcttccaggctgcctaagggataagattcaacatcataacggttcactggtaggaacgctagcgaaatttaactatatctgtttgagcttagaaaacagttatctgcatgcgcctgtgtgctttggaaacttgtaccaatagaactacatcatggtttgaaacttttgttcgtagtaacctgacccccttcttattcattatcctacgggtctaccataccaatctgaagctctgcataaatcacgatattacccaccttccttaac

SEQ ID NO: 38969 - DNA, 870 bp, Zea mays
  Clone ID: MRT4577_135540C.1
ggcggccgggtcggggaagttgttgcgaaacggtgccgcttcgagccaggtgcgggagggaccgagggaggcggagcaagtgggagctctggagctggagcgggtggaagtgggctgggactgggagccctagcaaagggccatcgcatcccctcttgcatactctctctctctctctctcgtgattctcccgtgccccggtctctctgtctctagtggcgacgactgcgctgcgccgccgccctacgcaggtgcccaagtgtctatcttcgggactgcgccggcgacgagcacccaccagaaattgttggacctgggtctgcccctggactcgagcttggggccaagctaattcgagctctgagcatttgatttctagcatcttacatgcaaaaagctagtacttggaatccgagcaagatctaacccagacagtgcagtggcaggtcattttctctggccaagttttgtaatatcttatagcaaaagcttgcttttcactgcttggattttagcaagatccggctcccaaagtgtagtcttgtagactggcttgttctgtcgttttccaggagcagcatttattttccctcgagaagccaaaatccaagtttacttatgcaagtcttgttgtttcctacctagaatctttgggttgtagatgttgtgacacgttttatgcccttcagatcacccttttttatattataaaaaaatatttcaagcatgctcaaatcttgtgtataatttcagctattcttttagttggtcagctaaatcgaagtatgatcatttggagttcttgatggttctaaattttgctcccttttttttgttttgtttttgggaaggactttcagttaagggaga

SEQ ID NO: 38970 - DNA, 226 bp, Zea mays
  Clone ID: MRT4577_135541C.1
ttttgacacaaaacgagggcaacaaccaccttgtgtggtctttttttattaccacattcctaattattacttcaacacaaccactacacatcaccaactaatcaacctacttctaccattattcattccaagtaaaaaattattccaaatcggctctttttcaaacttttataactctcctacacagaataacccatgttacctacctcaactatcaccaaccgtt

SEQ ID NO: 38971 - DNA, 136 bp, Zea mays
  Clone ID: MRT4577_135542C.1
aacacacggaagtaaaccgtagctacttcccaagttaggtataatagtctttctgatagatgtgtcgcgatcggcctagaatgatttgttccagaagacagaggattttgctctagcacgtgcggcgatgtatgag

SEQ ID NO: 38972 - DNA, 2733 bp, Zea mays
  Clone ID: MRT4577_135543C.1
cttttttcgtcaaatagattcactttcggtagagaatcaatcagaatcactctattagagaattgggaagcgggactctaccaaacaagtcctaaaattgctcaacagttgaagcgattcttagtaacgaacaaatacaattaacaacttccattaacagtattaacatagctttcctatcaactagtaacaaccaagcagaatccatttaaagatgctgaaaagaacatcttcacggtttcactaagaaccacacgctccgtttgaacgtccaaacatctgctgtacctttggcttcaagagttagataacagattgccttcgcttggggttgagcacccgcagcgcattgccggctctccccacgaccatattctcacgcagagctgggtcgaagatgcccaatccaggtttcgcccgaacatgtggaggcgtaactcttttctggatgctgaaacacagcttcgctcctgccggtgccattcccagcttctgctgcggcgtgaccattttgttccacatgcccacatttggggcagggcttgtgaacttgctgctgcttccgaaatcaaatctcctgaactttgctccatctggtgtagcatcaacaggtccaccatgtcctgctaggggtgttcctggaaccaaattcaagccaaatgccccaagtgatcctcttgccatgttggcttgcgacagtcgagatcctgctttcttgtcgtttagcacagaaagatgctctctcacggatggtagcactgccatcgaagatcgcctcttgggctggatggggatttgtcgaatcaccggagcaagtgaaacacgccttgctctgccgacaggcttattaggatcatccccagcatttggtttattcatcgccacaggaatgttctctttgttgtgttttgcgggggctttgagcctccatctagaagggcctgaaggtggtgcgaagctgttagtccttccctgaggttgtctctgtctcgtaggaacaagtgggggccttgaggatctagcagaatccctagaagccctcttctcattgcctaattcattttccagctctctaatccgctgctgataatttctgcatgcttgttcagcatccttcaccttttcatttagtgtcctgaagacattctcacgagaagcatacttcagttgcatcagctgcaagctttgattcagctgtgcattctccttttcctcatgctgaagtttttcagtcatctgctttaacttcaaactcccagctggatccgcttgcttacgagcagcagggccatgttctacagctcggactctactcgcaaaattgagtgaactgagagtttctcctgaatccattgagcttgggcttatctgcacgaacattagagtcttgcaatctccgcctaaagagctttggagcaaatgagtcagcttggaattcctgtatggaatatgggaattttttgaggcaagggcagatataacatcacccaaggcagatagtgatttgttgatgaactgtgattctttcagcctatctccttctaccccagttttagctattctctcacttccagcaaggtcaaccagccacatgtggcttctgctcctctgataagtcaccaagtgctcgctcctaacagtgaccctaaccaaactgtgggagcggctgctgagttcattagcattggttgagccaacagatctattttgagcgccaaacttcagtttctcccacacaccatctatgttataaattggagcctcaaccaaaccatgaacttcttgtgttccatcagcattttgcttaatatccaacctttttgattgatcattgctctcatcaagaagatccctgatcttttcattgtaaacttccaagatgcttacggaaaatgtgtatgcaacagatgcacttcttttctctgagattctgaacaattcttccaaagccctataatttacacccctattttctggaaccccttccattgtgaaagttttcccggttcctgtttgcccatatgcaaagatgcatacgttaaaaccatccatcactgacccaacaacgggcactgtttctgaaaacacggcctcttggtcatcctctgggccaaaaacatggtcgaacttaaagggcttcctttctttttcattggggacaaactgcagctcagtctcctgtgatgagtcaatctcaactactgatgaacacccacgggcgagctcatcggagctcagaggtctgcatctgcagaacaccctaatgttacctcttatctcaataagctcattgtacagacgccgcctctctgcacactcgtctgtgtacttcttcttcaggccattatatcttggttcacactcctcggaacacttgaccacctgctccttgtacttcttgtacctctccatggggttgttatacttctcccctaggaaacggagggcagcggggcggtcaggagtactaatatccttcagccgcggtgacaagataatggagtcctctccttgatccccaaactcctcgcgtttgccacggcggggacgtggccggcgctggtgaaggcggcggcgaggaggatgccccagcggcgaccggatccggctccattgctgcgatctggtggtcggggaagagggggtcgctcgcccgatctcgttgagctgggggtcggagaggcttgcgaggtcgcgactcgcgaggatgagacgtggggcagtttgggaatc

SEQ ID NO: 38973 - DNA, 281 bp, Zea mays
  unsure (1)..(281): unsure at all n locations
  Clone ID: MRT4577_135544C.1
ctcgtgcgacttgaccctttactctgtttgtgttaacaaagaaatgactcntctgggggggcttctgccgtatgttaccataccgtctttcacatncgagaagaagaaagaacaactagacgtcgtactctaattatggtacccttcatgtgtgctcactcaccgctctatagacttttgattggctccaacatcttaaatttattccggccgctggaagattattgattagtcaaacccttgctgaatggaacaacataacactcacacttcttggtcca

SEQ ID NO: 38974 - DNA, 101 bp, Zea mays
  Clone ID: MRT4577_135545C.1
gagatgggcacaaacaaaggcttaaactaacacagaaggttaacaaatgcttaaactaacacaacagaaacctcaattagcaagggacacatacaataata

SEQ ID NO: 38975 - DNA, 284 bp, Zea mays
  Clone ID: MRT4577_135546C.1
aaaccatacagattcttcacacttatgttccatgtccattccatcgggcaaaagagcatttacacaagtccattttactatgcttattatgcttgcgaaaattctgccatttacacactgcaaaagacttgaatcagtattggacgctcatatgcaaagtgcttgaccattacactattactctcagaggctaatacttgacttcctcactccaacatacttatctatcaattcatgcatgctgaaaacatccataacaaccttcatataacttcatactatat

SEQ ID NO: 38976 - DNA, 404 bp, Zea mays
  Clone ID: MRT4577_135547C.1
aagaataacaaaaccttttataataattaatgggggcatgttgtccctgatagccagccttgtacattgatgcttcacgataccgttggaatatgtttactagtataacgggattacccatccaaaataaaaggagcatatatgcgtggtacacttaacctgcgtgcatatcaatccataataggaggcgagtatccgggcacacacccttttgcctccgataagcagcaaccaacacgcctgcgctctcacgcttttccgtaaggcctgtgtacaatcgattgtacttgaatcacacaaccgggaacgcgagggcaagcgcaacgcaggccagcaccccgggactgacggtggggtgcacctgaaggcattggggctcaccgaagttactgcccaacgagtta

SEQ ID NO: 38977 - DNA, 853 bp, Zea mays
  Clone ID: MRT4577_135548C.1
aagcaactgatggtcggataggaacggacaaagcaacacctgctttgatgttcatgggcactgcagcgaacggagctacagccacaagtacaaagcatgattggagctttttgttttttaccccattgcaacatttcacaaatttgcgcacaccaagcaagaggggtgttcaatcgaccccaaactatggaagtgttgttacatctggaacaacacttggctgtcatgccccacttgtgtacaggcgagtccactccttcgctgcaagaccaaaggctgtctcaacagcttcagcttcgttggatttccagtgtttcgcaatgttgtctgagagaggatcatctgggtttggggcgctcagaagtgcctgaatgctcagtagaactgtacgtatctgaagagctggactccatttgtccttaagaatgtcgaggcatatcctaccaagcttgtcaatattaggatggtaaatttttgtgagaaatctaacttttggggcagccattggatattcctcaggcaagaatagttcaagcttgaaaactccaccttcatagggtgactgcgcggggccaaggatcatgacattgaagtaccgcatattctcctccgacggcgacgcgctaatccccggtgctggttcgctgagaagccgctgcgtctccttgatgattcggcgcgggagattgctgttggccatggaaccgaactggttgcgcagggctagagagggcggggattgcctcaagcttcacgcgccgctggggaggtggacgagacgagacgacagacgaaggtcaaacgagccgtcaggctatccgcaggattcacctaaatttatctcactgttctc

SEQ ID NO: 38978 - DNA, 196 bp, Zea mays
  Clone ID: MRT4577_135549C.1
tcccgggtacgaacccacgcgtaccgtagcccaccgaaattccctggcgattcctctacccctcgcctcctacgtcaccccctaagggaatcgtcgagagaaggaatcgcaaaagaagggccgactcataccgagttaaggaaagccatggaaacacaaggaaggctggagtgccaggcaccccgaagaggaccca

SEQ ID NO: 38979 - DNA, 315 bp, Zea mays
  Clone ID: MRT4577_13554C.1
tttatttacaaaaacttttttttttattccagtaatcggaaaacatgtataaatgcatgagtcccctgggggatgtatataattgggtgatttatgcaacattacgtgggattcaaaaagggtcaacatgtaaaaaggcaatggatatacatgtccattgatgcccaatcctctggcaagttttttgtacccaaaacctttttgcttttttattttatcaaaaccggcaacacagggtccagttcctgtttttgttttgtctagaacccagggtcccagcttaaaggtttgaaaatgaactaagcacttttgggg

SEQ ID NO: 38980 - DNA, 679 bp, Zea mays
  unsure (1)..(679): unsure at all n locations
  Clone ID: MRT4577_135550C.1
aattcggcacgaggtcttgaagggaaggagtttgaggtgtgggtttgacggtgagtgagcgaagtggactcaacggctgtgtggtgtggacgaggcggaggcgccgagcaatagctcgactaggtactctaactagggagataattgggattgtaacatgcttgtccagtggcttcgtcactctattattccgccccttcgctcttttaggattatggaagtgagccacttggcagaaaatctctacttctctactaactattaagatgatagtgtagaccacagccatgccctcgcctctcctccgcgcccgcacccgcctccgtttccctcgcccgcacaaaccgccacatctgtgagccacgcatgggccatctgcatgccacatccgccccatcctctcactgtttatcccctccgcacgactaccaacccagtcgatcccctcctcgcacagtgtccgctccctccgcccctgctccctctgcagtccccctcccccgcacaacagccacgaccgttggggaggggagcagctgtcacaacatgttttgttttcctgacatctgtttgttcattggggagcacatangtagaatgacgattaatgtttcttcatattaatgtattgtatcataacatgttgccgccgtaacacgtacgggctacagctagttcg

SEQ ID NO: 38981 - DNA, 415 bp, Zea mays
  Clone ID: MRT4577_135551C.1
gccggccgggccgggggaaacaaaccgtcttttatctgaaggacacattaaccgtcgtcaaaggagataaaattgaaggttcaatttcagtccgtccaaatgcgaagaatcatcgggatttggacattgatatctcctacaacctggagggacaacagcagaccacatcagactcgttatccttcaaaatggcatgaatatcacagtccggccgttacccccgccttatctacgtcgatccgctcgctcgctcgattcgcgctgttgctcaacatatctcgaatatccaggacaaagccatgcaagatatgtgggcatgagccgcgcaagaatctgatgaatgattgtagatatgtcagttatattggaaatgttatgcacatacgcccaaaaaaaaaaaaaaaaaaggccccta

SEQ ID NO: 38982 - DNA, 336 bp, Zea mays
  Clone ID: MRT4577_135552C.1
gttcctcagtgcatcatagttaggccagtaaggataacgaggacggcgggcgcatgcttctgacacccaaggggccctggtgagagatgcgctcctgcttgtccgaccagtttggcgctaacgtggctgctggtccgagagtcccaggtgtccacccaactgcggtaggcagcccagcagtcagagggaggaaagctagcggaaggcggaatccaggatgtccccaatgcacagaccccattataccgcccccttgttaggctgtcttccagccatcagcgcactcttcttgtcatgcatcagcacagcggtcgttactgtaaagaacagaaaaag

SEQ ID NO: 38983 - DNA, 250 bp, Zea mays
  Clone ID: MRT4577_135553C.1
attcggctcgagctccaaccagcggttatctcactcaccctcaacccctccatcgagggggatggaagaactgctcctggggacaagactccctagatatatgatcgaaccgatactaattcttgccccccagcccatgcctatcaacgaggggatcaaattacactaggacgctcaccaataactgaaggtatactggcggactgaaatctgaagattgcactccaggttggtgacctaaaacagatcg

SEQ ID NO: 38984 - DNA, 248 bp, Zea mays
  Clone ID: MRT4577_135554C.1
ggccgcttttttttttttttttttgtttatccttccgaaaacattcactcttcgcaattaagaaaaacaagaggaatattatttacaggcatagcatacgtctaggaactacgacttttgtatcgcctgatcgatttgcagccaaatcagaagcatgatcatcatgaacaggatgaggccctaggtcatgaacgagtcagcgacgacctggatggccacctcggacaggcagacggcgtcccagaaga

SEQ ID NO: 38985 - DNA, 750 bp, Zea mays
  unsure (1)..(750): unsure at all n locations
  Clone ID: MRT4577_135555C.1
atgaaatccatgtaaaagatctttggagacgaatgaagcccaaaaatttgagaagagggcattggactcaggatgagtaccaaaacttatttgacttggtaaatttggacttgcgtatgaaagcccaccaatacttcgaccctggtcaccgtcagataagagataacatttcttgggaggctatcagtgataaattaaccactcgtaataaccatgagtgctgccagaagtggtacctgcaattagcatcaccactggttaaagaaggaatctgggcagataaagatgattatctgctagtggaagcgcttcaaaatgttgatgctgtttgtgttgaagaagttgactgggagaaccttgttgagcataggtctggggagctttgccgtcaaagatggaaccagatggtccgcctgctcggtggccacagagataagcctttcattgagcaagtggaagtgcttgcaaggcggtactgcccagaaatgcttccgtacagggaatcaaaagcaggtgacttatcggccggcgaacttgctggaggctctgacctgtaatggctagcataacccctcagcgtgtgtgctgttgtaaaattgtttagcttttgtaatacgtatgctataatatgggatctgtagaaatgttagcatcatatggttctaaagcttcagaccttcagtgcacactacagtgtgacttcaacaaactctgttattaattgttgagggcttnatgtatctggatttg

SEQ ID NO: 38986 - DNA, 1111 bp, Zea mays
  Clone ID: MRT4577_135556C.1
cattgggacctcgaggctgggggccgggaatcccaaatcagctcaacggccaaaacgaccaacaagcgcgccgtccgcgcacagacgacgacgacaggcaacagaagagcgagggcatgggtccagctcgccacctccgcggcctcaccgcgctcttgatctccgccgccctcttgctctccgccgccatcccggccgccagaggccaggaggaaacggaggacgaggaggagttcaactacattccaggcgacgcgaacgggccggagaactggggcagcatcaagccggagtgggccaactgcagcgctgggcgcatgcagtcccccatcgacctcgcccgcgagcgcgtctcgcttgtgcccgccctcggcttcctcaaccactcctaccgcccagcccaggcctccatcgtcaaccgcggccacgacatcatggtgaggttcaacggcgacgccggccgcctggtgatcaacggcacggcgtacgacctcaggcagatgcactggcactcgccctccgagcacaccgtcgacggccgcaggtacgccatggagctgcacatggtgcacgagagcgcggcgggcaaggcggcggtgatcggcatccctctacgagatcggcctcgtcccggacccgttcctacttcggctggagcccttcatccgccggatcgccgacaggaaggacagggaggagcccatcgggcgtggtggacccccggctcggcgcgcggcacggccagcgcctactaccgctacatgggctccctcaccacgccgccatgctccgaggggggtcgtctggaccatcatcaagaaggtccgcagcgtgtccaagcgccagctggagcttctcagggaagccgtgcacgacggcaacgagaataacgcgaggccgcttcaggacctgaacgacagagacatcagcttgtttcgccctaagctacataagcacgagctttttagtttttaggataaattggttggtgcatgaattgatcgaacaccactttctgtcagtttatgcttttcggatgaacggttcatggtatcaaaaccactcaggtttaaatcatggttaacataattaaataaaataattgatgatg

SEQ ID NO: 38987 - DNA, 1140 bp, Zea mays
  unsure (1)..(1140): unsure at all n locations
  Clone ID: MRT4577_135557C.1
cgagtggcggcgttttgtaattacccaaggttggtgctagtgaagaaaagcccaggacacaatcaacctttgagacagataaagtgaaagatggggggacgactaccaacacaggaacagcaacagatcaatgcagcaacttcggtactgaagaaaatctccccggtgaaataacttctgaggcacataaaatcactgacgtgaagatgactagcaatactggaacatctgtacagcaaagcaacattgatagtattgaagagaaggccggccagatcgatgcagtttctgatccacatgcacatataatccaagatatgggaatggacaccaacaatggaccaccagtagctgaaagcggcagtcctgttgctgaagaaaagccccccgaacaatcctcttcaattggtgatgtgtgtgtcaccgctaatgctggaattccaacagatcaaacacaacatccaaatgggtcaactgaaaatgtagtcaggaaatctcccaacagagaactatatgaagagaaatcaggcaggctgtaatgtagtctcacccaaaggacaaaactttatgttttcatgaagatgagcagtgggttgtgacacagaagcaatagaaaaggcaaactaatttagtaggaggttgcaccaattttcgtttttttttcagatggaactatgctgaatctaccatttatttaccaacaccagtgatcaactgtgttctcgacattctcttggataacattatacatttagccatcgccaaccatttttacaggatgtttattctatgccccttggaaacatgctcaccagacctactccagtcttgttcaggctttgtttggtagcaagtgtaatggagggggttaggattccttactattgaaaattgaatagtaagggattctagccccctcaatcccctctattacactcgctcccaaataaggacagaaggtttcaccacattttctgcaaaaatagttacgttcctgctgacgtaagggttactaaattctgcaggaatccactgtcgccctgtgtggtaagagatcctagaacacagngagtataatcgtgaagttgtactttatgtagattgataatctttgagtcctaaataatcccgttccccttc

SEQ ID NO: 38988 - DNA, 1012 bp, Zea mays
  Clone ID: MRT4577_135558C.1
ttttttttttatatataagttatcatgatattatatgttcccgttgcaacgcacgggcacacacctagtaaaattatagagcaattacatctgaatttgaatgcacattacatcccgcagccgaagttgtatgcctattaccttccgcgcccacactcgcacctatctccctttcaaatattatcacgggtcgaggggctgttatcaatgtgcggtcagggcaaggcggctggggtgtcgggccggtgctggtgctgctggtggtggtacacggcgaacgagctcgaccgcgacacgggccgggagtagctggaccggcggaagctgccggcggcgatctcgtcggcggggtcgacgggctcgccggtctccgcctccctctcgcccgggatcctgcacttctccccgaggatgatgcccttcttccacagcgtgtcctccgactccaccttgtgggtggtggtccttgtgctcccgccggctcagccgcagcttgtccgggatgttcatgctcagcttcttgctcacgctgatggacaggcgccgcttcgacgtcgacgacggcagcgtcaccgggtcgatggcgccgtgcatcgccagctccggtgacagtctcaccacttcctcctcccgcctccgcggcgctagcctcctggcttccgccgccgccggagacggagcccgagcccgtcccggtggactggtccgaagcggccgggtctgcacgggtggccgccttcggcttgcgaccgcatgccgagcacatggacgacgcgagcgcgacggtggcggccacacacgccacgaagaaggacaaggcgacggcgtcgtgtccgaagggtatctcgccgtccgctggcggcggcggcggcagccacctcaccattgtcaccggcgggatcccggcgacgggagagagagttattcctctccccggaaggaatgaggctcgcggctgctcgtcggagagacgcttctattcccgcggtgcgggggcgacctccccggccgg

SEQ ID NO: 38989 - DNA, 904 bp, Zea mays
  Clone ID: MRT4577_135559C.1
ggccgcaaattttttttttttttttttgatacgaaatttctttgtttccaaactggatcttctctcgatgactgtccatgcatctagaccagaccacacaatttcacaaagataagatgacacaacaaaattatagagcaaacatctgaatctgattatctgaatgcacttcacaccacactagcatagtatcatccttcgccggttttgacgcggtgacgcctacacgtacacctaatctcgggctgtcaagtatccgaggcgtgcaaggcgggcccgggggcgtcgtgctgcggctggtgcatggcgaacgagcttgaccgcgacacgggccgggagtagctggatcggcggaagctggcggcggcgatgtcgtcgtcgtcggggtcggcgcactccgcctcccgctcccccgggatcctgcacttctccccgaggatgatgcccttcttccacagcgtgtcctccgactccaccttgtgatggtggtggtccttgtgctcccgccggctcagccgcagcttgtccgggatattcaggctcagcttcttgctcacgctgatggacagccgccgcctcgacgtcgacgacggcagcgccaccggctcgatggcgccgtgcatcgccagctccggcgacagcctcaccacctcctcctctaccgctgcctcctccgcgccagcctcctggctgccgctaccaccggagatggaggaggccgtcccagccgggtccgcgttggtggccgcctttggcttgcggtcgcacgccgagcacatggacgacgcgagcgcgacggtggcggccacgcacgccaccaagaaggaaaacgtgacggcgtcgtggccgaagggtagctcgccgtccgctgtcaccggcggcggcagccacccggacgcgtggg

SEQ ID NO: 38990 - DNA, 373 bp, Zea mays
  Clone ID: MRT4577_13555C.1
atccacaacaggatcgaggccaccacgcggcgcgagcgagcgctcgcctacgcgttctcacaacaaattctgagctgcggcggcggcaccagcaagaagcggacgtcagctcacgcggaggggcagggcgagttcaacgtggggtggagctggctggagcggtggatggcgactccgcaggcgaagcccacgaacgactgctcgagccgaagcacaaacacgggctccagcacatagccgcgatgacagcgtcgttaactgtaggccagagccccacctgaatgtgaagcgagctgaacaagctacgatccttggtaacaagatttcagcacttgctgaaactctagtggcaaagacccacgcatgggaagag

SEQ ID NO: 38991 - DNA, 371 bp, Zea mays
  Clone ID: MRT4577_135560C.1
ggccgcttttttttttttttttttggggaagtcttatttgagtaaataaggcattcggccagaaccaatttcaaaaacagataatgcgtgcaaacatactcagacgtcccactcccccgggcggtgcaaaccacgcaagacttcataacatactgtaataccctgaaagcacctgcaattcatgggggaggatgcaataatgatacgctaatgtgaagcggcaggattaacagcagaccttcaatatacggatccacgaaaggcttatcaggagcacaccttatcacgtctgccgccgttcccggagcacctttgcgagcccagcatgtcgaacacgggcctcctggatcttgggctacccgataccatca

SEQ ID NO: 38992 - DNA, 1268 bp, Zea mays
  Clone ID: MRT4577_135561C.1
gtccggttctagatcgcgagcgggccgccctttttttttttttttgatatttaaatttctttgtttccaaactggggcttgggtcggtgactgtccatgcatctagaccagaccacacgatgacacaagaaaattttagagcaaacatctgaatctgattatctgaatgcacttcacaccacactagcatagtagcatccttcgccggttttgacgcggtgacgcctacacgtacacctaatctcgggctgtcaagtatccgaggcgtgcaaggcgggcccgggggcgtcgtgctgcggctggtgcatggcgaacgagctcgaccgcgacacgggccgggagtagctggaccggcggaagctggcggcggcgatgtcgtcgtcggggtcagcgcactccgcctcccgctcccccgggatcctgcacttctccccgaggatgatgcccttcttgcccagggcgtcgtgcgactgctgctgctgttggtggtggtccttgtgctcccgccggctcagccgcagcttgtccgggatgttcatgctcagcttcttgctcacgctgatggacaggcgccgcttcgatgtcgacgacgacagcgtcaccgggtcgatggcgccgtgcgtcgccagctccggtgacagtctcaccacttcctcctccgcctcctcggcgctagcctcctggcttccgccgctgccggagacagagcccgagcccgtcccggcggactggtccgaagcggccgggtctgcacgggtggccgccttcggcttgcgaccgcatgccgagcacatggacgacgcgagcgcgacggtggcggccacacacgccacgggccgggagtagctggaccggcggaagctgccggcggcgatctcatcggcggggtcgacgggctcgccggtctccgcctccctctcgcccgggatcctgcacttctccccgaggatgatgcccttcttccacagcgtgtcctccgactccaccttgtggtggtggtggtccttgtgctcccgccggctcagccgcagcttgtccgggatattcaggctcagcttcttgctcacgctgatggacagccgccgcctcgacgtcgacgacggcagcgccaccggctcgatggcgccgtgcatcgccagctccggcgacagcctcaccacctcctcctctaccgccgcctcctccgcgccagcctcctggctgtcgctaccatcaaccccagaccagcccgtcccggccgggtccgagaaggaaaccgcctttggctt

SEQ ID NO: 38993 - DNA, 384 bp, Zea mays
  unsure (1)..(384): unsure at all n locations
  Clone ID: MRT4577_135562C.1
agagaggagaatcccaaatcccagcgacgaccatgactccccaagccctcctcctcctcctcctcgccgccgccgtcgccgtcgccgccgcctccgcggccccggcgaacggcgcggcgaacgacctcctgcccaagtacggcctccccaagggcctcatcccggactcggtctcctcctacaccttcgacgaggccacgggcgacttcgagatccacctcgcgggcacctgctacgtccgcttcggcgaccacctcgnctactacgagaagaccctccgcggctgcctctccaaggggcggatcaccggcctcgccggcatccaggccaagaagntcttcctctgggnctccgnctccggcatcgtcgcgcaccccgcggagg

SEQ ID NO: 38994 - DNA, 260 bp, Zea mays
  Clone ID: MRT4577_135563C.1
tgggttgagggggttttggacacaaattgggtaaaaagagaagttcccggtttcttctttaggtgcaacttctacaaaggggggcttcaacaaggttggaagcttggttccgggggttggcattggaggtggcaattgcggggaccccttcttattttagaaattggcctaagaattacttaattcccaaaaaaaagaccgttcccgccgtcgtgtttggcccgtgaccctgagcaccaaacttgaagaagttgcaaaga

SEQ ID NO: 38995 - DNA, 620 bp, Zea mays
  Clone ID: MRT4577_135564C.1
ggggggaaagggccccttcccaaatttttttggggggcccccccccattttttttccgcggggcaagacaaaaaaaaaaaattgggggccccattcgggaaaaaaagggaaaaaaaggtttttttttaaaaccccggggtttggctttaccaaaaaaaagggccaaaaagcccaaaagggccggggcccccacttttggggggaaaaaaaaagggggggtggggggggggcaagggccccttttaaatcccaaatttaaactttggaccccaaaaaaagggggaaaaccacctgggttggggcccaagttttaatacccccagggggggggggttttggggggggggggaggggccaaaaccccgccgggttttgggcccctaggggggggggacctagggccccctggggtccctttggaattaagccccggggggggaccctttgggatttttggccccccccccaccaaaggaaggagctaagggttttttttttttttgcccccctttacccggaaggggggttcctttaaagggcctctttttttttccccgagggggacaaaaccctccccaaaacctgttttggggcaaatttgaagtcttttttcctaaagg

SEQ ID NO: 38996 - DNA, 256 bp, Zea mays
  Clone ID: MRT4577_135565C.1
taaaaaacataaaaaaaaaaaaaaaataaaaaaaaaaaaaaaaaaaaaaaaaaaaatgggaagggaaaaaaaaaaaaaaaaattaatacaaacggcctgcctccctcatagttccaaccattccgggactcctgcatgctacttccaacctttcctttggcttcacccaattcaatttccctgcccttcttttccctaattctaaactgctttaacccctttcttccccaatcttatttgcttaacccttcatttc

SEQ ID NO: 38997 - DNA, 732 bp, Zea mays
  unsure (1)..(732): unsure at all n locations
  Clone ID: MRT4577_135566C.1
ccggccgggaaaaatatctaccatgacctccgctccgtcatcccggcccggcttcacaccatctggcgccgcgatggcctcaccacccgacctggacctggccttcccgcaggatgccttcccccgcctgtcggtcgcaacacccacgcggctgctgctgggcacagtctcgtcggcgctcgtgggcttctcgctcggggcgacgcagggtggtcagatggcgcagctggggttccgggccgagcacgcccacaagatgcccgacacgacgacagggtggtacttttaccacaagagcaagaactaccacgccatgcagggcggcatccgtgagggcttccgcatggggttcaagacggggttctggagcctgttggccttgtcgctcgagagcacggtcgatccgttatcgcggggccagcgacatgttttccaccacgatagccacgcttccggtagctggcgcgttttcactctggcatcgcctgtcattaacaaccgccgcccggaccgcgcgatacgggnctcatgttcggtctcngcgtacggtgggattcaagacctcgttggcttagcccgaggcagacggatcgngatatgtcgagntttctnccgaacgtcgacgtttgggctattgaggatgatgctcgagtattgtagcaagtctaaacatacgcatnatgttattattgtaccattattgaagatattaatatcacgactggnaacaac

SEQ ID NO: 38998 - DNA, 396 bp, Zea mays
  Clone ID: MRT4577_135568C.1
tcgtgggtcgatacaagcctctacactgacgtcgtattagatctccgttgccgggctggtcctggcactggcgtcgctgctgataatcgcgtgcgcaaccggcaagcagggcaaccgggggaggaagcgggagcggcacgcgtcgcgcaggcacagcatcgtggtgccggaacgtcagtgtggcgcagccgcgggcgtggtgtcggcggacgtgtaccagccgtcgaacgggccggcgccgtcgccgtcgccgagcgggacgtcgagctcgtacgacctgtcgggggccaacaagtcgtggttcacgtacgacgagctggcgggcatcacgggcgggttctcggcggcgaacgtgatcggcgaaggcgggttcgggaaggtgtacatgggccccct

SEQ ID NO: 38999 - DNA, 307 bp, Zea mays
  Clone ID: MRT4577_135569C.1
aactgggcatggcgctcggagccgcgctctctgcggcgaagctgcagtcacacccttactccaactaacaggctgcggaggcctactcaggcccatggccgacaggatccaggagagtgagacagaccacatggtcctagttaaccaccccaatgacaccacgaaatcgagtgagacaaacgctagatcaccatatcgagtacaaccatagaggatctggtccctccatcctcaaggagtgcgagaccttaacctgatcgtgcatggccggcaaccgatcttgttactaggaagcacgcaggaaatc

SEQ ID NO: 39000 - DNA, 1575 bp, Zea mays
  Clone ID: MRT4577_13556C.1
gtcacctgctggtctctgagctccctacctatcactcccattgccatctccatcctcctgctgtgagcgtgttgtgtgagcccggccgtccggactctgttgacgagtgagaagcaaggatcgccatggcgcggtgcgccgggttcgtggagaaggcgaagccctacgtggccatgatctcgctccagttcggctacgccgggatgaacgtgctcaccaaggtgtcgctgaaccagggcatgagccactacgtgctcgtcgtctaccgccacgccttcgccacgctctccatcgcccccttcgccctcgtcctcgagaggtcctcgtcgctgatttctgatttctggcgatcgagctaaagctagcgcactgatgatgactgatcacgatgcatgcgactgtggaaaattaatggctgcgtgcaggaaggtcaggcccaagatgacgtggccaatcttctggcagatcttcgtcctcgcgatgctcgggccggtgatcgaccagaacttctactacgccgggctcaagttcaccggccccacgttcgcctgcgccatgagcaacatcctgccggccatgaccttcgtcctggcagtcatcttcaggatggagaagctgcagatgaggaaggtgacgtgccaggccaaggtcctcgggacggtgctgaccgtggccggcgcgatgctgatgacgctctacaagggcccgctgatgcagctggcgtggacgaccaacaggcacgcgtcggcgtcggcgtcggcgtcgcccgccgcggagatcatcatcagcggcagggactggttcctcggctcggtgttcgtcgtcgtcgccacgctcgcctgggcctccctcttcgtcctgcaggcgcacaccatcaagcagtactcggcgcagctgtcgctcaccacgctcgtctgcttcgtcggcacgctgcaggccgtcgtggtcaccttcgtcatggagcgccgcgcctccgtctggaccatcgggttcgacatgaacctgctcgccgccgcctacgccggcatcgtgacgtcgagcatcgcgtactacgtgcagggcctggtgatccagaaggccgggccggtgttcgcgtcggcgttcagcccgctcatgatgatcatcgtcgccgtcatgggctcgctcatcctctccgagaagatctacctcgggggcgtcctcggcgccgcgctcatcgtggcaggcctctactccgtcctctggggcaagcacagggagacgcaggagaaggaggaggccgccgacaccaagatggcgctgccgacggcggcagcatcctccatgcaagacgctgccgctggtgtcgctgtagatggtgcggggtgcaacgtcgggaatggcctgacgaggtcatcctccaatgccgccgccggcgccgctgctaatgcagtttgattggcctcatcaggctcccaataatttgcctccggtgaatggcgcgcggcgtcatgtcatccgtgatcgaatgctgaattgttcgtctggctacgacgagcacactgtacttattagggaaatggtgcagtggtactcctactagtggagagatagtgc

SEQ ID NO: 39001 - DNA, 116 bp, Zea mays
  Clone ID: MRT4577_135570C.1
tcaaccagacgcttcgatatcgattattcgttgaaggcaacgcgagagtagccatccgatcgcgggagactacacttcctaaactatacaacatcaattaccatatctaaaataca

SEQ ID NO: 39002 - DNA, 334 bp, Zea mays
  Clone ID: MRT4577_135571C.1
ggggcaggggcattttgatgaataaaaaaacaatgggaccagaaaccaccaattaatctacaggggctgaaaaaatccttacattcaggtttacaggctccaggagcccccaaaatgggggacgcgggaaaacaacctgccaggcaattattgttccatatcccgaacgccaaactataacacatgtcaattccatgtcaattcctgggggcccactacattcaccaacttgttggatgcgcggccatgggggggggaactaccccaccatcaaaatgggggactggacccccttattctttccccacctaagtagtgggccccagaacctttg

SEQ ID NO: 39003 - DNA, 400 bp, Zea mays
  Clone ID: MRT4577_135572C.1
accgggggttttcgggctttcccccaaaattttgggcccttttgggcctttccctgcctcctttatcccgggggtttttcttgcccgcggttcccttttcccccccctttccccggggggggccccctttttcccccgggcaaggctggttcttttttttgggggcccattttttcccccaaccacctttccccccccccccgcggggggaattggcctttcccctggggcggtcctttctcttttttggggtggccctcaaccttggaaaaactcttttccttgcggggtctgggttttcaattgtcccctcccccgccttggactccccactcctgcgcggggcgttcccctttttcggccctttgcggtccccccggttcccctttcgccctcttcc

SEQ ID NO: 39004 - DNA, 282 bp, Zea mays
  Clone ID: MRT4577_135573C.1
cctgccatacatttaaactatccagtaaacccccttttggaccatgccccttcttttcaaagggatctgtttataggggatataacccacctcctccacaactactatattaacaaccttcagtccctgcatcttctcctagaccacctctgtatttaccctaacataatacacaatgcccaaaatcctaacatatataccattaacttttaatacattttgagaaaattgaaccgaatctacccttcttttacttaaacaccataacaattagaaaattat

SEQ ID NO: 39005 - DNA, 510 bp, Zea mays
  Clone ID: MRT4577_135574C.1
aaaaaaaacaagcatatcgcctaggaagggggggtagaaacggaaaagcgaaggggggccgggtcgcccggggccctaggcagcactatgggatccccgggggggggggtacacacacaacttattttatcggcaggggctcaggaggggaagaccgcaagagtccagcatccagttcagggaaaaattcacaaccgctgggggagggcaggggctgctgaggggggggctacattggggggaacgaacgatgggagaacacttgggtttcttggcccccgtgggctcgggtggtggtggtgcaactggtggatcacttccttccaaaggctccggggggggggggtcctcctcgcctccgaagccaaactcggtgacaccctttttggcgaccggatatttccacctcggggggacgtatatcaagaagaaacatcatttttgaaaaccgggagacaaagaagcattggcattttaatgacgaaggcaaaagggcatcaattatagggg

SEQ ID NO: 39006 - DNA, 386 bp, Zea mays
  Clone ID: MRT4577_135575C.1
ggaacccggggcggaccaacccttccgatggcctggaccctttgaaagctctttaataatccggaaaccaccaaaacctggctggcgcggagaagttccaaggggtggcgaagccattccacccatttgttcccaaggaagattcttttttttcgaaatttaaagtggagttgtttaaacttgtttaacagttaattggtaatcacttcctgaacacttacccaaattttggcaggaccatacctgtcggggaagcaaaccgttacccaaaggttcctgtccccaggttcctggaagctggtcgatttgttttaaaagctgttccaaatgaatctgttttggtaacaataaggcctgttttaacaagcagggcctaaatgtccttt

SEQ ID NO: 39007 - DNA, 411 bp, Zea mays
  Clone ID: MRT4577_135576C.1
cgctttttctgtgaggctgatgacggctttgcgagtggttgtaacggagcgacgagggcgcatctcgagaaggaggagttctgcggccggccgctcggcctgaggttccacggagagaccggcgagctctacgtcgccgacgcgtactacggtctcatggtcgttggccagagcggcggcgtggcgtcctccgtcgcgagggaagccgacggggaccccatccggtttgcctcgctctgagctgcacacggagctcaagatctgggcagtcagctccatcccggtcttccagagccaccaattcttcggggtcctgctgaacatgctcttgaactctccgatgcctgtttactctctactgagtgctgatgatgaaatcttggtgagggatgttctatatgattatcttgg

SEQ ID NO: 39008 - DNA, 600 bp, Zea mays
  unsure (1)..(600): unsure at all n locations
  Clone ID: MRT4577_135577C.1
caggnattgaaggaacaccatccaagctaaatgcccgtactaattatgacagcgataatatcatggtgcttgtgagaaatgactattctcttagtgcatcagatcttggcaagcatttatttaactggacaagaacttctttctctgtgaaatacaaccaccctgacattccatgcatcagaagtgagggtttgccacttgctttacctgattcacgttcagctaatgtaattgtcttgaaagaaggtaccccttttatttccatccatggttctgatgccctggaaccagttcaaaccccaaggaagctaccaaacactgctgggaagtcagatatcgtattggatgattctcaaaatcaaacgtatgatggtgctcgatctcatgtcatctctgctgattctgaagctaccgaaacccccactaggaacacttatgtatggttattttcttttttccccatatttttggtcattggttatctgttgagcttgacctctgcaagcaagtcttgcaggcaatttgtgattcagcttattaagccattcacgcgcgacaagaaatcggtggacattagaggcaggtcagagggatctccta

SEQ ID NO: 39009 - DNA, 1056 bp, Zea mays
  Clone ID: MRT4577_135578C.1
ctcgaggccggccgggggctctctcgccgcctcatcagctttcagctgcatgcagtgcagcgtgtggtgtgcccccgccggcattattccttccctcctcttgtcctagctagctccccccactctgatgagatcgatgatgcgccatggtccacctccctcttcgttcatgactccatgtccatgaggcctgccgccacggccacttcgtcttctataaatagcagctcttcccacacctcctcctctcatcagctcagcatacacaacatcatcatcatcatcttctcgctagtcgctagtcgagcgagcccttatagttaattaagctagtcgatcgatccaagagaagaagaagcagcagacaggaatggcgtcgctctcgatgacgacgagcgcagcggcccgcgcgcagtggacgcctaggcagaacaagctgttcgagcaggcgctggcggtgtacgacaaggacacgcccgaccgctggcacaacatcgcctgcgccgtcggcggcgggaagtccgcggacgacgtcaggcgctactacgagctgctggaggaggacgtcggccacatcgagtccggcaaggtgcccttccccgcctaccgctaccccgccggctacggggccgccgacaggctgaaacagctgaagatctaggaggtcaattgaacatataggacgaacgatcgatgatccagaagatgcaaacatgtgtgtatataggattaatgggacagtatcagtatgcatgcaatggtccatgctgcaagtgcaagtgcatatatgcaagtggtgtgtgaaagcaagaatcagattagatgcatgcatatgcatatgcatatgcatgtgttaatttagtagtaataattgtagtatgggatgagtcctatgctagccagtcacgcgcgatcgaccgaccgacccatcgatctccaatgcttctgttccctctccctcctacttgtccacttgtgtgtatatataaatattatgtatttttattactatatatactctacctgttctaacaaaaaaaaaaaaaaaaaccttag

SEQ ID NO: 39010 - DNA, 588 bp, Zea mays
  Clone ID: MRT4577_135579C.1
atgcttcaccgaattcgctaaaaacccggcgtgaaccgagaccaccgacccctccccctgctatcctgcgacgagtctcctgccgctcttcccgggcgattgaaatggacggagtcggagatacgaaggacatcccttcgcaaaacagatgtctcttccacgatgtgcgattacccgatggaacacaaacgagataaagcttctgagttcagacaggtattataataaacaggcactgacgatcctgagaatattcaatgaacggcttcttgatcaaccacatgaagagtattgagcttgtaatctggatcctggatagtgcctatgagccaatgagttctctattctatgcgaataatactggcgtgcaagcccatgatagtgacattcacaccagtcactgtgatctctatggtgaggagaacaattacagagacagggccatgtacatttatggagcctagcattatgatgctctcgatatgtgaccctgtgaatgtgcacctgaacaacatgaccatacgagcttctgcgtccactatgaccgtatgcattagattcagcattaacgccttgacctcaacttaa

SEQ ID NO: 39011 - DNA, 1327 bp, Zea mays
  Clone ID: MRT4577_13557C.1
attttctcctccgtctttccaactgcagtttctcaatccaatcaccgcacgcgtgcaccgccgtgctcacctgaaactgcctgtcacgccggcgcccccaacaaccccggcacccgcgctaggggtagccttcggctaccctgcctcctcgttcggccccgacgctagccccagcatctcctcccgtgacgcctccctcgatctcctgtcccgttccccagccatctccaatcatggatcctgcgatggagatccccatgtcaccgccaacgccgagatccatcggccagacgcagaccgtagccccgacctccctccatcgccaagcgttgcgttcagcgtcgccccatctgtcctcgcccatggctggcatgggggtttgattcccagcgtacgactccagcccgacgtggtacctcgaccctgcctgagatgtggtgaagacctgtgcataaattgtagtaccccatttcgacggcagtcaccattctccacaccttgtcgtctgcataagccggacgattgttgggtggtgggaatggaaccgcgagaagcatagaagacatttgatcgtcggcgcgtctatgcgatagtcctgccattgcaaacatactacagatgattaactgacaaggtgatgatgaacgagcagcgggcatggaggcaacataggacagggctcggcgacagcgactttctcttctggcataaattggctgacccgaatttggccgcaggcaccattttcctctacttttattatacattttttttgcgattgttagttacctctctccccatactcaacctgcattttacgattgtattgatttatatcaacctcaaaccgctatcccccaatcggcatttgaatccgcctacccgctgccgcctatgtgggtgataaaattgaaaaaaaaaatcaatttctatgattttcctcatagccttttaagccctttttgttgcaaggttgggtggtgggaatggaaccgcgagaagcatagaagacatttgatcgtcggcgcgtctatgcgatagtcctgccattgcaaacatactacagatgattaactgacaaggtgatgatgaacgagcagcggccatggaggcaacataggacaggggtcggcgacagcgactttctcttttggcatggttccgctgagatgaagtggttcaatggcttggtgttcatctacatttattataccattttttgcaagctatgtggagagccaaattgtacagcaaatgtgaaaaaaaatatgatcggtccttcaaaacctatgagtatttcaatgaaaagaatttgtggctgcggccc

SEQ ID NO: 39012 - DNA, 767 bp, Zea mays
  Clone ID: MRT4577_135580C.1
ctcgaggccggccgggattccttttttggctctctgccttcctggctgcttccctccctccgtcagatccccgctcggactgccatggatggaccatactcaccgacgaacagatcgtcgagttcaaggaggccttcaccctcttctacaaggacggcgacggctgcatcaccaccaaggcaacttggtgactgctgatgctgctcattgctcgcatcaaccctactgaggctgagcttcaggacatgatcaatgaggtggatgctgatgggaatggaaccatcgactttcctgagctactcaacctgatggaacgcatcgatcgaaggacaccgactctgaggaagagctcaaggaggacttccgtgcgctcgacaaggtaccacaacggcttcatctccgctgctgagcttcgccatgtcatgaccaacctatcgcgagaatgtgacgacgacgaggtggaatagatgatccgagaagccgacgtgaacggagatggccagatcaactacgactagctcgcgaaggtgatgatggccaagagagatatgtccgccgattctaagctagtgcctctcctgatggtagtaactagtctagatttgcagactgactgcttttggtagtgactgacgcctatccttgcgtcaatgtacatatccgtgtgatttcaaccaacggattttaccatgtctgaaatctcgctcacacttagtgcttgaagaactacatatgagtgatctccgcacaatgatcatgtctttctc

SEQ ID NO: 39013 - DNA, 270 bp, Zea mays
  Clone ID: MRT4577_135581C.1
cagctcgacaccgtcgtcaacaactctggatcgtctcaatcggatctgacggctatcactccgattgacgagaactccttccagtagttacagcaggtagcgccagtgtcgacaccaatggcgaacgcggcgcaccagatgcacgactccgtcgcgtcctactcgctcaactcacttgacttgctgcaggagccgatcaagcatgacaacgattacaactgtcaactctatcagcatgagagccgtgtacgtacagtgcgatcagagata

SEQ ID NO: 39014 - DNA, 303 bp, Zea mays
  Clone ID: MRT4577_135582C.1
acgggcacctctacaccctctgcgtacacgacaccgacaaggccaacaagctcaagcagtcgctgccgccatgtctgactgtgcaggagatttaaggtatcaagccacaaactgtgcttttttttgcagtgacagggacgctagctccactgtgactttattttgtaggtgggctccattgctgggtgtgaatgaattatgaagcttgagtctgggatgccaatgatgtggcgaacctatgagcctgtgttgcaatggttaccccataccgcacaggatggcagtctattataaggtggcctg

SEQ ID NO: 39015 - DNA, 527 bp, Zea mays
  Clone ID: MRT4577_135583C.1
aaaaacctgggactgaacctcaatcgtttttaaaaaacagggtcctaatcgggtttaaaaacagggcatacccctttgaccttgaaaccactacccaaaaaaaggggtcctcttcaggacccccttttgggggcaagacaatccatgaaaaggctttaagctacagggcttttgccctttttcctttggagttttttaaggaaaaactaaagctttttcccctaaggggggcccccatcagttgggccaccctgtccaggggggaaaaaaatgcttgccaaaacccgcccactgccaaattgctcctaaaggggggggcaaggggaccccccctccttgcgcttttaaagcttcctggggacaggggggctttttttggtttcctaagggggggcctaaaccttttggccctaaaaattatccttttttgcagggggggttttttttttcctaccaaggccacccccttaggggggggggcccccctgtttgaagggggcagaataaacttgcacaagggccctttt

SEQ ID NO: 39016 - DNA, 1065 bp, Zea mays
  Clone ID: MRT4577_135584C.1
tttgcaaggaagctcccaccacagctaggccgctttttttttatttaaattcacagatcaagctaacactatattcatatatgtaaagtcacagatcgaagaaccctaaaatgacccttgaaaagatcacagaaaagccgctacacttatttccactcgaccagatgactaatttacaaagcaattcccaaaggtaaacagcagtaggccaggacgacctggaccaccgttcttgaggggctcacttgccccctccaggccctcccaggggtgagcacaacatcgtgcaggtcgctgccgcctcgctccggctcggacttgactgcctttgccgggaacccttgccgcgcgcggtggacacagttcggcagcacgaaccccgtcgcctgcggcaccggccgggcgtggacagggatggcgtgcgcgagcagtggccgctgctggggaggcatggccgagctcgtcaggatctgatggtgcaccgtcggtctcggagccgtaaccccaggtcccggagcaaacagaacgcctctgaagagctgcccattcacgacggccgtcatgaggtacccggaatcgaaagctccatcgatcgtcccatggacctctgcgccaataaggggtggtcaaggagccggccggggctgaggcttcttatggtcggaggaaaggaactgcacttcctgccgatgatgctgtggcgcgacggtgcggaggaactggtccgtcttcagagccggcctcgaagacacgccgccgcctccgcgcccaggagcactcggagcgccgtcgttagccttgaggcgagcgaacggttgcagcgctgagaccgacgcgttgggcgagggcgagagcttgtgagctccgccgccgttctgctcttggtctgactgcgacggcgaggagtgctgggagagagtcagcgagtgctcctcctgctgctctgactcggccgcctcgctcgggcgagcttcatcggttttccttcgtttcgcacggctgttctctaggccacgcaggaacggattcctctgctcaatttctgcctctcgaccggacgcgggg

SEQ ID NO: 39017 - DNA, 193 bp, Zea mays
  Clone ID: MRT4577_135585C.1
gtactcgatccaaggatcagtaaacataccagacacttgttatcacaacaatacatgctcaacctatactgttaattctcaactggtgcgacagcgattctactatttgtgcttgaataatgctttagcatttcgaggtgctgcacacttctcattgtccatctatcataatatcttacatgcacgcactgat

SEQ ID NO: 39018 - DNA, 346 bp, Zea mays
  unsure (1)..(346): unsure at all n locations
  Clone ID: MRT4577_135586C.1
ctctcatccatcctgcccgcggtcccatcttcttttttttgcagcccgcnctccnacaacccaccacctactcttgtccagcccgtgcttccatcgtcgccctctccaagcccctgctttacagcgcgactcttgcctgatcagctttctttcgacgaacacccaccatcaatgctatcaaactcccacccgttgggcttacattagcagcacaaacgcttccattacataggaggagcaactctccatggcgtcaccagatctcctccacaccgggtcttgatagcagcaccaacacataacctactccaagcagatctccacgccaatgaggcaacaacacctc

SEQ ID NO: 39019 - DNA, 3319 bp, Zea mays
  Clone ID: MRT4577_135587C.1
gaaatcagagatgtttgtattggaccatggctgttatgtggtgattttaatttgattttcaagcccgaggataagaataattccaacatcaataggactttgatgggtaatttcaggagtctaattaactccatggagctgaaagaaattcctttgattggcagaaaatttacttggtcgaaccagagacaggatcccacccttgtgaagctcgatcatgttttttgcacttctagttgggaggattttttccctgattgtctgctgtatagcaacgcctctgtttgctctgatcattgccctttaactctcaaatttcgagaggattgtagagggaagcgcagatttcattttgaaggtttctggcccaagctccctggtttcaatgaggtggtggctgattcatggaatcagccaatgttggcaacctgccctttggaaaggctgtccctaaagctcagaaggcttgctaaacagctgcagtcctgggggcatagagaggtgggaaatgtgagtaaccagttgggtcttgctagagaggtgatgcataggttggaatcagcacaggactttagagttttgtcagaagatgagttttggctgattggaaagctgaagcaacattgttttgtttatgcttctatggaaagaacaattgcaagattgaggtccaggattaagtacctaaaagagggggatgcaaatactaaattctttcatatgcaggctcgtttcaggaagaaaagaaatttcatttcatatctagaagatgaaggtagagtggtctctaaccatgaggatatgcaggaggtgctagatggatttttttccggtcttttgggtgctgattttctgaggcaaagcactattaatttatcgagttgtcacagagaggccgtggatctcagtgatcttgagtgccccttctcagagaaagaagtgttggacacaattgcgtgccttccgtctgataaggctcctgggcctgatgggtttacagggaggttctataaatcttgttggagtatcattaaggtggatctgctggcggctctgtctatcatacaccagggcaattttcagagattggggcaactgaattcctcctacattattttgattcctaaaaagatggatgcttcgtcggctggtgatttcaggccaattagcctaattcatagtgttgctaaattggtcacaaaattactcgctaatcgtttgggccctcgtctgcatgaattggttgaagctaatcaaagtgcttttatcagaggtagatcgattcatgataattttatgttggtccaacaatcgattaaatcccttcacaagagaaaggttgacagcctgtttctgaagcttgacatttccaaggcctttgactcggtatcgtgggctttccttcttgaagttttatctcacctgggtttcggtcctatttggcgcaatttgatttcaaatctgctggctacagcttctacgcaagtgttattaaatgggtctcctggaatccatataaagcatcggagaggtcttcgtcagggagaccctctctctcctatgttgtttgtgctgatcatggacgtgcttagcagtctatttagggctgctgaatgtaggggattgctgcatagtttggaaagggcaggagtccgtaataggctttctatctacgctgatgatgtggtcctgtttgttaaacctattgaggaagatctgaaatgtgttagattaattctgaattgttttgggtcagcctctggattggttaccaatttgaataagagttatgctattcctatcagatgtgaggagcatgtggttcaagagggctgcaatgtgctgaggtgcagtttggcctcatttccttgctcttacttggggctgccaatctcagacaggaagctgaagcgaaatgatcttaagatgtggatagataaaattgcagacagactccctaactggaaggctcgtttattgaacctggccggcaggacaacattggtgcggtttgtcttatcagccatcccaatttatctccttattgcaattaaaattcccaaatgggttattaaatcaattgacaagattcgcagagggtttctttggaaagggcgaaaggaggtgaatggtggaagttgtgctgttccctaggagagtgtgacaaggccactaagtttagggggtcttggtgttcctaatttgcaattgatgagttgggcactgcaggctaagtggctttggctagagaagactgatccaactcggccgtggcttggtttgtgtatccctgtgcagcagcaagttagacaattttttaatgcttcggtgatctctgttgttgggaatgggaccaatacttttttctggtcagacagatggctgaatgggcagaggatacaggattttgcacctgaagttgttaatatggtgagcagcaagccatttagttcgagaactgttgctcaggcgttgcataatgggcaatggattcgcgatatcacgaatcctttatctttgattggtcttcatcagtatttgcagctgtgggatgctttaagtggagtggtgcttaatctggaggaggacagacatgtgtgggtgcactcgagctctggtgttttctcttccaaatcttgttattcggcgttgtttatgggagctattattttccagccatggaaatgggtgtggaagtcgtgggcaccccccaaatgcaaattttttgtttggctggcgataaggaataaatgttggactgcggatagacttcagaggaaaggattacctcacccggtggtctgtccattatgtgatcaagagcaggaaactatattgcacctcttgtgctcctgcagtttcgctagacaattttggcatattatattttcagctttgaggatgggtcatcttacgcctactagggaggcgggctcttttgtggattggtggggcaaggtgcatagaagggtccccaaacatatcagaaaaggtttccatagtctcattatcctgggggcctggtgtttatggctgcatcgcaatagggcggtttttgatggtgtcaatccgtcattaagcaccattcagaggcttttcttggatgaggtggagtgctggtgtttggctggtgcgaagcagctcgagagtcttgggcttctggctgcatttgctaggggggctagggcttttcctagtgtatgaggctacactgttttagtttctttgtatttttgcctgttagggctttgtactttggtccatttcggacctttctctctttcaatataatgacgcgcagttctcctgcgtgttcgag

SEQ ID NO: 39020 - DNA, 416 bp, Zea mays
  Clone ID: MRT4577_135588C.1
ggcaaaaacttatgcgcattcaatagatcaaacttgaaagagtcgggctggctgaaacgaataccaaaccgagcattggcatgatccacaaacagcaccctacagtaatcagtagagctaatgaatcgaaaccaccaccagcgttccggggctacctcatgggaccaagaacagaaaacatctttgaccaaagaatgatcaggaataatgaactgactgactgcatagcttcactggacacagagctgtcaaaccaaccgacctactatctgtagacggcaaggcactgccagacccgtacgtgtggaactcggggatttattagaaagcgccctccctaggattgccctgctgcgacgttttcgtgtccgagtaagagctccggatctcctcgatcctggcgaccacctcctcca

SEQ ID NO: 39021 - DNA, 608 bp, Zea mays
  Clone ID: MRT4577_135589C.1
ggcgatcaatgcgtattttgtttcattttttttttttttttttttttttttttttttttttttttttttaaacaaaacaaagccaaatttgggtacatttttttttttttttttttttttttttttttttttttttttctaaaaaaaaaaaaagggccagacggagaaatttcctttttttttttttgttttttttccttccacttttttttctcaaaaaacacaaaccccaaccccccaaaaaacccgggggcaaaaaccccccccgccccttgaacatgtgggggaacaaaaaaacgaccccggccgctgaaacccggtcgttaaatccccccggccgccccccccaaagggggcaaaaaaagccaacccggccctgaaaaacccgatgcgggacccccccccccggggcgggcggaagaaaccagatcctataccaccccccccatgataccctggggtggaccctggggacccgccgaaatagtttttttgcgatccccacaccacccccccctgttgattatgagggggaggccaccaccccgcacgttcacagtatgaacacggaccgtcatacccccccccttggctttccccgcgggggg

SEQ ID NO: 39022 - DNA, 302 bp, Zea mays
  Clone ID: MRT4577_13558C.1
ccaagactgcttgatgatgtcaagaaacctgaaaagactataactgaaactgagatttccaagaggccgctgtggcacacctatccgggttgccgactacctgaaaccaacccaagcgtgctggagccgcagccgatggtcagcagctttggacgtgggagagggagagccaccgctgccgagacgatgctgggcggtcgcggccgtggctacgggagaagtttccatggggctgagtcgtcgcaaacgcaaagtcgaggcagcaggaatgacggaaactcttatgcaggaagagggacgta

SEQ ID NO: 39023 - DNA, 532 bp, Zea mays
  Clone ID: MRT4577_135590C.1
gtctaactcttatttttttattctttttttattaaatttttaggggcaaaaaccatccaaattggatatcaaccattaatcggttgattccatgggggagcaaaaataccgcactttctgggggggcgcagtggtataaacaacaagatcggcctctccgcggggtcataatgaaactgagcattctccctaaaaccacgatctcctcagagactgaatgttgggaagagcccctctgaaaaaatggaaccaaacaagccctaaagctatggcttatttgaggggatgtgccaccatacattagggaggtacctgcctttcatttgcatgccctttacatagctctgggttttggagctatccaaaaaaaaggggaaaaaactattgtatgaagcattccgggtacgtccctagccattacagtggcatcaccgaacatatttaagttaccaccatttgagatgatggtccaaatggctatggcctttttcaccattttatgcagccgatattctttcgttggcccttaccg

SEQ ID NO: 39024 - DNA, 356 bp, Zea mays
  Clone ID: MRT4577_135591C.1
atcatatattccagaagttccttcacggaattatcgggccacccagttcatattcatgaacatattaccaaaaccaaagtaaggcaaatgatgctacacaaaaatgccacgatggatatcatctacttcaacatcatgataattattttcattacgataaaagctacagtccaattcttgctccttgtaacacatttattgaaacacaatttatttacaacacacatggtgcaaagttaccctcacataatttatattctctacaaacgtcatgttcaaagccgatgcattctactaatcattccctaccatatattcttaatgcatcccaaagacacaactcataatgttgttca

SEQ ID NO: 39025 - DNA, 815 bp, Zea mays
  Clone ID: MRT4577_135592C.1
attactccgcggcatcacgcaggcaggcaggcaggctagccgtgctccctcccgtctcttctctcctctcccccaaagaggtcaaagacacagggagaggactcctccgcatctgcatccgtcctcctccgcgcgcacgaattcgagagggagaggagcggtaatggggagggctccgtgctgcgagaagatgggcctcaagaggggcccctggacgccggaggaggacaagatcctggtcgcccacatccacagccacggccacggcaactggcgcgcgctgcccaagcaagccggcctgctgcggtgcggcaagagctgccggctccggtggatcaactacctgcggccggacatcaagcgcggcaacttcaccgacgaggaggagcagtcaatcatccagctgcaccagctgctcggcaacagatggtccgcgattgccgcccggctgccggggaggacggacaacgagatcaagaacgtgtggcacacccacctcaagaagcggctcgacctcagcgcgcaggagcagcacgaggaggccagcgccgccaagaagcgcaagaagccggcggcggcggcgcggaagcgcgagggcaagatcaagatgaggaagctcgacgcgctgaccgccaaggcggcgcccgtgctgtcctcgccccgacgctccgtctcgtccacgctcaccgagtcacgtcaccggcctcgggcgggggaggagcagcacggcaactcgggcagctccgcgtccgcctccgcgtccgtcaaggaggagtgcttcacctcgtccaaggagtcggaggagtccagatcga

SEQ ID NO: 39026 - DNA, 538 bp, Zea mays
  Clone ID: MRT4577_135593C.1
agtaaccaatccataactcgaaaccttttcttgtgctctgtctgtgtgtttccaaagcgaacgaaagaggtcgaggatgtcttgcagctgcggatctagcctgtgactgcgcatcaagctgcaactgcgccaagatgtaccctgacctgtaggagaagagcggcgggggcgctcaggtcagcgctcgccgccgtcctcctcggtgttgtccctgcacacgaagaaggcggcgccacttcgaggtggcgaacgagtctgactaggccgcccaggcgtgcacctgccatgacagttgctaggggactcgcctgtaactgttgatcctgctggggtggtacgtttgcggtatgaatggatgtcaccttttttttactgactgctttgtgattgtgctgtgcctacaaattataggatgcattcatcgggtggactgactctgtttctccgccatgcatgtatgtggttcctgctggtgagtgtgagctgtcgcatgtcctcgcatgtactcgccaccaccatgagtgtatgatctgctttg

SEQ ID NO: 39027 - DNA, 370 bp, Zea mays
  Clone ID: MRT4577_135594C.1
attccctttcgacccacgcgtaccaaaaaaaataaaaactaacataaacacccaatgattataaaaaaacatggctatacactgctaggtggacccaacaaaggcgccactgcaagcaactctaatggctcctatatgacctaacttaaactcaccaaactctccattcattcgcaaaattgacaccgcatgccccatatttaagacaaagtctcgccacctataaaacatacggcttggtataccccttgttacatccaactgcaacacctatcaacacattcccaataatcaaacactctctatctcaaaaaagacgccccctatctcggtgccatacctaatctcgaacagatcaatactctgatca

SEQ ID NO: 39028 - DNA, 611 bp, Zea mays
  Clone ID: MRT4577_135595C.1
cctagcgtgcgctctctgtgtgtcggcgcgacgactaggcggctgctatccggccgtcgacgccgacgcccgccggctgattcccaggtatctatcttctggaccttgaccggcgacgagcacccaacaatttcaagctgaaataatggtacggaaaaggaaatcaaagtacgagtggccccaatcatgcttcacctaactggaaaaacacaactgatggagatgcactaattacaccaagaaagaggtgctgtagatagcgaaaatacgagttcataggtctaggatatgctatcctgcttatatcagtgcttgcaatggtaatattataggtttatggaacgttattagacgaccacttgtgtaatgattcttggaggtgttctctttttcttgaaactcgaaacaataactattcttgttgactgtttatattcaatgtattgaacgagatgctatgttgtatggctcggattgcttttgggcctcaacttatttttcttttctagagatattctagtgcagatcctaatggacagtgcagaccataaaaaattgaatggttcttgcaggtactcacagctaagctcaggtgaacaaggtaatatatt

SEQ ID NO: 39029 - DNA, 374 bp, Zea mays
  unsure (1)..(374): unsure at all n locations
  Clone ID: MRT4577_135596C.1
ggnatcataaaaccggattgctcgctcccccgatacctcgtccagtgatcgaggtcctcgcctgaccaaagatagagacgcctcgccgccattgaggacctcatcgctctcgcgcaaccttccggaccaccaaagttcccctcggtgacaaccatgaatgacgtgccgttgataaccatggggatctccccaaaccccaccagtcatctgcttccatgtcactctaacgcctgtgatgtactcattatggaaggatgctactgacaaaggtacactatggaacgatcattaacacttgtgggcctcccatctgtctgatccatgaggaactccctgcttcccacaatgcacttgctgctggtcgaattctcgac

SEQ ID NO: 39030 - DNA, 272 bp, Zea mays
  Clone ID: MRT4577_135597C.1
cgcacataccctacctacctcgccgtcgccgtttcattttccatgggggcgtacaaatacgtgggggaggtattgataaagaagcaatccgacgtgattccgttcgttcaacgcgtgcgctgttgggagtacaggcagcaaccgggcattgtgcgccttacaagggccacccgccccgacaaggactgtcggctcggcttcaaggacaagcaggggtgtgttttttacacgcgtacgcgtgaggcgtaggggctggaacaggcctgtgccca

SEQ ID NO: 39031 - DNA, 456 bp, Zea mays
  unsure (1)..(456): unsure at all n locations
  Clone ID: MRT4577_135598C.1
acacaccagnacaccacacacnttccgggccgancccancccggggcagccaccggccnccgcncgccgngcnncggcggccnccgccaccaccgccggcanggcngcgcgccgccccaacnncgccgncgaggagnccncccgcggcanccgcncgggggagnccccggccgcggcgcnccgccgganccccgcgaggcggggggcgcaccaggcgcccngcngcnacgacgcgcncggcgcgcgccncgncgagcgcgcggggnnnccgancgggnncaagggcggnnncngngnnncngccgcgcgacnnggcnngccngangnnggccncannnccaaaggagaaanggnagancaagggcgncncaacaangaagcngnnncaancccagngannggnganggagacaanggnnacggaaacccnangaanancaagagaaccanaaaagg

SEQ ID NO: 39032 - DNA, 277 bp, Zea mays
  Clone ID: MRT4577_135599C.1
aatgatgcaaatagtcagctgcccgtatgtaaagacagtcgctaccaccaagaccggtgtattaccaggaatggcccctcctatagtacccatgatacatccccaggttgctattgcagcttcacctgctaccttagctggagccaccgcagtttctgagtggactgaatataaaacagcagatgggacgacgtactattataataatagaacacttgaatcaacgtgggaaaagccccaagaactgaagacaaaaaaaaaaaagggggggcccccg

SEQ ID NO: 39033 - DNA, 434 bp, Zea mays
  Clone ID: MRT4577_13559C.1
attcggctcgagcctgggcgcgatggcaattttaatggccgttgagcagagcttgcccagggtgggaatgatcccgcctgctggggactactaactccgggctaatagatttgggaccatggcggtaatctggctgtttggcagttacgccaattcattcatacagagttctggtgccttagaaggttattgcaacggtcaactggctgattccaaactgcctgagcagaggtttcctcgtgaacttgaactacaggagctcataggcagtaggataccgcattctaagatggtagaaaatggggaaaaagacctggtgctagaaaaagaccaggtcttagatgatgttgacgccgattatgccatgagagactaggttaccctgtgcgtatgtgactaaatagacagaactggagaagtttccagcttaattg

SEQ ID NO: 39034 - DNA, 772 bp, Zea mays
  Clone ID: MRT4577_1355C.1
cttactcttccgcccacgcgtccgcccacgcgtccgcccacgcttccgcaccctcgaggccggccgggacttggcattctggcctgttcttaattattgccaggacaggagaaacaaacaaagatgaggcctcagctgatactcgtcggcactctggctgttctcgccatcctcgcagctctcggcgaaggctcgtcgtcctggccgtgctgcaacaactgcggtgcttgcaacaggaagcagccgccggagtgccagtgcaatgacgtgtcggtcaacgggtgccatccggagtgcatgaactgcgtcaaggtcggtgcaggaattcgtcccggcatgggccccggccccgtcgtcacctaccgctgtgatgacgttctcacaaacttctgccagaacagctgcccggaggcgtagttgctgggtggtggtgtcttcttctgacgccatgcgacgccaccagtttgcttctctccagctccgtcagacaagaaatagataaataaataaatgtcgccggccgctctgttcggtgcttgctcttgttcgtcgtcagagaagaaatagataaataaataaataaatagccatatgcatgtcgtctcacggttaaaaaaaaaaaaaaaaaaattctgaccaaaataaaccaaggcgcaaaagtataactccaaaaaaaaaaaaaaaaaaacggcccctcatccctagcattttttccattctaggggggtttctttacgcttatatggaaaccggggaaaaagtggttcccggg

SEQ ID NO: 39035 - DNA, 331 bp, Zea mays
  unsure (1)..(331): unsure at all n locations
  Clone ID: MRT4577_135600C.1
ttttaatattattgngcaaacgggcgctagtaacaggggttgctttttaaaccaggtgctttgtgctacccgcgtaactgaagttacagagttcatttcattcaaagcacaccttccttgaataacatagcttaaaccacccgaacttggtattgtggactgtgttcatctcatacgtggccctccctactgcgcgcgtagcggattctgttattgtacctaggccaggccgcagccctctgtggcacgggcttgacccttttctgcctctcacgaggcctttgaacaatctcactgtagaccaagcagttcatcttccgagtccttgtac

SEQ ID NO: 39036 - DNA, 276 bp, Zea mays
  Clone ID: MRT4577_135601C.1
aaaaaaaaaaaaaaaaaaaaaaaaggggggataaaaaaaaaaagaaaaaaccccacgcttccgttcgccgtggttttctgcggttctgccgtttacgcctacaatttggcctttttcctttgcaggtttaagctccaccttcaacacatgggtagggagaagtcccaactcaacattgaggacattggccactttaactttggaaagtggaacaccaccggccacctgttctacaatcttgaaggcatttacaaccgcgaaatatataggtttgat

SEQ ID NO: 39037 - DNA, 335 bp, Zea mays
  Clone ID: MRT4577_135602C.1
tcccaatcgacgactcatacaaccactcattctcccactcatcctaaataaaataaaaaaaaaaaaaaaaaataaaaaaaaagcagaatattataaaaatttagaccactaataaataataaaaacaaaaaaaacaataaaaaaaattaaaaacataataaaatttaaatccccccttttacacaatccaacttttacttcatcattcattctaattctaacattttaaatatttctacctaattaaatatatttatccatccttttccattatcttaatttaaaaaaccttttcattccccatcctaaattctcttaataacaaacctttttat

SEQ ID NO: 39038 - DNA, 869 bp, Zea mays
  Clone ID: MRT4577_135603C.1
gtcatttgggctggtaagcatgtgctcttcgttcttttatacattgggctaatttgcttgcattagctgtagttgacaaggcagattgcaaaaggcttctgctattcatctgtagccatatgtgttcctgggagcttgaacatgttaggtttccatacacccattcgagtatgaaaaacttggtattgtagtggagcagccttatttttttcaagtcatcatttttttctttgaatgataaacatatcatcttcccaggtacttagagggtaggtggtgtattggcaatgtcccgtgcatttggcaatcgtttactgaagccatatgtggtggcagaacctgaaattcaggaagaacaggtcagtggtgggctggaatgcctggttcttgctagtgatgggctttgggatgttgtggaaaatgaggaagctgttttccttgggagatcggaggacacgccagagtctgcagctaggaaattgacagagattgcttactctcgcggcagcgctgacaatatcacatgcatcgtggtccaatttcaccatgacaaaaccggatgagccgtatggctgccaatttcagttgtaccctgcttcagtctattattatcctgcaagctgggtggtgggcttctcccagatttaccctgcttcatgctattattatcctgcaagccgggcggtggggtttctcagatctatcgctcatgtagcaactttcaagcactcgtccattgattcttttgttgtcttgtaggaaacatttgttccgacaggtgtagtagacacttttaaactgataattcaataaacgtatgtttacgattactgtttagtggaaataaacgggggttttcattttgcctt

SEQ ID NO: 39039 - DNA, 513 bp, Zea mays
  Clone ID: MRT4577_135604C.1
aagagaaaaacaagtatttccatgttatttgcataaagactaaagagaattcaaccaggaaaaatcagaaaggaagggaccagtatattgaattgtgacagaagccaaatagcaaccaccacgtgaatcaactcaaatgtactacaacttggaaatcactaacttattggaaaagctttgattacgcactgcagcttcaataagacttctcgcatcaatccctttctcgtgaaaatatgttttaacaccaaaaataatgttgcaactaaactgaattttaaatttgagcagaagtaacccttcatttgtaagcagctttcactgctttctgagcagcatcatctaaatcttcaggcgttatcaacgccataccactttccttcaaaattctttttccatgatcaacattggtgccttccagacgaactactacgggtacttttagtgcaacctcttttgcagcattcactattccacttgctataacatcacacttcattatacccccaaaaa

SEQ ID NO: 39040 - DNA, 257 bp, Zea mays
  Clone ID: MRT4577_135605C.1
cacagcaccgcgttgggccctgctcatttccacctttatttaccacaaacgaacagggggatcaggcccgcccgtttttatctgttaccggggctggccccaaacacctcttcaattttggggggggggttccgggtactccaaacttggcctttgggccttgggtcgaactctttaaatccttgccacaagggcttgttgccttgccccctttttctggccccccccctgctgggcctggtttgcgggtcgccttc

SEQ ID NO: 39041 - DNA, 463 bp, Zea mays
  Clone ID: MRT4577_135606C.1
gtcgatacaccattacctcaatctactcgagagcgcataacaacacgatcgacaccatgagggtgttgatcgttgccctcgctgtcctggctgttgttgcaagcagccacctccacgcatacaatcagtggatagtgctgacagccaccgccgtctgctgatatagcggcggcagtgcatttgccacctatccattacctgacagctcaggaggatatcccaccgacggtccaactgccatcaccagtacacctgccaccgccatatcatgtatcgccacaggcatatttagcgcctccaccatgccaatgaattactgaaccgcaactacctcagcattatctacagacacacaaatgcgcgtgcgaacagaagcatgcaagctcagcgccagctgcaagaaacctgtggattcaacagaacccatagcctgaaccatgctatctagttgctgacgcatcag

SEQ ID NO: 39042 - DNA, 179 bp, Zea mays
  unsure (1)..(179): unsure at all n locations
  Clone ID: MRT4577_135607C.1
tttgcagcgtcccggcgcgcggccggccattgttccctaaggacccatcgagcgaccgatctttcccttggaccgcgacctcaggtcagtctgtactacccactgtgtttaagcatataaataagcgcatgagaagaaacttacnaggttttccctagtaacaaccgagctaacctgtt

SEQ ID NO: 39043 - DNA, 808 bp, Zea mays
  Clone ID: MRT4577_135608C.1
tgggaccctcgggccgccgggctactctacgcacacactccacagtgccactcgtctcgctcgcgcagcagacagcatgggttcgtcggcggcgcttcagccgaagcagctgtaccagctcgtggtgaacaacttcgtcgccgtgctcgctgcgccacggcgatactgtacgtcctgctgcggccccgggccgtgtacctggtggactacgcctgcttccgcacgcggcccaactgccgcgtccccttcgccaccttcctggagcacgcgaagctggtgacgttcgtggagggggcctccatcgacgagcgcagcgtccggttcatgacgcggctgctggagcggtccggcctcggcgaggagacctgcctgcccccggcccaccactacatcccgccgtaccggaacatggaggcctcgcgcgcggaggtggagctcgtcatcttctcggccatcgacgacctgctcgcgaagacgggcatcagccccagcgccatcgacatcctggtggtgaactgcagcctcttcgcgcccgtcccgtccttcacggacatggtgatcaacaggtacgggatgcggccggacgtccgcaatgtgcacctgtccgggatggggtgcagcgccgggctcatctccgtggggctggcgcgcaacctgctgcaggtggcgggccggggcgcgcacgcgctggtggtgtcgacggagaccatcacccccaactactacgtgggcaaggagcgcgccatgctcctgcccaactggctctttcgcatcggcggcgccgccgtgctgctgtccacgtcccggt

SEQ ID NO: 39044 - DNA, 133 bp, Zea mays
  Clone ID: MRT4577_135609C.1
gtgaagagcgagagatcatagaaagaatagaacgagttaagaaggctcgagaagagcatgagagagcccagagggaggaagaagccagacgacagtcaggagctcagtatggctcttttccaggtggctttcc

SEQ ID NO: 39045 - DNA, 1092 bp, Zea mays
  Clone ID: MRT4577_13560C.1
actcctatgggcgattgggaccctcgaggccggccggggccgtgctcacctgaaactgcctgtcacgccggcgcccccaacaaccccggcacccgcgctaggggtagccttcggctaccctgcctcctcgttcggccccgacgctagccccagcatctcctcccgtgacgcctccctcgatctcctgtcccgttccccagccatctccaatcatggatcctgcgatggagatccccatgtcaccgccaacgccgagatccatcggccagacgcagaccgtagccccgacctccctccatcgccaagcgttgcgttcagcgtcgccccatctgtcctcgcccatggctggcatgggggtttgattcccagcgtacgactccagcccgacgtggtacctcgaccctgcctgagatgtggtgaaggatccattcacctgtttgttttattttgactgaggtattgccaggatggattcaacggggtagttctgaattcgtttgatctcaagctatttcgttcgcctgtttgttttatttcgttcgatctcaagctattcggacggtgctcgatctgaattcccaagtacaggagcgtcaaacgattcactcccaccgaatttgttttgtgtcctcgtagacctgtgcataaattgtagtaccccatttcgacggcagtcaccattctccacaccttgtcgtctgcataagccggacgattgttgggtggtgggaatggaaccgcgagaagcatagaagacatttgatcgtcggcgcgtctatgcgatagtcctgccattgcaaacatactacagatgattaactgacaaggtgatgatgaacgagcagcggccatggaggcaacataggacagggctcggcgacagcgactttctcttctggcatggttccgctgagatgaagtggttcaatggcttggtgttcatctacatttattataccattttttgcaagctatgtggagagccaaattgtacagcaaatgtgaagaaatatatgatcggtccttcaaaacctatgagtattacaatgaagagaatttgtgactgcgaaaaaaaaaaaaaaaaaagcggcc

SEQ ID NO: 39046 - DNA, 272 bp, Zea mays
  Clone ID: MRT4577_135610C.1
gcccagaaaggccacatgattatctaattcagctcccaaacccagagcatctgtggactcagacccaagccttggatggctatgggtactgccatcatttctggaatattaggatgctgtgtgggggtcatttagctctaataaacatcccattaattgccaagcctcatatattctccagctagtgaggagagagactgaaggctaaaaggacttttcatttttctgacggagtctgttcaggtctgctggctgcctacagtacgctggga

SEQ ID NO: 39047 - DNA, 519 bp, Zea mays
  Clone ID: MRT4577_135611C.1
atcgatcgcatccctcccatcgcaccgcagcataagcacgcgcgccctgtggactcccaggtcacacaccactcctgccccccctcccccgatctccgccccgatcccgcaccagcgcagcagcaagtcatggcgaccgcgtacaacctgaggtcccgcgacgagccggacgacttcgacgagttcgactccacgccctacggcggcggctacgacctcttcgtcactttcggccgcccgctcccgccctccgacgagacctgctacccctgctccgccccctccacctcctacgacgcgccccactacgccgccgaggagccctccccctacgcccaccaccagaagccccagcccgcctacggcttccgcccccagaacgagcagccctcctacggccgcgaggacgacgactccggctacggatccaagcccaagccccagcccgcatacggcttccgcccccaggcggaggagcagcgcccgtcctacggtggcgggggcgaggaggacgactcc

SEQ ID NO: 39048 - DNA, 643 bp, Zea mays
  unsure (1)..(643): unsure at all n locations
  Clone ID: MRT4577_135612C.1
ggtagagctcttgcatgttggtttcaaaaatatcacttgtatttacaataccggtggattcgttaaatggatcagaacccacatgactaactacccaatgactagtagcattaacatgaaagcctgatcctccaagatcagtggagtcttcagagaacataattggcattagatctgaatactccacttgcttgccaccacagtttatagcgaaggaagttgcacgattagttaaattgtttatgttgcattcgttcatgcgaaggcagttcaggattgtaagattttcaatgtaatttgaggtcttatatgaaagcaagagtcctcctattgatcctgataagttgtttgatgtcaaatccaagtattttagcttgggcaagtttgggggagtattaggaacctgacctgtaagaccacattttctcagagataacactgaaaggtttgcccacgctcctatgacatttaaataagaatggttgcccgcaagatccccaagcatcaggacttcaagattgctcagattagagaaattttttggaataggtccttgaagattcgtcccattattcgcaagtctgtgagatggnttaagttctganataaatgccggaaaggccctacatgtaattatcaaaca

SEQ ID NO: 39049 - DNA, 408 bp, Zea mays
  Clone ID: MRT4577_135613C.1
gctccgaactagcacatacaaagcacagtgtgtccaaccatggcaggcaacatattttgttgcctagctagtggctgtctgtttgtgctggtccgtaaccattctctacaatgctacaagctcgtatgctacctttcttcctcatacctgtaccagcggagtcttagtatgtgaaaacccaattcttaatccctacatgatccaacaagcaatcgcagccggcatcttacctttatcacactagctccttcaacaaccgacagtcctattacagtagacacctttggtgcattggttgtgcacaaaacataaaagctcatcaactaccacaacttgcgctaggaaaccttgctgcctactctcatcaacaacaatttcttgcattcaaccaactggctgcattgaact

SEQ ID NO: 39050 - DNA, 2003 bp, Zea mays
  Clone ID: MRT4577_135614C.1
cacgggctcgcggcgcggcgatgctggacccgtgcagggcgggcgtctggtcagcctcgtccggaataaacgcgtccgtcgaatgcaactgcctcccctcagggtgtgccgcatcacaagcctaaatgtgagtgggcacgggaacatctcggcgatcccgcgggagctattcaaacatacttgcgaagtctctctggatttaagtaataacaacttgagtggttcgatacccccggaagttattaatctttccaaactggaaacatgctaggcacttcaataataatcctctaagtggagcttttcctcatgaactgtcgcttttaaggaatctacggtccctgtggatgtttgataattacattgtagggccttttccggcatttattcagaacttaaccaatctcacagacttgcgaatatatgggacgaatcttcaactacctattccaaaaaacctctctaatctgagcaatcttgaagtcctgatgcttggggatcttgcgggcaaccattcttatttaaatgtcataggagcgtgggcaaacctttcagtgttatctcgcagaaaatgtggtcttacaggtcaggttcctaatactcccccaaacttgcccaagctaaaatacttggatttgacatcaaacacctgatcaggatcaataggaggactcttgcggccgtataagacctcaaattacatatatgtaggtggaaacaacttaagtggacctgtgccttctgaaattgttcaatcatcagtttccttggatgtttcgtataactattatgttgacggatccctttctaacaatccttctggtcagaagcagttcataaattatcttggaacatcaattgatgcaagtggaagaatcaacagtggaaatcttacaatcctgaactgccttcgcatgaacgaatgcaacataaataatttaactaatcgtgcaacttccttcgctataaactgtggtggcaagcaagtggagtattcagatctaatgccaattatgttctctgaagactccactgatcttggaggatcaggctttcatgttaatgctactagtcattgggtagttagtcatgtgggttctgatccatttaacgaatccaccggtattgtaaatacaagtgatatttttgaaaccaacatgcaagagctctaccaaacagcaagaacttcaacaagttcgttgtggtactatgtggtaggtttagctaacgggaactacacagtccaactcttctttgcagagatagtcataactcatggacctggaaagcgcttatttgacattgatattcaggaccagaatatcaggaaggactttgacattactaaggaagcagggggttccagaaaagccactaacataacctacgaagtgactgttgataactccatactggcaatacatctgtattggagtggacgcggcacctgttgtattccatatgaaggagcttacgggccactagtttcagcaataaaagttacccattcccaagacccgaaaaccagtcccccacaagcaccacattctgattctgcccgagatgatgtaaagcgaagaggagtggttgcaggcattgcagcactttccatagctgctgcggtgatatcttcatctgttgtctacctatggtggaaatgggtttcacttgtgaagcgcccaatggcatgagttcgtcagatgtttgcatatagttgattctcccacaaatttccatgtcatgcgaaggactctatgtatttgtcttttagcgttggctgctagcaactagccaactagcatagccaagatgactgatgtacagttgacgttgcgatcacggttttaggtctcaagttttgtttcacgattattgtaacctaggaaattatctaagacattctgctgctaatatgttgtttgtttgttgatcaaaaaaaaaaaaaaaaaaaaaaaaaatattgtttgtttgtcgatcggaaaaaaaaaaaaaaaaaagcggcc

SEQ ID NO: 39051 - DNA, 408 bp, Zea mays
  Clone ID: MRT4577_135615C.1
aaaacccaacaatatcggggaccacaggacctttattggacattggcataggggggcgatgaccgaccgggattattttaataataaaggggccgaaagataattgatcgagcaggcaattgctaggagggagcccggtggtcaaatcaaataaaagggggccccccataacccaatcttggggacagaaatgctggagccctgcttgtttgggtgctgggaagagccaaacaccgggcaaaaaacctgcatgctgagctcggcagggttcccggggccatccctatggggaagggacctttttttgacgacacctttcgccataaaaaactctccggtcccgccggaaattgcccattcatttgatccatccggcaccactcctttggtaaggagcggggagccctt

SEQ ID NO: 39052 - DNA, 567 bp, Zea mays
  unsure (1)..(567): unsure at all n locations
  Clone ID: MRT4577_135616C.1
atggtccgattgtgnaaatccttctttgggggggggggggggggggtaggtttaaagattaaattcgggttatatcttgnacnanaaacgtagccgtggttatactaactataggtaccgtgcttgtggcgtgtactgtgtagttgcttggtntacctagtaccgaaagatattataaattaaacgatganactagtatganaggtaattactgtgtncanatganttatgcctnagataggatctgncaaaatagnattgtagggatatattgaaatgatgtcctcaaactgttacttcattaatatataaatacataggattctacnatactattcccaacccatctgttggttgtggtttatatcgtcgttaaacaccagttgtcgtggtagtttctgccggtcttactcttactgttgtccnacatcgaccacattttgctagtacttgtattattgttcttctcgntcgtcaccgagatggccttggctgccctggctccttcntccgcttttctcatattgttcttggccttcttactcacgttttctnactactccgcct

SEQ ID NO: 39053 - DNA, 681 bp, Zea mays
  Clone ID: MRT4577_135617C.1
atatacgtcggaggaggtgccgatacgagggactgaggcgtcgtccctcgtattccttccgtctctccacacagagagacctgccgtgcgccgactccgatacgcgcctgcggatggaaaatcactatctagctcggtatgatcaaatcttctagtatagacagcaaggatgcctctccatctacctccggaaacggtgagaattaatggaaaagataacagcaagactcaatagaagccttcgagagataccccattagctctccggggcgcgcttgtcacattgagctcataccttgagaaaggcaggggctacacaatcttcccctctaccaactctgccatctttgatgtcttctactactgcaagtcaactcctgcattctagatgcccgctgtcatctcctggaacaaagaggacgatgtcttcccatatatgaccgaagaagccgcagacaacttcgactctgtctatatcaaatcccacagtcactgtaaataaagggagatgacgtggatgctgctatcgtaacactgagtatataccactgtctgtagtatgatgatgacgtactgcttctcaggatacacagaaacccccagctctcgagtggttgtatatcgcctgggacatcgagtgacttcactgtcggagcctttggtcattgctctttgccatgc

SEQ ID NO: 39054 - DNA, 485 bp, Zea mays
  Clone ID: MRT4577_135618C.1
cacttgtctgttggtttggttgttcatccttttgggtcttgaatgtctgttcatcaactgttttatttataatattgttttgacttgtcaacacaccacattctttgcacttagtgacatcacttgtagttgacattccaaggtctgacatctgtatgggtatggaagaatggaagggactaaagggttgagcaaagatagattatagagagcagagaaaacccatctatctaaggtttttcctagctaattgatgccattgtggacaaaagtcacacaatacaccaacaatcattacaaagaagcaaatcaaacatagtcacaaagataactaacatgaactcaaacatatcagcacaacataactcgatgttattcattcaatcaaaaggcaatcttgcctagggaaaaacaatttcttatagtttttttcgaaaggcgggacaaggttaggaataaggaagggattataaaattaaggaatc

SEQ ID NO: 39055 - DNA, 769 bp, Zea mays
  Clone ID: MRT4577_135619C.1
tggacgcctgcggtaccggtccggaattcccgggtcgacccacgcgtccgggctggtgtggccttaagccctccgccaccatgagcgggaccttagcgaagatcgcggagatcgaagccgagatggctcggactcagaagaacaaagccacagctcatcaccttggcctgcttaaggctcgccttgctaaacttcgaagagaactcatcactcctaaaggtggcggcggcggggggccaggagaaggttttgatgtggccaagacaggtgatgctcgaattgggtttgtgggttttccatctgtggggaaatcaactctgctaagtaacttagcaggagtgtattctgaagtggcagcctatgaattcactacattgaccacagtgcctggtgtcatcagatataaaggtgccaagatccagctcctggatctcccgggtattattgaaggtgccaaggatgggaaaggtagaggtcgtcaagtcattgcagtggcccgaacgtgtaatttgattttgattgttctggatgtcctaaaacccttgggacataagaagataattgaaaatgagttggaaggctttgggattcgcttgaacagcaaaccccccaacattggctttaagaagaaagacaagggaggcattaacctcacagccacttgtcctcagagtgaactggatgctgaaacagtgaagagcattctggctgaatataagattcataatgctgatgtgactttgcgtagtgatgccacagctgacgacct

SEQ ID NO: 39056 - DNA, 3711 bp, Zea mays
  Clone ID: MRT4577_13561C.1
gatcttctctcttccccgttcccccgtcgcctcggcattccgccgccgactccgacgagggggccccacctgtcatcctcctcccccgccgccgttcgccggacggcagcgcgacgaggagccgtttaccccttcctgccccgcggcatccgcgttcgcgttgtgcgccgctgatccgagcggaccgcttcccgcgctgatcgctttctccgttcgacccctagggtttcggcgttcccctgtctccccgcgcccccttggaggcagcaccagagatctcgatcttccgcggcctcggtcgcgctacgcagttgaccccgctcgatttatcaccggggaattagagaggcgttttccgggggagtttcttcgcggggaagaggggccatggcctcgagtctgctcaccacggacaggagatggggtgctactcctgcaaggaaatctggtatgactgttctaggaaaagtcccaaaacctattaatttaccaagccagaggttggaaaacaatggtcttgatcccaatctagaactggttccaaagggcacccacacctggggcagcaaagcaccatccacaacaccaaatgcatggagttcctcgtcaattctgtctaccaagaacgatggaagttccagttcatctagccacttcaatggtcgaccgtcctctggcggaggctcaaggccatcaacagctggaagtgaaccacttggttcacccaatgcttggggtccaaattctcgcccatcttcagcatcaggcacatttccatcatctcatctaccaatggccacaaatcgtccccgaagtgcggaaacaagacccggaagttcacaactttctcgatttgcggataatgcttcagataatgtgaaagcgtcgataaggactattgatagaccggggtcttcatcacatgggcctgggttcacactaagtactggtgatttcccaacacttggctctgaagcaaatagtcaacgaggccatagttcgaaagggcgcccaatttctagttcgggtaaagaggtgtcgcaaggtgaacaagtgaagagcctaacaactggaaatggtgaattaatttcacaatccaataatcaacctgttgatatcatgaagacagagcagcatgcacacactggaggtgctcctgtcctcgccacaaatgtgccaaatgaaggcctgcaaccgcggccatatccaccaaattttcctatgcctcatccgcagtttgattcatggcgtgcacctcctggtcacccccctgagggaatgtggcatagaggactagtgccaggtgggccatacagaccagttggcccccctggtagttttcctgtcgaaccatttggttattatggtcagttcccacccaactctgaagttgcagcaaggcagggcccagggcatggtggatatcaggctaaaaatggagatgtgtatcatcctacgcctcctaattcctatattatgaatcagcctgttattccagtcagaccagtttatcagggtccagtgccgtatgatgggtattatggccctcgagcacatttcaataatgccaatgttagagatcctcattttgttggaggtcctggaatattaaatcaattccctaatcagaatgacaggtttcaccctggacatcctcaaaacagaccaggcagacatgaaacagttccaagggagcagctggaatctgataaaatacatgtgtttcatcgaggaaaccctgggagtttgcatgataattctgatcgtctaggaggttcccgtgaatttgaaaggaatgcgcagccagcatcgccacttcttccacatcctgatggaaaccggactgatgtgaacatgaggacagatacaagggacacctttagtgaaagtgaaagaaccagggtacttacaaaatcggtgcctaatcagagaggttcggttggtacagaacatttgtctgtttatgacaatgcacattcccatcacagagaaactggcgatggcactctgcgcaagaaattcaaggaggatggttcagctgcactgcatcctgtaattaagaagaatgcagctttaatagagcgtcctgagagtttgaacaacaaagccagaaatgttgatgcacgtaatctcccagaatcagcttcgtccaaggaattcaataagcataaaaaaagcactgatgtttcatctaatgatgtcatgggtatggcatgcaaatctgacccggcagtttctgtttcctgtgtttctcctgcggtgcagagactaccaaacgtgcccatcaagggtacaattcttggtccggcacatccacagttaactgaatttagcaaagctgaaaagcttggtgattcaattagcgatcatgtacataggaaaagtgattcttcaagaaacagttaccatggtccttctaaagataggccagctaataaattcggaagtcatggacggggagaaagttccacaactgatctgaggaataatatcgatcatggccaacaacctgagattgcttcgcagctgcaacctgcgattgtacctgatgatatgccagcttcactcgattatgagtctcagcgtgcaaaaatgaaggagttggctgcagaacgtgcaaaaaagttgaaagctgaggaagaggaacggataaagaaccaaaaagcaaaagcgctcgcaaagttggaagaattgaacaggcgatcatcagtacttcagaagaaatcaaatgatataaaagtagaaacttatgatgcacatgataagcaacatgctggacttgatgtgactgctaaacttgacacttcaactgaaccacatgatgttattgcgcctgataggcttactgatcttctgcctcctaatgatcccaatcatactatggttcatatacaggcccagtctacagcacaatcacatgctttagatggtggcaaagaccctgatgctcatgcaacctcgtctttggtcaagaacactcacagcaacatggagcctgttgtgcagaagagtatctcgcagttgcatgacatcactgtggtaaaggccaagcaagggtacaggaaaagacatgtgtcagaagagaaaatttctgatgagaaggcaagtgcttcaataaccactagaaatattacgaaaaatgttgatgttctcatcgacacagtgacggctgttgttgcaccacatgatgatccacctactcagaacaagaagggaacccgacatttgagaagtaagaaaaagttagatgatgctccagttacttctaaacatccacctgtggtgttgaatgagccgaatacagtgaaagtctctaccgagccaaagacacatactggtggtgttatcatcagcagctctattgttcccactgaaggtactattgtaactgttggaagtataactgttggtggaatttcacttaaacctatgaatcaggagcgggttaaatcaccagatggaacaaataatactgaaagtagccaaccaagacctcagcaaacgagaaaatctggaaagcatcagcatgttcttcggcctgttgagaagccacatgggaatgatggtatcttgtgtgcaccagttaagccaccagtgccgaatgagcactctgatggagccatgccgactgcagcagtagctgacctcactaaaccagtagggaaagccataaatgatggggagaatgtgacaagaacaaagagggcgcag

SEQ ID NO: 39057 - DNA, 818 bp, Zea mays
  unsure (1)..(818): unsure at all n locations
  Clone ID: MRT4577_135620C.1
ccctcgaggcctgccgggcaccagcaccagcacggcgaccaaccctctccaacccgactagtcggactcgcagctccgccccaagtccaggtcgaagcatggaagtcgcggcggcgtcggcgaggcccgtcctgcgcgtggctgccatctgcggctccctccgcaaggcctccttcaaccgcggcctcctccgcgccgccgcggaggtgtgcgaggactccatcccggggctccgcatcgacgagctcgacatctccgacctgcccatcatcaacaccgacctcgagaccggcagcggcagcagcaccgtcttcccgcccgccgtcgaggccttccgcgccaaggtctgccaggccgactgcttcctcttcggcgcgcccgagtacaactactccatcgccagtgcatacagcagcatggatggatgacgatctgatgaacaacttcacaaggcagctcttatgttggtgtggagtgtggacagatggaagcttgtcgcgccaaagcaggaagaggaggtagcaccggtttccgctatggtatggacgaaacaagtatgggatgacagaacagcaattcctagggggagccaaatgaacagcaattcataagggctacagtgtttccaggtgtccacaagctgtacatgattgtggtttgtcattgactcttggatctggtgtacccgctgctggaattatactctcctatgcattntgtgaaagactgactggatgaagccttcttagtttatatactggcatcatgtatacaaaaaaaaaaaaaaaaagcggccggcttttttttttttttttctt

SEQ ID NO: 39058 - DNA, 491 bp, Zea mays
  Clone ID: MRT4577_135621C.1
ggtctcggggggcgccttttttttttttttttttttagtatcatgtgggccatctctaccagggctaactgattaatgcagtatagactctcgaatgctccactgggtgaaccatcaacctaggacagtctgaagtatgagaagacacagcaacgcgcgctgaaggaggaaccctaagatgaagccacgaagctgaccgtctgcgagcctgaggtgacgatgttcttgtcgagcttgacggggaggacgaggcccacctaggtttggccctactggaaggcgctagggggctgtctgacgtagcggtcgagctaggtctgcttggactggatgttcttgaagatgagccccatgaaggagcgcatgatggacatccccttgggccaaatgccaatgtccggatgcaactgctttagcaccttgtagacccagagcttgagcgcctccacgctctccttaggcgtattctttccctgtttatggccggcctc

SEQ ID NO: 39059 - DNA, 148 bp, Zea mays
  Clone ID: MRT4577_135622C.1
gaagtgtctctttctccatctcgcacgtcgctcaccgggaaagctacgctacgactaatcatgcattccgtcaccggccgcgccccggtagcatccctgcgcccgtagtggtcggctgtcttccttggccactctagccgtctcgtcc

SEQ ID NO: 39060 - DNA, 650 bp, Zea mays
  unsure (1)..(650): unsure at all n locations
  Clone ID: MRT4577_135623C.1
aattcggcacgaggtctacttccacaccttccccctccggccctccactccgcatcccgccccagtgtcccctccccctccctccacccccgcacccgcgatgccgccggacagagaagacgccgcgggcgcgggcgcggacgtcgcggccgacgagctgcagagcgtgagcttcggctggtgctcggaccgctcgcgctcgcgctcggcctccacggcgtccacggccacggcgtcctgctccacgtcctcgtcggggccgctacaccagcacctctcgctcccggccccgcgccgcaacccctccccctcccccgcgccaaccccaaccctgcccacgcagatcccgcgcctcggcgccgtctcgctctccgacatccgcttcctgcgccggctcggcgccggcgacatcggcagcgtgtacctggccgaggtccgccgccccacccccaccgncggggccgccggcaaggagaagcacacctcgactttggcggcggcggcggtggtggtggccgccaaggtgatggaccgcaaggagctggaggggcgaaacaaggagggccgcgcgcgcacggagcgcgagatcctcgaggccgtcgaccacccattcctgccccgcctctacggcgtcgccgagggcgaccgat

SEQ ID NO: 39061 - DNA, 2422 bp, Zea mays
  Clone ID: MRT4577_135624C.1
aggtaataaggggcgactgaaaatggctccaacgaccgtcaccaaggacgacagtggctacagcgacgagcgccggcgcgagctgcaggcgttcgactgacacgaatctgggggtgaaaggcctggtggactgcggcgtcaagtccatcccgtgcatattacaccacccccctaaagccctgaccgacatactttctccgtggcctcgggccgggccgggtgttctctattggttgtcaccctgcctctgacgaaaactctcctctgactccgctccacccccttctctcacttgtctatcggcggccgtcacctccgctgggctgctggcctccccactttgcagttgctgcacaggcaagacacggaggcaggcaccacgagtccacgacgcccgctcgcgcgctccgtgaatcccctcgtgactcgtgagggctcgaggcccgacgggaggacgaggaggcaagaaccctagccccggcgccggcggcccgtaaggctgctgagtgaaaatgggagtggcaggtcacaacgatccattgttaggtgaaacgacatgtgggtctttgctgcagcaacttcagctgatatgggatgaggttggcgaaagtgatgaagatcgtgacaagatgttacttcagctagagcaagagtgcttagatgtttataggagaaaggttgatcaggcttctagctccaggtcatgtctcctccaacagctttccaactccaaatcggaactgactagactcctttctgcattaggagagtcatctatttctggtgctcctgacaagacatctggtacaatcaaggagcaactagcagctatatcaccatctttagagacactccgcaggaaaaaagagagtagggtgaaagagtttgctcatgtacaacttcagattcagatacttcgtgatgaaattgctggggatctacatattggtgaacagttggaaacaccccatgttaatgcggatgatctttcagtgaggagattaaatgaatatctttctgaactacaagccctgcaaaaggaaaagagtactaggctctcaaggattcttgaatccgtgagttcagtgcacgatctctgttctgtacttggcatggattttgtgggcactgttactaaagttcatccaagtcttgatgactctgttggtgtccaatccaagagcattagtggcgaaacaatatccaagctgtctaaaatggtgattgtacttgaagaagaaaaatcgaagaggtttgcaaagattcaagctctagcttcccagctatctgatctttggaacttaatggattctcctgtggaggaacagcaaccttttcgtcacgtaacatgcataatgtcctcaacattggatgatgtgatagttccaggagctctggctcttgatgtaattcagcaggcggaactcgaagttgaaaggcttgatcagctaaaagctagtaggatgaaggatattgcattcaagaaacagactgaacttgaagatatatatgcccgggctcatgttgcagtagattctagtgctgcaagagataggataatgtctattattgagtccagtagtttcgagccttcagaactactggctgatatggagaaccagatacttaaagcaaatgaggagtccttaagcagaaaggacatattggagagggttgataggtggatgtcagcatgtgaagaagaaagctggcttgaagactacagccgggacgataacaggtacagtgcaactcggggtgcacatctgaatctgaagcgtgcagaaaaggcccgtgttttggtcaataaaattccggctattgttgacacactgcttgcaaagacccgggcatgggaacaagagcatggcgtggccttcacctacgacggcgtccctcttcttgcgatgctggacgaatacaaaatcctgaggcaggagaaggaagacgagaagcgacgaatgagggaccagaaaaagatgaacgaacagctagccgccgaacaggagaagctgttcgggtcaaaaccgagccccgcgcggccgcagtcgtcctcgaggaaggtggctggcgcacggaccaacggcggtggcacgccagctcgcaggctgtcggccctccagagcggcggcaggaccgctagccgggatgggaggagggatgcgagcaggcccgtggcccccgtgaactacgtcgccatcgccaaggaggacgtggcctcgcaggcgtccagcaaccacactgggccgtccaccccctgaccggccgtgccagcagtaactgaactgttgtggcggtgcttagatatatatataccagtgcagtgcagtagccagagctgattgtagatcggataatggaaaaaaacaaacgaagctggatatggtatcacaaaaaaaaaaaaaaaaaggcccctagggcc

SEQ ID NO: 39062 - DNA, 654 bp, Zea mays
  Clone ID: MRT4577_135625C.1
ttttttttttttttctcgttttctagcgtccactgattcacctcgcgccagtgtccgcgagccggcggtgcgcgctgcagtagccaaggcgcgtacgcgagcaaccatgagcctgcgacaccatccccgcagcaaggttgctttcaaaccatcggaatgcgatggagatgacgccgacatcacagtggggactctgtcatcgcagccgggccgtcgcgcggtgccccgggcgctgggctggcccgcggctcgggcacgccccgtgtgtcggcctgcgtctgaccctgctcctgtgcctgcccgcgcggcgcctccccgcgatctgcgcccgagagcgcccctgctccagcccgcgcggcggggccccgcgctgacggcccgcgtgcgccccgccctcctcgcgctctgctcgggcttgcacggtccgcgtgcccgtcttgcgctctcctgaggctgtgcgcgtgctattagggtccgggggcccctctaattaattcaaaagaattttagggtaaaaataggaacggaggggtactctgtctaaacttgcgtatatcaatgcagtagtactcaatatgatagcgataattaaatatattttttgatcttcgtattaaacatatattgtaaacattgaatacgttaatttccatg

SEQ ID NO: 39063 - DNA, 291 bp, Zea mays
  Clone ID: MRT4577_135626C.1
tcgagggaagcggccttcctatgtgtagccaacaaggccttctggcccacgtttggcattcatgggggccttctaaagctacgcccagggtgaccttcttctctacaacttctcctatataagcgagctgcatgagctgccccggccttcaacaaatgctggttaggttggatattctgtgccctctggtttaaaggcggccgatgtctactgctgtatccaccacccgtgtcacacccccatcacatacggcgtttccactcccatgaccacctgtttccatgactctta

SEQ ID NO: 39064 - DNA, 197 bp, Zea mays
  unsure (1)..(197): unsure at all n locations
  Clone ID: MRT4577_135627C.1
ggggggnnnttggggggaaagtaaccagacaatggcttgggttccccgcccccgtcaacagaaaaccccctttccacagggaacagaacaacccgggtgacaaattggcaggtccccccacttgtcaattaaaggggcccatgcccaaaaaatgcctttttaataaagggggcccatgcttcgggtgacagttaccc

SEQ ID NO: 39065 - DNA, 259 bp, Zea mays
  unsure (1)..(259): unsure at all n locations
  Clone ID: MRT4577_135628C.1
gcttaantataaggattaaccgcatcgccgagaagtagacagcacaatctgaggatgaacaaccgtcgtagcaaaacccctacagcctatgctcgttataactgagtgcactagctggaccagtactaccccaccctatatggagacgccgccttggtataagggaaagttgattggaacgtacaacgaacgccatattgcttgtctcaccagaggatatcggtatcgacgcgcgcgagcgctacatggtactatttat

SEQ ID NO: 39066 - DNA, 3677 bp, Zea mays
  Clone ID: MRT4577_135629C.1
ggtcgagcatttgtctcttttaaatggtatttcaactctcacgtttctcgtttgggtttttgttttctgtgggcgctattgtttagctatttctatgttgtgattgttttgttttgtcgttggattgtatggatggctgtctaggctgcctgtttcgatggttgtttagttttcaatttgccgttgtcatttatccggcgttccgtttgtttgctccatggcgatcgggctgttgttgggtgttggtgataatcatctcacctatgctctctttctgttaagtcatcgaattatcgtttgtgatttttgttgtaatcttgtggttctcgtttcgcctctccttttcaacttgtgtgtggctggattggttcctatcttgtggaggtagatcgtgacatttgcttgttctcggtgtcacggcgctttattgtcagaatccagtattgagtttatgtcacgtggacctggtttctgtggtttcaggcccaatcttccggtggggtaccaccagaaattgtcacttggacatggatttgatgatttcaggctcaatcgtctcccggtgcggtagcatcagaaaccgatagtgcagttgtagcctgcacaccaggtggatttggagaaccttcggtccattcttatgttaacggctgatctcgcttgtggccttttggttgtttgtcctccttaaacttcagatgcaagaagggtccttgctggttatggagagatcagttgaagggtggaggtttgcttatggttcattcgtcgtttctcattctgattcatcatattgtgcgaagattattaccagacttgctctaagcttgattggaaatgctgctgctcgatctgcaggggcaacataattttggaaatagattggggccttgactggactggagttcgtagtattgtcgagaagatcgtttggatatatttacctatcgcccttcatattattaaatttctatccgttgcagttttaatttcttacattggggtgatggttttctccagcaactcgattaaatggatggattggtggaggcgagtttgatcctgcttctgtttgtgtaatcagtagttcggaattgttcagagttccttgtgtttgttcactaaccatccttctgtcatgttcttcgaaaactaacttcacacataggctccctttaatgtttcgttagtgtatctgcagttttgggagacatcactacagagttcatccccctaaatgcataatggaagtccttgctggtattgtcctcctagatgcaaaaggaaagatcccttggttatgaatagatcggttgaagggtggaggtttgcttatgttccttggttttgatctgctatatggctatttttatgttagcaagtttgatccagcttctgcttgtgcaatcagaacttctgaattgtttagagttccttgtgtttgttcactaaccatcctcctgtcgatgttctttgaaaattaacttcacacataggctcccttaatgcttcgttagtgtctgcagttttgggagatgccactccagagttggtccccctagatgcaaaatggaaggtccttgctggtttgtcctagatgcaaaaggaagatcccttggttatggatagatcggttgaagggtggaggtttgcttacgttccttggttttggtctgatatatggctatttttatgtcaatcacggtggcgtgaagatcgccaccggactaattagaagcttggttgtccttaattggaataatgtagaggcaactgaggtgatgttttggacgtagattgaagctttgaccggactaagttcatgtcatgcagataacatcgttgggatatatgtatctctcactcttctattggcactcttaaatttcttatttcttatatttcggctgatgtttttctccagcaactggattacaacatctggattgtatatggatggattggagcctgagtttggttctgcttctgcatgagcaataataagttctgaactattcaggggtccctttttgttcaaagaacaattctatcctgtcaaatgttagttcactcaggctacctaatgatcggactttatcctatcccacattatttgatgaacgttcatgctgtttgagtgttctaagttctcactaccaaatagatagttaccagagggtggtcctgctgattgcagatctctaggtgggatatttgcatgggcacagaaggaaccagatctattcaaacctacaacgaactttaactctcattgtgtttgttcagtggttctaccttgaagtagataaacttatccaatttacaaaatgctagtatatgaaccatgatgaaaatttggatacttctattttaatctgcacttctgcagtggtagaaggcactggatatgtttgggacgtaggagattcaagctgatatgggtagaactacaacttcgatttaatcgaacttgtttctgctttatcatgctatatgcattaactgaagctttaattcttgtgctgctgtcatttctgtgttctgcagatcatttagctcaagtaattggtagtccaacggtcatgatacttgttttggtttgggattagctttatctacatttttgtcctcgcttttacatgtgtttgcagggtaagtttggcaattggaaatccctgtagcgaagaactgatatttaaaactggggcaggttagaaatcattccggttgtgttggttccatcacttgttttcagtgatttcagatctgaatgattggctaacattctgactctccaatgatatcgctggaacagtagtagtagtattagcagcaaggttcgagatgcggacattggaggtggattttccttgcactctggtttttcttctcttcgtgtcggtgttgctattcaagcaccttgcctgtcccgtcttgccctttgtcacttcgtcactggcgtgtttgcgttttccatttcttccttctctgtactctctgtttcgacttcgagctgggatggtttcttctccggctgatctgttctgctgctgttgcggttacgtgctcttgcagatccccttggggcattctgctttcgtgccacgcgggagtgggcatgtgtttggtggcgggattgttggatttgcggtttatttttaaggcaaatcgtctagttatcgtcgatcttgtttcgtcttcgccttctcagcatgtcggttgcaggattggatctgatctgagttcgtcatgacgttgtgtggcgatctgtttgtctgagttcggagataggttagtattctgtcagatccaatggttcattggttttgtcacttggacatggattcggtggtttcaggctcaattgttcatctcctgttgtggtaccatcagaaaccgatagtgcagttgtagcctgcataccagatgcaaggagggtccttgctggttatggaaagatcagttgaagggtggaggtttgcttatggttcattcgtcgtttctcattctgatatcatcatattggtgcaaagattagcaccagacttgctctaagcttgattggaaatgctgctggctagatctgcagaggcaacataattttggaggtagattgaggcgttgactggagtggagtttgtagcatcggcgaggatatcagttggatatatttacct

SEQ ID NO: 39067 - DNA, 329 bp, Zea mays
  Clone ID: MRT4577_13562C.1
ctccatgtaaactactgaaacatatgtattctaattgcgatctgcaaaccaaatgaagtatttttctcggtatggacgcacaatcgactaccaagtagtacatgagaatatgatcatttacacataagagaagtcgcattatactcgacgtatataccacaaatctatggtatgaacataacttggaactgacagcagcatgttgtggcatcaaactccaggcttagaagactgggcagacgccatcacccaagtccacccctttggcagtaggacacttggcaagagggcagtgctctcctgcagtaccccaccaatcgatgctcttg

SEQ ID NO: 39068 - DNA, 221 bp, Zea mays
  Clone ID: MRT4577_135630C.1
cttagcaacccggaaacatggctgtcatttgaagacatgctggacaacccactgaacagcacccaatggatcaatgatccacaaacggggcctgtcatgctgcagatctctagactcttccagacactaactcgcaagcaggtagcgttgttccactcggctatcaggccacagcagcccccaggtgcggacccgagaccgggcagagtggaccgcacctg

SEQ ID NO: 39069 - DNA, 204 bp, Zea mays
  Clone ID: MRT4577_135631C.1
ccgaggtataactatgaagcaatatcagtacggaaagaggagacacaacggacattgttgtattgtgtgttccgccgacctccaagccaagcgattgctcgatggatgtaacacacgcccatcggctcgctatgatgcagatgattatttaccttaaggaggaaatactctgatgaaaaatattctacgggtgcaatcactact

SEQ ID NO: 39070 - DNA, 264 bp, Zea mays
  Clone ID: MRT4577_135632C.1
cacactgagccgcccacttaaaacactattgacaattcatgcttgcttcacgtaccgggttgagtccctgctaatgaaggcatgaccttcccatctggcacgagttaaggctgatacttatgcacttactactggccctagatgcttgttcagtcgtggcgagtgcacgataacataattgagacagcgtgcgagatatattcatttattgttcgacccgctatagatgtattaaagtgggcattgcctagttacctcaactag

SEQ ID NO: 39071 - DNA, 942 bp, Zea mays
  unsure (1)..(942): unsure at all n locations
  Clone ID: MRT4577_135633C.1
ggaaaagcaacagaggagaacggggagcagaggtggtttggtattaggtgggaaaacagaattctgttacacttttcttgataccctctgctctctcttcccagatacttatctcccctcgcttacacgcctgagaaggccacacaccatcacaccacgcttggctgcaacacacgacctctaggccgtcacccagtcaggcccgctcactcggacacttggcttgcgaattcttcctcctttctttggcccagcttcatcctctttgttacttggacggcccacctcttcaaactccagtcctggtggcacgctgctcacacctacctacctagtactgtacaccacttcatcatcgaactgtctgatgattttttcaaaacttttcacatcttcaataatgaattatccgaggactattcaagaaatgtttcagctgctgcaggcgcaactgcgtgcgtcactcagactcagctgcggctgccacggccagtgctccgtgctgcagaggcgaccggagcgcctcactcggcgtggacgcctcgcacccccttgctgctgctgctgttgtcgcgggcgctgggtggttgttgaagcttcgcgcgagtggcgaggcgacccgggcggcgggcggcngcgcacctcggcgagaggttgacctgctccagcgcctgctgctggagctcggacgggtagtcgcgcacgcagccgatgcggggcccggcccccgtggtccacttgaaggacagctgcttgcccagctggtacgacttggcccccttcttggagttgatccgctgcaggatcttctcccgcggcacgggcgcctgccgcccctcctcctcctcggcctcggccgcctgctgctgctgctgctccccggccaccgccgccgccgactcctggtcgacgtcttccgatgggtctcggcctcctgccgct

SEQ ID NO: 39072 - DNA, 615 bp, Zea mays
  Clone ID: MRT4577_135634C.1
ttgggtacctcgaggccggccggaatttttattttccgctgctccacctttgttctttctctgctcctaccgcaccgcatgattgatgcagaaagaagatcatcatgttgctgtttctgcagaacaacctaaaatcgaccctaaactctatgaaaggatcctactcatctctgtccagcagtcccgactgatcaccatgttcatgcatctccaaatacaccgcctgtggctcctggtggatgcaacgacctcgaagacagcacaaaatgaacacaacacatgtaacatcttgaccataaaactgtactgagtaaagaagatcgaatacattactccttcatcacatacccgcaacattatgcatgcattccgaacagtctatgagatgactaagatcctatgagaagggatgtgccagacgtcttactctgtaggtcctgactaatgactaacatatacacccaactgacgtaagtccatgattgaacattaaggaaaggatcacaagataataaggatcatgtgtgtgactatcctgaataccgatactacaacaacatatctgagctgtctactcagctgctgccaaagatctagctcttccttgaagattac

SEQ ID NO: 39073 - DNA, 369 bp, Zea mays
  Clone ID: MRT4577_135635C.1
gcgaccgacacgtgcaaaattgcacacaactgcttctccctaccagtttatcctcaacaccactataatctccctagcgccgctggtcgactctgatatggctttagctcacatgaacctcaacatggccatgaatccccgcgcgcatgctctggcaaacccggtgctcgccgcaatcccgaaaacagatcccaaacttcacttgcttctattaaccttcgcagccgactctgccctctcattcgaggcaaaccgccgagatatcttctagtctgagcgctgcaaccccaatatactctgctcatggcaagacctccacgacttcaccacgttcagcctcatggacaatctccagagcgcgctatcata

SEQ ID NO: 39074 - DNA, 439 bp, Zea mays
  Clone ID: MRT4577_135636C.1
gcacgaggcggtctcagggttcctgatgttcggcgagtccactatgtcacagttcaccctaaacttgccacagcagtacatcccatccaagattgccatttggatgacggtgcgagggaaaaccacactttaccattctgccatcgcgttcagaatgaagacgacgagatgctaatttcattgcttttgttttttttttgttgcatttttctttctggttccaggttgtgaatccttacacaaagtatgcactgacgatgacgccggtcgccttgtcgatagaggaagccctaccaaagaagatgcagagttacctggtcggaatgctcgttaggacatgcctcgtcctctcaaccgttgcggtggctctgcttttcccttactttggtgagtagtagtagtctttctcggtttaactgaatgatcctcccctccattt

SEQ ID NO: 39075 - DNA, 239 bp, Zea mays
  unsure (1)..(239): unsure at all n locations
  Clone ID: MRT4577_135637C.1
ctttctctatnaaaatttttttttttttgaacccaggggggggggggggttttttattgctggtttttctgcttgggggaggagagccccttccagctcacaaacctgttgctatgcttcctaatcggcgattcccgcagatgttgctatttgataaccattctttactgtgtcttgagactttttcttgttcattctttatttttggcgnggcttgtaattttcctcgctcttccctt

SEQ ID NO: 39076 - DNA, 245 bp, Zea mays
  Clone ID: MRT4577_135638C.1
catactgtacgaaactggttgtacactttgagcagagcatacatactaagttaactaagtccaattctgttagcgtgatgtgttctgaatcaatgtataggacctcgccccatgtatatgtacgtatatatattaatatacccctgcccaaattagggttagagctcctattatggagtatggtacctatccacagacttagtgctcggtccccccaacacctactaacgagcgccggctgctcc

SEQ ID NO: 39077 - DNA, 319 bp, Zea mays
  Clone ID: MRT4577_135639C.1
gcatcgcgctttccactgctcctcagtgtacaacagcttgccattgatggccaccggctcggtcagtatttgttcttcgcgattgtccactgccttaagccttccagtcacctcctcaagagtcagtgcctcaaaatcaaggaactgctcaatggcgacgacgatctgcgagtacttggccggcaccgtgcgcaggaatttctccaccacgcgctcctcggtgatgtccctatcgccatggatgacaagctgctggtgcagagttgacaaccgcacagcaaagtcatccacttgctcaccaggattgacgctgatgttc

SEQ ID NO: 39078 - DNA, 5083 bp, Zea mays
  unsure (1)..(5083): unsure at all n locations
  Clone ID: MRT4577_13563C.1
aaggagcagtcgacccgcactgcacaccaccaaattttcctatgcctcatcagtagtgttaaacagggggcgcacggcgtgcacaccaacctgctggaatctggaacagaggaataaggccaggtgggccatacagacccgttggcccccctggtagtttccctgtcgcaccatttggttattatggtcagttcgcacccaactctgaagttgcagcaaggcggggcccagggcatggaggatatcaggctaaaaatgaagaagtatatcactcaacgcctccaaattcctatagtatgaatcacactgttattccagtcagaacacttgatctggggccagcgccgaatcatggttattatggcattcgtggaggtgtgtacaatgtcaatgttgtagattctcattgtgctgtggttcctggtatattaattcaatggcctaatcagcaggaccggtttccacctggccatcctcaaaatatgccaggaagggatgaaacgatgcctagggaaaagatgaaatcccattaaccaaatgtgtatcatcgaacaacactcagtggcttgacatcaattgttaaggatgtagactatttctttgattttagaagcgatctgctgtgaacgtgttcccatccaccacaaattctggtaatctggattgatgttgaagtgaaattggatactcaagtgtcctctattgaaagggacagtgccagaatatttcaattatcagtccatgaatacagagggccgggttagacacaaaaaaggtatgttaaggagaaggcatggtactttgaattcgaaacgttgaaccgtgcacagtgcaagaaattaaaggaggatggttcagctgcactgcatcctgtaattaagaagaatgcagctttaatagagaaaattgagagtttgaacaacaaagccagaaatgttgatgcacgtaatctcccagaatcagcttcgtccaaggaattcaagaagcatcaaaaaagcactgatgttccatctaatgatgtcatgggtatggcatgcaaatctgacccggcagtttctgtttcctgtgtttctcctgcggtgcagagactaccaaatgtgcccatcaagggtacaattcttggtctggcacatccacagttaactgaatttagcaaagctgaaaagcttggtgattcaattagcgatcatgtacataggaaaagtgattcttcaagaaacagttaccatggtccttctaaagataggccagctaataaattcggaagtcatggacggggagaaagttctacaactagttcattaccagtagctgatctgaggaataatatcgatcatggccaacaacctgagattgcttcgcagctgcaacctgcgattgtacctgatgatatgccagcttcactcgtttttcctattcagcgtgcaaaaatgaaggagttggctgcagaacgtgcaaaaaagttgaaagctgaggaagaggaacggataaagaaccaaaaagcaaaagcgctcgcaaagttggaagaattgaacaggcgatcatcagtacttcagaagaaatcaaatgatataaaagtagaaacttatgatgcacatgataagcaacatgctggacttgatgtgactgctaaacttgacacttcaactgaaccacatgatgttattgcgcctgataggcttactgatcttctgcctcctaatgatcccaatcatactatggttcatatacaggcccagtctacagcacaatcacatgcatcagatggtggcaaagaccctgatgctcatgcaacctcatctttggtcaagaacactcacagcaacatggagcctgttgtgcagaagagtatctcgcagttgcatgacatcactgtggtaaaggccaagcaagggtacaggaaaagacatgtgtcagaggagaaaatttctgatgagaaggcaagtgcttcaataaccactgaaatattaagaaaaatgttgatgttctcatcgacacagtgacggctgttgttgcaccacatgatgatccccctactcagaacaagaagggaacccggcatttgagaagtaagaaaaagttagatgatgctccagttacttctaaacatccacctgtggtgttgaatgagccgaatacagtgaaagtctctaccgagccaaagacacatactggtggtgttatcatcagcagctctattgttcctactgaaggtactattgtaactgttggaagtataactgttggtggaatttcacttaaacctatgaatcaggagcgggttaaatcaccagatggaacaaataatactgaaagtagccaaccaagacctcagcaaacgagaaaatctggaaagcatcagcatgttcttcggcctgttgagaagccacatgggaatgatggtgtcttgtgtgcaccagttaagccaccagtgccgaatgagcactctgatggagccatgccgactgcagcagtagctgacctcactaaaccagtagggaaagccataaatgatggggagaatgtgacaagaacaaagagggctgaaatggaaagatacgttcctaagcctatgtccaaagaactgcaacaacaaaatccaagtgatgataaggaagcagttgataagcccagtggtgctaaatcacatcctgcagccgaacccaagaaaactagcaaagcacatgggggcaaatctaatccttcttggcgcaagaggaatccagatgaatcagctttggtggcaccaaattctgttgagcaagcagacgtctcttatgaatcaaaggaggttcagaacttcacctatcagaagcagcctgttgaacttggcaagcaagatacacagttaaaattcaatgtagatgctgctgctgaaaatagctcagctccagttcaaacagttccgctatctgtcggtggcgcaaaacaacatagtgcagctaacagacaaaggcgacagcatgttaaggctcaaagaaatgaagcaagtggctactcaaatgagagcaaaggtagagagggcaagaatgatgttgtctatcaatcagcaacaccggtcatggattcgaactcatccaatcacaggaatgtgccaagatctgatgtgaaaaacagcggcgtagtttcacactctagagcctggaagccgaaaaccaattcccatcctcaggacagctcagacggcaagattgctgttgacgggcaagtggattcccatggtggtaggcttgagatgaatacgtccaaaggatctgatacaattacccatctagtgaccagtagtgaaccgacgaaaaggagtgatggcaaagaggtctcacacagcaaacatgagaacctggcacgggaagatggtaaccagaagggtgagactgaacaggagcaggctaatcctacactacgtcgccaaggccagcccaatgcaaggtaccacaggggaggtgggtcacacaggggaagggggggttatgacactgggaggccaaaccatgtcacaaatgtggagaggcggaagggtggcagccatcttgaataccagccagtcggaccccaaaacaaagctgcagacttccaacagagcctgggcatggaagaacgaaccgaggggcctcctgcttctggacaagcgttcaggcagcgtggacacaacagggggctacgcccagcaggccgctttgtccagcgaaaccctgcttctacgcctaccactaattctcaccaaaatgaataatcttccgcggctgccacatccactgagcttcaggaactcgcgcttgtggtggtgtttcacaacagataggtttggatgcgcggcaggtgtccttctacgactaaactctactggtggtgagcattaggatcctgtaatgataatagtctttgtcccaagggcacctggaccctgtgattgtgggaatttgcctttgttgggatgcaatgttggaacgtgtactaacagagttgttgtgtttgagaacttggtttaaatgttagcctgtgatgctaatgagaacagaaagtgttggtttttgcccaacttccattcctggcctcagtggataatatgctggcatcaccatnnnngtcatgggtatggcatgcaaatctgacccggcagtttctgtttcctgtgtttctcctgcggtgcagagactaccaaatgtgcccatcaagggtacttcttggtctggcacatccacagttagctgaatttagcaaagctgaaaagcttggtgattcaattagcgatcatgtacataggaaaagtgattcttcaagaaacagttcccatggtccttctaaagataggccagctaataaattcggaagtcatggacggggagaaagttctccaactagttcattaccagtagctgatctgaggaataatatcgatcatggccaacaacctgagattgcttcgcagctgcaacctgcgattgtacctgatgatatgccagcttcactcgattatgagtctcaggtatatagttgtagatttgtggtatttttacaaattgatggtcatcattatagtataatattttggaaattccttaatccttattgcaactagctttagggggaacactgaccaataaccactatcagtgaaatatatctctgaaaactcagctgtcttgtgtatatgaaaaccaggcagtaagaaaaccttgttttttcctcaaaaaaaaaaaaaaaaaaggcccctagggccaccccgagggaagcccttaaaggccgaagccaagaagaaaaggccggcccggaaccaaccgaaaagagaagagcaacaaaaggacaggactcagagcaccaagaataggaaagagcaaagaccataacaattaacttcaagatgcttgaagtgaggactgcaagaaggccggctctcgccgacatctctgggggtgggttctttatcaggacagtagaatcgccaggagctgggctggtgaatggtgctgtcaagcggccggctcgggagattctgtcaccttcaagcaacaaggagaatgtgccaccagtgggagctttgagggctacaccaaaaagaagacccccttgcctgactggtacc

SEQ ID NO: 39079 - DNA, 400 bp, Zea mays
  Clone ID: MRT4577_135640C.1
aaaaagaacaaaagcagcagcctttgcttgaaatgcagagagcatgactctaccgaacctgcaaaattctctgaaaatttgtagcacaggtatatattttctgggagctaaatgacggtcttcttgcccactacttactgaacattctctctagcgcttcatgacaaggcaattgcaaacgctgctcctatactcagagccaacacacaaccgctgcaacatcgacaatcggtcttaaagagctatctgactaattgcatgagaccatgttatagaaacagaatactgtcccatacggctaatcagctctggctgaacgccttctgagatgtgactgaaataatcctatcgctatggtagatcttaattcacgctttgagcagatcgatcattccataca

SEQ ID NO: 39080 - DNA, 546 bp, Zea mays
  Clone ID: MRT4577_135641C.1
atgtcattaacatatgtttagccccatcatgcgacggggtttattacaagacaacgatgtaacctcttttaaatgccggtggacggctccatactccaagggctcatcaagaggaacctttcgtcgacccaacttgcaatcaaccgggcgtgaaggtgaatttgttcttcaatacgatatagctcctcgtcgctctgtccggcggcaaagcccttcatgatcacgatcgtgttggtctcgtcaaaatgagagccatctacctcaaggctatactgctcccatagactacaccctcaaggaccacgtattccacgtggtcaggtaacgtcctcaaccaatcgggcagggcaactttgaccggcggagggggagaaaggtgggcgcacaccgtgctcacggtcgacctgagagcctggagctctgtgctctgctctgagagtgaagcctccgtttgaactctcgcgataacaatgatgtctcgggcaaacaagaacttctgggcctcgtcctttgccatggtctttgcctctcccaccgtcttttggc

SEQ ID NO: 39081 - DNA, 664 bp, Zea mays
  Clone ID: MRT4577_135642C.1
accttcctcgtccctactggcggcagcctagggctttccctaagcttctccatcccaagatcaagatgcctccgggaaagaaggggtcacgatgcatactaaatccccaggacgatatggaagcaatggtggcagcatcagttgaagttagacaacttgtgatgtcttctacccaagttgtttctcatgtcttgccgagctcaagtaaattccttcacaatgttggccttcagcctgcctccaagacaagctctatttcagcaaaggtgcacgagcttcaatctcaattggagaccaagagacaagaaaaagatggacttaggcaagaaatggaatccttaaaggctacatcacaagaatttatgaccactattgctaatcaaacaattgagatcgagaatttaaagaagtcgctagcagaaaataatagccttcttcgtcagatactaagcaccaatcgaggcatgtctcctccttaagattgttgctatagtcgaccatgccaatgttacatccaacaacactggactacttttttattagttgtctatttagtctgatcatattgatactatagtagctgtgtgcagcttgtggcggttgaacatgtcctacttttgcatttaagttatagaaaagttgtgtgtgttcatgttgtttgaag

SEQ ID NO: 39082 - DNA, 418 bp, Zea mays
  Clone ID: MRT4577_135643C.1
ttttgctttgttggcaggttctaatagataggttaaacacatcaaagagtttggtatcaaaaatactataatggataattgatagttgataactgacgatatattacatgagtcaggtgggttcaaacaaacatgcaaaaaaaaaggggccggccttaacctaggaattctgacagccaccaatttcatttcattagcttcttgaatctaatatgtgccgggcaaaactcatctttatttgccaaataaccacacgtagaatactctggagccatgaatgcactcatttatgaaattgaattcctttgtttaaaccttgaagataactgctttaaaggaaccatgggtccattaaacattaaaccttgtaaactgaaccaaaaccaccttcaccaattttgttagccaggtcaaaaag

SEQ ID NO: 39083 - DNA, 841 bp, Zea mays
  Clone ID: MRT4577_135644C.1
aaacctctcgctaccttccccgtccctactggcggcagcctagggctttccctaagcttctccatcccaagatcaagatgcctccgggaaagaaggggtcacgatgcatactaaatccccagcgacaagaaaaatataaagatacccaaccaagtgcaataaatcttttcaaggagatgtattgcggcaagaagaaatgatttagtaaaattgttcagaaagctattgatgatatggaagcaatggtggcagcatcagttgaagttagacaacttgtgatgtcttctacccaagttgtttctcatgtcttgccgagctcaagtaaattccttcacaatgttggccttcagcctgcctccaagacaagctctatttcagcaaaggtgcacgagcttcaatctcaattggagaccaagagacaagaaaaagatggacttaggcaagaaatggaatccttaaaggctacatcacaagaatttatgaccactattgctaatcaaacaattgagatcgagaatttaaagaagtcgctagcagaaaataatagccttcttcgtcagatactaagcaccaatcgaggcatgtctcctccttaagattgttgctatagtcgaccatgccaatgttacatccaacaacactggactacttttttattagttgtctatttagtctgatcatattgatactatagtagctgtgtgcagcttgtggcggttgaacatgtcctacttttgcatttaagttatagaaaagttgtgtgtgttcatgttgtttgatgaaattgtatgcacggtttggattgaattcaattatatactgattttattaattgacgaaa

SEQ ID NO: 39084 - DNA, 172 bp, Zea mays
  unsure (1)..(172): unsure at all n locations
  Clone ID: MRT4577_135645C.1
acaatctcaacatttttctttaagatctgctagcattttgatgctctcatacagtacggttcatataacaagaaaactttgggggtaaaacagctctggctctcctatttagcatccagaaaaaaagcccttgtggcgggggggacagtgtngtntaatgcacccttatggg

SEQ ID NO: 39085 - DNA, 280 bp, Zea mays
  Clone ID: MRT4577_135646C.1
ggccgggttaactttgccgctttaataattgggggggtttttcctaatgaaattccccgggccccaaaagagaaaaatttgttgaaattttttggggaggggggtcccttttggcccatgtccccataaaggtgtttagagataaaacgggccccctccccccacttttttggcccctaaggaaaggggggacttgaccccccccaacgtgtttatggggaactttggcggggggggggtttgcccctttaaacccacttggagggatttttccccgggg

SEQ ID NO: 39086 - DNA, 692 bp, Zea mays
  unsure (1)..(692): unsure at all n locations
  Clone ID: MRT4577_135647C.1
tcgaggcnncggccgggacacacatgtagctacatttcgtaataacacatggtgagcgcgactatgggatccctccctaataacatcatgctcgcgtttgccgttcttgcggcgctcgtcgacgtcggctcgcgtgggccccctaaggtgccaccacgcttcccaacatctccaataactactactgtctgagtggctcactcgctacggccacctgaaacacctcgcccaatactgcctccgctcctgacaacattgctgcgtgtgccatcaagaacgtcgaacactgccgccctacagcacattgacggcgtgcgggaacagtctcgcatctgtcaaggacttcaaggcctgcagctcatgctactcacatcgacatgcaaggaaaaacctgactgctcggacaatccagacatggagtacatccctgacatgaactactagcctatcgctctctaccacttccacttgaacgactaggacttcgtgtccctggacaagccccgcgtcaacgaccagattccccactgcggcatcatgaacgacgagttgcgaacggtgcaatgcatcgtactaccgtcgggcagaagactctgttccacatcgacaaggtgtgcaaacccagctacttggacgagctggacgattatgagtagcactacgacgacatcgatgctgatgtaatccacgac

SEQ ID NO: 39087 - DNA, 323 bp, Zea mays
  Clone ID: MRT4577_135648C.1
gacacaagcgtctagagagagtcctgttagatcgacttgtgtcattgcacgagcacatccaccggcgagcaccgggggcgctctccgtccgctaccgacggagcaacgcgccgagctaagatgtgctagcatacgtatgtagccgagcaactgatgtgcgaaatagacggtaagcaactcacttcggcggccatcttcggccacgacggcgccatgtgcgctcagagcagcgcagtcaccgagttcacgcccaaggacatggatggcatcatgaacgacttcgacgacccggtgcagctcgcgtggacctgcctgatattggg

SEQ ID NO: 39088 - DNA, 304 bp, Zea mays
  Clone ID: MRT4577_135649C.1
gcctcagcaaagccgggagctggtagtgtgtcagagtttgttgatagaaaacgcagagagctgaagttgctctccgagaaaatcttcatttaggtgtgagttattcatgagagcaattgttgtcgctaaggattgctggagtgatacggttgtgtaagcttcgaagttccaagtatgataactagcttggcctgagtcaattcgggtgaagctgatgtctggcttctccatatatacttgttatgtactagtaatcatgcaagaaggaatggacttacacttgtatcaaaatataaatataata

SEQ ID NO: 39089 - DNA, 631 bp, Zea mays
  unsure (1)..(631): unsure at all n locations
  Clone ID: MRT4577_13564C.1
ccctccctcgagttttttttttttttttttttttttttttttttttttttttaaacaatcattttgaatcattagattatttatattcttattttataaacatgtgtaaacatcaatagtatatatattacttttgtacattttggtttgacagaagggggaagagcaggagtaacgcaagaatgattacaatccagcctgaacagtacggaggtattgttcatttatttataggtacgggacgcagcccggacaaaattacatccatgtccctaacaactaattacatttacagtacagatcattaggaactacacagtattttcctttttaagtcggtatcgtccttcgtttttagcatgccatcatgtggaagctccttcaatcgtagcttcaacttatattttcatgttacacctgcccttgtactgttttatcgaaggtgttttatgccttgaggacctttttcgcatccatggtgccacggaaataatattcgtatttcctttttgcaatttatgctcgaaaaaatgacagtatgttttgtgcagctcatcaggcatcaccgcattaggtacctctcatctggagcccaggcacgggcggngatcccttgcatactgacaccaat

SEQ ID NO: 39090 - DNA, 381 bp, Zea mays
  Clone ID: MRT4577_135650C.1
acaaacctccggacaagtcatcgcgacaatcgtatgcctcggtaatagcatcatgggcatgggcgccgtccatgatgagctcctcgcccgcggttcttgcgggccccctaacgtgcgactcggcccgaccatcaccagtaactacaagggcaagtggcacaacgatatggacacgtgattcggtcagcgcaacggtgacgtggcaccggaaaacgaacgttcgtgcggcatcagaaacgtgaagttgctaccctataacggcattacagcttgcagcatagtcccgatcttcagcgtccggaaaggttgccagccatgctgccaggtgagatgcaaggtcatgcctgaatgttcgatcaatcgagtcaccgtgttgatcag

SEQ ID NO: 39091 - DNA, 240 bp, Zea mays
  Clone ID: MRT4577_135651C.1
tgttttttctagtggctgagccattttacaggcgctcctcctccagcacagaggccccttcactcgcactcccattcctgctgaggccgacgcctccatcccctcccatcttcttcgagacaccaagtcccatggctgctgtcctccagccccaagctgtgactcaccccgtatgtgttcaatggaatatgctgttaaatgctactgtttgcttccccgtcccgcatcattatttgcctt

SEQ ID NO: 39092 - DNA, 658 bp, Zea mays
  Clone ID: MRT4577_135652C.1
gcactactgttggatcgtagggcgaaggaaggaaggaaggggagccatgggaaacgcgtcgtccatgctgacccagtacgacatcgaggaggtgcaggagcactgcagctacctcttctcgcagcaggagatcgtgtcgctgtacgagcgcttctgccagctggaccgcagcgccaagggcttcatctccgaggacgagttcctctccatccccgagttctccctcaacccgctctccaagttatattcaaggtttatgacatcgatggcaagggaaaaattaccttcaaggatctgctagaggttttacgggacctaacagggtcattcatgtccgaggaacaaagagagcaagtggtaactgaagttctggaagaagcagggtacacaagggattacgcattctcgcttgaagattttatccagatcatcgaccatcctggccttaagatggaggtggaagtgccaatcgactagtgaaatgtggaaaacaagcttccggttttgtctgcagaacatggttagtgtcatgtagcagggcaatgaccgttcactttcgtcatcttatttgtttccggtccacttgcctaaacttttgtaatctttgttggcttggccttttcgaatatatccaaaacaaaacaaaaaatgccctgcg

SEQ ID NO: 39093 - DNA, 425 bp, Zea mays
  unsure (1)..(425): unsure at all n locations
  Clone ID: MRT4577_135653C.1
ctccctgtttaatcaatccttcaagcgcaagctgcctcctcctcgtcgtccgggggtgagaagcgatggcggaccgtggcaaggctatcggcgctggcgccgcgaagaaggcgacggagaggagcgaccaggtcggacaacagacaaaagttgttagtacagctgcaaaacctgagcatgaaaataggtacggctttgtatattttgggggggggggatgcttatcaangctctgaanaacactganagatatgaacttgatggtcagntgctggattgtgtacctgcgaaagctnctgctgataagaaggatgatactggatcatntagtactggaaaaggacgtccattacccccaagtgatgcccaacttggatgagggctagagagagctgataatagactgggaaaaggactgggaggta

SEQ ID NO: 39094 - DNA, 890 bp, Zea mays
  Clone ID: MRT4577_135654C.1
gtctccggcaaccgggaattttggcatgagaatatgcggccgtggcgtccggccggggactgtcgtcccgtgccctcgcgtccctttcccttcttcccatccacgccagccaagttcaccgccgcgctcttcggcggcaactactgttggatcgtagggcgaaggaaggaaggaaggggagccatgggaaacgcgtcgtccatgctgacccagtacgacatcgaggaggtgcaggagcactgcagctacctcttctcgcagcaggagatcgtgtcgctgtacgagcgcttctgccagttggaccgcagcgccaagggcttcatctccgaggacgagttcctctccatccccgagttctccctcaacccgctctccaagaggttgctccgtatggttgatggattgaacttcaaggattttgttgcgtttctttctaccttcagtgcaaaggccagccttcgtcagaagatcgagtttatattcaaggtttatgacatcgatggcaagggaaaaattaccttcaaggatctgctagaggttttacgggacctaacagggtcattcatgtccgaggaacaaagagagcaagtggtaactgaagttctggaagaagcagggtacacgagggattacgcattctcgcttgaagattttatccagatcatcgaccatcctggccttaagatggaggtggaagtgccaatcgactagtgaaatgtggaaaacaagcttccggttttgtctgcagaacatggttagtgtcatgtagcagggcaatgaccgttcactttcgtcatcttatttgtttccggtccacttgcctaaacttttgtaatctttgttggcttggccttttcgaatatatccaaaacaaaaaaaatttgccccct

SEQ ID NO: 39095 - DNA, 301 bp, Zea mays
  Clone ID: MRT4577_135655C.1
cttcttcatttgtgttgtgttgtagcctgcctgacaaagcgtggtcttgctggatcgctcgcagggcaaggtgatgaactgcggtggcggcggaagttgtggcacttgcatcgtcgagataatcgatggaaaggagctcctgaatgagaggacgagcaccgagaattgatacctgaagaaggtaggcattggacactggacagcgcgtacagttcactcagcactcagttgctctgtctttattcaataagctcgtttgatctcccttgtccccggcagaaaccagactcatgggggctag

SEQ ID NO: 39096 - DNA, 324 bp, Zea mays
  Clone ID: MRT4577_135656C.1
cgcgtccgcggacgcgctagagctgtagaaacttcattgacctcgcatgctatacatcaagagggcggggatccagcggtagttgttcacaccaatacttacccatcatgacaatacacatgccaaggaaggagatatgttgatcggggctgccagtccggatggcatcatgcatctctttctggacaaattcaacctggatcagcaacaccttcacaaagggatggaaggcaggcccgctgccgcatcagattgctgctctgctgcatgacctccacagattgacgcttgctaagagcgcgactggtagcaagatcctggcgc

SEQ ID NO: 39097 - DNA, 280 bp, Zea mays
  Clone ID: MRT4577_135657C.1
gggttaaaaggcgggctttgtttcgaagaaaccaaaaagtttctcttgggaaacccttaatgtttaaaaaaccacaaatctgttttttggggggctgcccctccaaaacctgggagggggttgtttttcaggggccattcatgaaaaagggtttttctgccccccatgcttgaataagaatggtttattacttttatttttgcccccccctggtcccattttagaactccatgcctcaatctcttttggctttttccattggggtggccttaaagccccc

SEQ ID NO: 39098 - DNA, 812 bp, Zea mays
  Clone ID: MRT4577_135658C.1
tcgaggccggccgggacggagaacggccgcagctcaacaccaggcaagcccaacccgacagcagtcagcaacctcgcaccaccacctccgtcgcagcatcaggccagcagccgccggcgccgggagccgtcgcgaagcaccccaggccttgccccctcctgcaaacgaagtgttccgtgagagcacgcttcggcgacatagcggccacagctgcagcatcctgtggagaccggcgagaacagcaccaggagctgctcccgatcactcctgcaacacacggcctcgcccgtgcctgcgcgcgcgcagaagtagcaaagtgattttccatgattggcagtgtagtatcggattcagagttcttcgtggtattctactttgcagttcagttgtagatatatggaattcttttcctgagaaatgccgtcctctacaccaccatcagtacaacccactccaagccttcagacattaacatctcctgcagtagcccagaatactcatattgatgttagtgagatcaagtccaagatttttaagaggataggacatgaacgaggaaataaatactttcagcacctggaaaggttcttatcttcaagattgagcaagaatgaattcgagaagctctgtcttgtggcacttggccgtgaaaacctcccattgcacaaccaccttatctgttccattctacataatgccagtcgagcttgtggcccacctgtaattaatgaccctaagctggtcagaggtgccaccacttctggccatgcagttgttcctcctgtctgggacaatggtggtgccttgaacct

SEQ ID NO: 39099 - DNA, 2040 bp, Zea mays
  Clone ID: MRT4577_135659C.1
acggccctcccctgtagtctctcgatcgagctcggctcggtcctcccctgcgaggttccccgtcttcgtccgcgctgcaatccaacctggcgccgccgaacccttctctcgcccggtgctgccgaagccgaacccttctctcgcccggcctgccgtagtcctccactccgccggatcctctctcagctcgagcggtcttggagatccgtccgtcccgggatcatttggcgcggaggtttggcctgggaaaatggcaaacatacgtgcacttctggtcggcttatcacgggcaaggggatccttagcagaggctggacgatgtgcttccacgaggccatcaattctagcatctctgggcgcacattacaagatccccatgccagcccgctggttctcatctacagggcttcctccacatctggtggttggaatgccagcactatcccctactatggtaacatcgcgaaatggagaaaacaggaaggggacaaggtatttggccaagattttagcacctgaaggttctaaagatgttcaagttggacaacctattgctgttacggttgaagacgttgaggatattaagagtataccagctgatacatctttcggtggtgaacaaaaggaagagcaatcaacagaaagtgcaccgcaaaacaaagtagttaatgtgtctgaacaaagctcaacagtgagccggatcagcccggcagctaaattactgatcaaggaacatggactggatacatcatcactgagagcatcaggcccccgtggcacccttctgaaaggggatgttctggcagcattgaagtcaggtatcaattcaagttcaaccaaagaaaagaagtctccagctcaaccttcgtctcagccaactcgagattcccaatctcaagcatcctctatttcacaaaaggatgatacatatgaagatattccgaatagtcagatacgcaaggtcattgccaaaaggttgctcgaatcaaaacagacgactccacatttgtatctatccaaagatgttgtgctggatcccttgctcgctttcaggaatgaactaaaagagctacatggcattaaagtttcagtaaatgacatcatcataaaggctgtggcaattgcgttgcggaacgtccctgaagcaaatgcttactggaacaatgataaggaagaaactcaaaagtgcgattcagttgatatatctattgctgttgctacagagaagggcctgatgaccccaataataaggaatgcggatcaaaagactatatctgcaatatccgcagaggttaagcagctggctgaaaaggcaagagctgggaagcttgcacctaacgaatttcaagggggaactttcagtatctcgaatcttgggatgtaccctgtggaccatttctgtgcaatcattaaccctccacagtctggcattctcgcagtgggtagaggaaacaaggttgttgaacctgttgtggacagcgatggaaccgagaaggctgctgcagttacaaagatgagcctgacactatctgctgaccatcgtgtatttgatgggcaagtaggaggcaagtttttcacggagctggcgctgaatttcagcgacatcaggaggctgctattgtaaatgaaaggaggcaattaccgtgttttgacgtattctttgggagcgaaaaccgctcaggaaaagagaacatttggatgcaacccgtggtctgctgcttgatcggcatcccgtacaaaagtaaccaattttgtaataaatttataataagaatgcactggcaccttcacggttttttaacccgttttccattagttgggaggaggcatgtcctgagaatttagcaggtacggtgccattcaacttcgtggttccgcaacaatgaccacccttagattatgcaatctgagcggttctggatggacgcccattttgttgatgaccttgtgatacatggaagtaataacagaatgcttttgttaccaaaaaaaataaaaaagctagttctagatcgcgaccgcccgctgaaaaatagactc

SEQ ID NO: 39100 - DNA, 712 bp, Zea mays
  Clone ID: MRT4577_13565C.1
tcaatgacctcggagattgagaatgggaaggaactggaggacgaattggccaggacgcatatcaatggagacagcagtggccggaattgcagcggggacgacaaggaggcgagggtgccacttccctgggagctgctccagccagtgatgagggttcttgggcactgcttgcttgccccgctgaacccacctgaggtgcgtgatgccgcagcagacgcagtgagggtcgtctatgcccgtgcatgccacgatcttgtggcacaggcaatcttagcatcacgaagcttgattgagcttgacaagagcgcacgaaaggctgccaaggcagcagctgctgcggcttctgggcaaattgttgcagttggcactgctggaagcaatgcatcaagctctaggccaagttcaaagccaaatacaccaagcaagcagcggaagcctgacacactgctcgtgtccaaatgaagtcaaatgcgctacatctagcaagagtgtttgcttatggtgaagagtttctttctgatgagtgctgtttgtgtgccacatgaatattggtgaaagttcagtagaccttggaatacataaaatgttattattgctgcaagacagttggctaaggttgtttccaacttggtgttgtatgttaacttgcttatgttactttttgcatatagttcatggatccccatatagtttgtgttaaacacaacaaaaa

SEQ ID NO: 39101 - DNA, 216 bp, Zea mays
  Clone ID: MRT4577_135660C.1
agtgagtcgtattaaacggggcggcgcaggcgcgggaggagctgtgccgcgccacagtgggtctcgcacgcgactcgatgtcgaagcgccgtgccacgcgtggcgagcagagggcctggcggaagagggggatgtggggcttggtcgctagagggctagcaccaggttgtcattcaggacgacagtggcgagggtccgtgttcgtggacgtgacgt

SEQ ID NO: 39102 - DNA, 934 bp, Zea mays
  Clone ID: MRT4577_135661C.1
tttttttttttttttttggtacatcattgctgtcggattcattttgcgagacaggcctccgaaagggagatacacaaggtcgttgtcagcactgtctctccacgcgagtcgacttcggaagacctccaggtgcagcaggcggaagcagccgtgtccgaggagctacagcagcaacagagcaatgtggagactggtgggcctcaagaggagactactacagctgggctgagaaggggaacacgccagcgtaaggccaatgtgagattccagggcccagaatggagaacctgaagatatacgctcgctgagacctacggaggaggcaggatgtaacagaactaaattcggcacgaggctcaagtttcttcttctcctctcgctactgtcttccctgctactgctactctgtaattctgtttccaccaagcgaatacatcctcgcagcaaataccagtagatcgtaacaattggtatcagagactacggttttgggcattcgctctcatcaccgtcacggatttatggattcattattgggattcgtgttggaggagatggacaagcgttttgcggcgctggactccaaatgggagaaacaattcggcgatctcatccacaacaaagaggatcgagtggcgaaattggagcaatcccaggcggacctggtgtcctggcggcctgccgtggatgcggcagtggatgacatcaagctcgaccttcggcggctgaacaaacaaatggatcgttcgattatcgagtcggcggcaacggattcgggactccttccccacccggagccaggagcaccgcgcgcacctgcgggcttctacaccgacggccctattgggcaccgcgaccaacactacctccgggatcagggattcgggtctgtcatgacctattttcctgacccgaaaaggggacgcgtactggg

SEQ ID NO: 39103 - DNA, 979 bp, Zea mays
  unsure (1)..(979): unsure at all n locations
  Clone ID: MRT4577_135662C.1
aaaaacgcagcaatacagcaccggtatctccagcggctcggctgacggccctccactgtagtctctcgatcgagctcggctcggtcctcccctgcgaggttccccgtcttcgtccgcgctgcaatccaacctggcgccgccgaacccttctctcgcccggtgctgccgaagccgaacccttctctcgcccggcctgccgtagtcctccactccgccggatcctctctcagctcgagcggtcttcgagatccgtccgtcccgggatcatttggcgcggaggtttggcctgggaaaatggcaaacatacgtgcacttctggtcggcttatcgcgggcaaggggatccttagcagaggctggacgatgtgcttccacgaggccatcaattctagcatctctgggcgcacattacaagatccccatgccagcccgctggttctcatctacagggcttcctccacatctggtggtcggaatgccagcactatctcctactatgaatcaaggtaacatcgcgaaatggagaaaacaggaaggggacaagatagaggttggtgatgtgatatgtgagatagaaactgataaagccactcttgagtttgaaagccttgaagaggggtatttggccaagattttagcacctgaaggttctaaagatgttcaagttggacaacccattgctgttacggttgaagacgttgaggatattaagagtataccagctgatacatctttcggtggtgaacaaaaggaagagcaatcaacagaaagtgcaccgcaaaacaaagtagttaatgtgtctgaacaaagctcaacagtgagccggatcagcccggcagctaaattactgatcaaggaacatggactggatacatcatcactgagagcatcaggcccccgtggcacccttctgaaaggggatgntctggcagcattgaagtcaggtattaattcaagttcaccaanaaaaaaaaaaaaaa

SEQ ID NO: 39104 - DNA, 966 bp, Zea mays
  unsure (1)..(966): unsure at all n locations
  Clone ID: MRT4577_135663C.1
gcagctcggctgacggccctcccctggtagtctcgatcgagctcggctcgttcctcccctgcggggttccccgtcttcgtccgcgctgcaatccaacctggcgccgccgaacccttctctcgcccggtgctgccgaagccgaacccatctctcgcccggcctgccgtagtcctccactccgccggatcctccacctacggccgccggatcctctctcagctcgagcggtcttggagatccgtccgtcccgggatcatttggtgcggaggtttggcctgggaaaatggcaaacatacgtgcacttctggtcggcttatcacgggcaaggggatccttagcagaggctggacgatgtgcttccacgaggccatcaattctagcatctctgggcgcacattacaagatccccatgccagcccgctggttctcatctacagggcttcctccccctctggtgggtggaatgccagcactatctcctactatgaatcaaggtaacatcgcgaaatggagaaaacaggaaggggacaaggttgtgcttttgctagctgttatttttttaaattcaataagaaaaatatcctatttccagcttagggtttcccatttttttgtttaatgtgttttagttctgagaacactatcgttgaactttatgttgttgcagatagaggttggtgatgtgatatgtgagatagaaactgataaagccactcttgagtttgaaagccttgaaagaggggtatttggccaagattttagcacctgaaggttctnaagatgttcaagttggacaacccattgctgttacggttgaagacgttgaggatattaagagtataccagctgatacantctttcggtggtgaacaanaggaagagcanntcacagaaagtgcaccgcanaacaaagtaagttatgtgtctgaacaaagctncacagtgagccggatcagcccggcagct

SEQ ID NO: 39105 - DNA, 114 bp, Zea mays
  Clone ID: MRT4577_135664C.1
ggcgtaccccaaaccctatcttacttagttgcggcagtgagccgccgatagctaaatctctctcttccaaacgcgagaagcgacttgggccattgcgccgaaggatagcatgcc

SEQ ID NO: 39106 - DNA, 249 bp, Zea mays
  Clone ID: MRT4577_135665C.1
ggggccccgcccaaaagggggggggttattaacacccacaagggcccatttttgggggaacgggggggttccaaaaacagggggggggcaccccctggaacgggtcatgatgatgttcaacaaaggtaaaaaaacccggtggtcacggggggcccgtccactattaggggggggaccgactggcccaccgtgtcgatggggatggggaaatttcccccgggcgggaacccaaaacctttacctgggaat

SEQ ID NO: 39107 - DNA, 209 bp, Zea mays
  Clone ID: MRT4577_135666C.1
gcgactcatcgagcgacagcatcacacactcagctagctaggagcaccatcaggggggcgggcaatggcagcctgcatgatctactcatcagctctggccgtggcgcctcacggccttccatcactaggccgccgcgcctcctccctactaccgctctactccaagaccatcatcaccatggaccagccctacggaattaacgccgtcc

SEQ ID NO: 39108 - DNA, 325 bp, Zea mays
  Clone ID: MRT4577_135667C.1
agtgagcacagctcgagccatctttcggagttctcaggcactgcaccacctcggaagccatggctgctgcttctgcctccatggacaggatctcccagagggtgtcgtcacaggaggtcccgaccgacctcaccgaccgcatcggcgactgcgtattcactctacacaaggcggtgatcgtgcccaagtgcggctacatccgccgggccggggcggctagccagacacaaggcccggagggcggcgccgtacagctggaactactcacactgacgatcggcgctgtcgcctatcacaacgaggctcgctgttggtactgcgacag

SEQ ID NO: 39109 - DNA, 477 bp, Zea mays
  Clone ID: MRT4577_135668C.1
ccccgggaaaattcccagattcccaagttcctaaagaaaggaaaaaaatagcagggggagagatacaacttttttccacaggggggccataaaatctaaggggcccattacaatccggcgcgccggttttatagagcaggcaagctagctactaggcgggtagggggggggactgggaaaaggacacagaaaaaaacccttttaacaaacccggggatcccgaaacgcgctaagttgcggggaaactgggggacggccttggttccctcggaaacggggtgcttggcaagctctccggggaggactaggcccacggaggtctggatctcgcggaacgggagggggggctttttgtggacccgccccagtttgggggcctcgccggccagtttttaaaaaatgtcgttgataaaggagttcatgatggacatggccttggaggatatgccgatgtcggggtgcacctgcttaagcacc

SEQ ID NO: 39110 - DNA, 437 bp, Zea mays
  Clone ID: MRT4577_135669C.1
tttttctcagcattgtttgcaacagaggttattttggaagaaacaataaatttgagaaaaatggttgctaaaaacgaaactcaacaacaagatgttgaaatggaaagcgctgaagatattgaaaatcaaaagcgtgaacaagattcagcatccgtacaagagattcgagaacattgcagacaaattgaaaaagctgtattaaccaaggaaccacgttttatattgcgtgtattgagatcattaccaaatacacgtcgtaaattgaatccaattgtgttaagaaatttaacagcacatttgtatccagctggtgttgaacgtgatacaattaatctttttattgatacattgcaaccaggtcaagaattagaagtgttacgaacccgtgcatcaattaatacaccaataccagaagttgatgcttatttgcatttatt

SEQ ID NO: 39111 - DNA, 149 bp, Zea mays
  Clone ID: MRT4577_13566C.1
ctaatgtatgacaaggtgaagagggccatgcacagtgacgtgtacgtgtgaccaaccccatatgttctgcagatgaaggccctccgacgactgaactgagtggatacaatgcagagagacactagtttgcccacagttgatcgatgccg

SEQ ID NO: 39112 - DNA, 182 bp, Zea mays
  Clone ID: MRT4577_135670C.1
ctcctctacgtcatcccaccacatttggcttttccaacgaaaatgtcgtgcgccggagcggctgtcctcttctacaggctcgccgtttatgccctcattgcgttcgaggctccggcagtattacctaatgctaggtagtcctgccaaggtaccggccatgttaccgaatgcatgcattcctg

SEQ ID NO: 39113 - DNA, 890 bp, Zea mays
  Clone ID: MRT4577_135671C.1
tttctgcatcattccatattattaaagtttgactactattcatcccctttgttccagatccaaggattaatgggcatgggccagagtcatcctcttcaagaggagcttaagactaagatgattttgagtcacaatcatgggagtaacgtgtacaagaagatacctttctatatcgcaattattccagtaatgcgttgccggcatcccgttgtttaagtgcacaaaccaatacagttacgtgccaagaagttcccgtattttaaggatgtttaattttcagtattcgtcggggtagtactgtgtcagaaacttatttgtacctaaaaaggccaaatattgccgttgccttggtgcttaaaaataaaaaaaaaaaaaaaaaaaaaaaaaaaaaaaaaaaaaaaaaaaaaaaaaaaaaaaaaaaaaaaaaaaaaaaaaaaaaaaaaaaaaaaacaaaaaaaaaaaaaaaaaaggcccccaaggccccggccccctaaaaaaaaagggaaccccccgggtggaggaaatcaaaaacaaacttaacaaaaccccccaccccaaaggggggcccggaacccaattcccccaaaaaggaagccaaaaaacccccctcaatggcccgctttttaaaaacgccggaatggaaaaaacccggggttacccaaattaaaccccttggaaaaaaacccccttttcccaagtggggaaaaaacaaaaaagcccccaccaaatcccctttccaaaaattgcccaacctgaaagggaaaaggaaaattaaaacgttaaaaatttggtaaaaatccccgaaaaattttgttaaaacaacccatttttttaaccaaaaagcccaaaacggcaaaaacccttaataatccaaaaaaaaaacccaaaaa

SEQ ID NO: 39114 - DNA, 367 bp, Zea mays
  Clone ID: MRT4577_135672C.1
cccacgcgtccgctcgccacgtttgaagggatgtacaaggaggaggtctcgtggttcgagcagcgtctccagcagctcgagctgccaatgcagcttgatttgccgccgcagccaccaccaccgcagctcccagtttctgtgccagtgcaagcgcccctgaggatgtggggtgggaggaggcccaagcccaaggctagggagccaaacaagagggagatggatgaggaggagaagcagaagctgacggtggagattgagaacctgcctgaggacaaagtgctgaatgtgctgcaaattgtgcacaagaggaacagagatccagcattgtcggcagaggttgtggagctagatttcgacgagctggata

SEQ ID NO: 39115 - DNA, 309 bp, Zea mays
  unsure (1)..(309): unsure at all n locations
  Clone ID: MRT4577_135673C.1
gacccacgcgtgcgataacacncacacagaccattttccttttaacagactacaaagacacccaacggggacattccgcaacaatatgaattttctggttacccaaaaattcaccatgacactacagcgccataaatccggacagctacagtaggtaagagccaaaacatatttatgggcttaaacacagggtgatagagaaaggcattttgcttccagcttaagaaccaagccaagaaaacagatatctatggtgtcgagccacttaaaacccctgtcctgaatagtaaaaaacctggaccacacaag

SEQ ID NO: 39116 - DNA, 278 bp, Zea mays
  Clone ID: MRT4577_135674C.1
gacccacgcgtagctaattatctaactaaccataacaccttaaaatttcatgcttacttatgctccgtgagagcgggtctaatgcttctaccgcatccattttcccacaattcttacaagctcctatatcttccattcttacccaattcctctcaccaacggagccttcagtatatgaaaacctaattcttcaaccctacaagatccaacacgcaatcacatcatgctttttacctttatcacccttgtaattccaacaaccagtaaccctattacag

SEQ ID NO: 39117 - DNA, 248 bp, Zea mays
  Clone ID: MRT4577_135675C.1
gtgattcaatgtaatgccgatatcagcactgacatgatgagggacaagttttctgccctatctgcagtagtttatctaatgcccactcttttacattatacggggtgtttgtaagcaaagtatttttggagttttgaggtaaaaccatggtattggagaataccatggtattttttgccaagaggtgtttggccaccttgtaaaaaaaatctgttttgaataccatggttttgtagaattaaaaaata

SEQ ID NO: 39118 - DNA, 538 bp, Zea mays
  Clone ID: MRT4577_135676C.1
gacagtaattctatacactggtgctatcgaaaaggagagatgaatgcgaagaggctgacaccgattctcctgcgccgttctgatgatgacgtgcctcgtgtgcgctgaaactgtgcgattgcaggcggacatgacgtgtagacgacaccgggtagcggtctccggtggtcgtcgtcgtcggacgcagataagacgatgttgtaaagcagggacatcaacgtaatattgtgtttgaaggctcaatgagccggatacaagagctgatactgctgcttcactttacctggtttgccgtgctggcctgatcagaatacttgctggatagagtggcccagacacaagcgactctgatccacccgatttatgaagctcacagtcgcgatgtcctccataagtgccatcgtcttctcatgagaatggatctagcctccaattctctggctcggaatgacgatgtgagatatcatgacatacatgggattgtgaatgtatgataatattaaataagcatcattccatgcgaaaaaatttatgatag

SEQ ID NO: 39119 - DNA, 224 bp, Zea mays
  Clone ID: MRT4577_135677C.1
cgctggtgaccccgagctcgggcttcccctccatctccaccaacaacgcgcggctgggccccaacgcgctgctctccctctccttcccgcccaccttctggtccggccgcgtcgccgcgcgcacgggctacgacgccgccgcgtccaactgctggacggagaccacgccgcacgccaccgacgtgcaggtcaccgtccacgacggcgggatcctggaccaggcc

SEQ ID NO: 39120 - DNA, 186 bp, Zea mays
  Clone ID: MRT4577_135678C.1
cgggacatgggcacgcaccgccaatgcagcatagatgtgaccagctccatccactgctctatcccctactcggttagatttctcaatggagtcctcgtcgctctaccgtgcccggccgagtccgctgccggagcgcgagctcgcccgataggggaaaagccagatcatcagtcgttgccaccagac

SEQ ID NO: 39121 - DNA, 621 bp, Zea mays
  Clone ID: MRT4577_135679C.1
aaaaaagatatgaatttgtgatttctcatcatagaacgaacaaaaaattcacgaggaccaagaggaagagatatctcaatgattagccctataaaaagatataaatggatgtgtcgactatctatataacagagatggatgaataatatgaacatgacctagagactttttacacatgtggggtcaggtgtacgagcaaagaaagcttacatgtactgatctaaatttcaaaaaagtcaaaagcatgtcaagaatgaataaaaactaatctgagaaaacagacgaaagcatatcaagaatgaataaaaactaatataaaaacagacaaaagcatgtcaagaatgaataaaaatatgattaatctgaaaaacatgtcaagatcaaccacacgttaagcaaataaaggtggcctatcttaatctaaaagaaaatatccaagtaaagagaaatagattgtccaagcaaagaaagcttacatgtactgaatctgaaaaggacaaaaacatgtaaagaatgagtaaaaactatgatgaatatgaaaaatgtgtcaagatcgatgactcattaagcaaataaagatggcttgcactgaatctaaaaaaactctcaatgtgagagaaa

SEQ ID NO: 39122 - DNA, 369 bp, Zea mays
  Clone ID: MRT4577_13567C.1
aaacatcccatttgtttttttatagcgtgacataaggatgggtgctccacatatataatacaatcgcataccattttcaatctttggaacacggtgggaaagaatgtatttactgacgggaaaaaaataacatggacaatatcgattctgtctaatgaccagtatattatctgaaccggcacttgtgttgccacttgcttagggtcccttcttacacctagattggggctgaacctatccggaccctgggggctaccaccatgttttcgggccccgggcctcttatagggtaagaactggagatcgctcatttcgagcatgttgatcacatgccccatcttaggcccattgatcatgttagggtgcacc

SEQ ID NO: 39123 - DNA, 259 bp, Zea mays
  unsure (1)..(259): unsure at all n locations
  Clone ID: MRT4577_135680C.1
tngtgaattctccacccccaaccaaaggggggggcgttttttgaaggttctcatttcacaaccaacatggttcccaaggataatatatgtacaggaaccttcggacatgggatgaagtttgacatgatatgaagagcgtggttcgagagaagcatgaacctggtccgaagccacctgtggaaaagcttcggcttagcgggggaaaacgaaacagccttaaaggggaatagacatgactagtgtcttttatatttaccct

SEQ ID NO: 39124 - DNA, 1366 bp, Zea mays
  unsure (1)..(1366): unsure at all n locations
  Clone ID: MRT4577_135681C.1
gggtacctcgaggccggccgggataactctccaacggactagctataaagcaaaagcaagagagagagagagagagaaacaaaatagaaagcgaagagacgacgaccatgttcccgtcgccagggagggcggtgatggcgctgggccacggtggccagcacatgaccgcgtcgtccaccgccggcggcatggcggcctcctcgtcgtccacccccaccataacgttcgcgtcncagccagccgtcccctccccctcctccgacggcgacgagctccctcgccctcgcccacccccaccaccatggcgtgctaggttacggctccgcctgccttctcctggaccaccgccacccaaccaccaccacctcctcggcctctccctcgcacgcggctccgtcgaccgtcgtcccggcccccaccctccaccaccacttccatggccatgcagcaggagcgccgcacgtttccctttcccctcccacgagggcgtcgcctcctcctcctcatccatggtcgacggcggcggcctgcgaagaagagccggagccgcatcacgatcatcgccaacaagcaggccaaggcggcagaccgccgagggggaagggagcggcggtgagcgaggggtcggcggcggcgctgggggtgggcgccgtgcggatgaagaaggcgggcggcggaggaggaggcaaggcgcggcggaaggtgcgcgagccgcggttctgcttcaagacgatgagcgacgtcgacgtgctcgacgacggctacaagtggcgcaagtacggccagaaggtcgtcaagaacacgcagcacccaaggagctactaccggtgcacgcaggacaactgccgggtgaagaagcgggtggagcggctcgccgaggacccccgcatggtcatcaccacctacgagggccgccacgtccactccccgtcccgcgacgaagacgacgacgccgctcgcgccaacgccgagatgagcttcatctggtagcctgcagatccggctccgaccggcggctatctttcagtgcatgcaacgtcgtctactcggccgcctccggtctaagtttcgccagccaccagcagcagctgaatatcctgaatttagctattatatccatccatgcatcgaagaactctctcatcgatcgtgtgtgcatgtggcatgtctaggcattatatgtattgctatgtcgatcgatctttatatatatacgcgaatgatgtccgtcgctggtacgtagggtgtgaactgcatggtcctcctagctactgtcgtagttaattagctaataatatagtagtgcatccaggttatggactaaataatacttatatacatagcagctacctgacactacagttag

SEQ ID NO: 39125 - DNA, 399 bp, Zea mays
  Clone ID: MRT4577_135682C.1
ctccgtgtccgccgtgcactgtctgtctctggtggcggcgactgggcggcctccgccgctgccctacgccaggatcccaggctgcatcttccgtacgccaggaggagggcatcgccgcaggttgagtgggaggcggagatgagccgggggcggtcgccggagccgctggatttcttcatctggactgtgcaggtgctgcgacttctatcgttcttcgttcttagtttcaatttggtgagctatattgctatttggatgtcgaaatgcataattgatctccctgcgaatttgctgggcaacaaatgaaatatgaagtgtgatgctccaatcttgtgtcacttgagctaataaggcattgggatagtcattcttcaatatatggcaccttttggccttaac

SEQ ID NO: 39126 - DNA, 211 bp, Zea mays
  unsure (1)..(211): unsure at all n locations
  Clone ID: MRT4577_135683C.1
ggatccaatccctacctgcccgggaaccacccgtcgggntcctcccgccctcctcgccgaaactgcatgcggcggggatctccgggatcgctccgccaccggagcccccatcaccgccacctcatccaagcccccgaatcccccgggtgtgngnagaacaaccttgccgcgaccgcgcgcggcaaccgccgctgattggctcgcgaaagct

SEQ ID NO: 39127 - DNA, 178 bp, Zea mays
  Clone ID: MRT4577_135684C.1
acgcttcctgtatccttcgggtctcctacagatctttaagaccaggagcccggtgaatccacctggcccgcgggatgttggcagcagcacttgcgtgacgcctcctaagagccgatcccgcttcggcgaggctagtggccggttctagcacatattggcttgccgcctagaactttct

SEQ ID NO: 39128 - DNA, 777 bp, Zea mays
  Clone ID: MRT4577_135685C.1
ggccgctttttttttttttttttctttttttttttttttctggttatgcgattcagactttgttattagagcaactagctgtacaaccccgtactctctcttactcttcttccctagccgcagtgaaaggctaccatgccactgctttacattccaatcaccgacttttaactctactgcctctccaacttgagggtctctcaaaggcatcggcccacttatttcactttctgcgcagcccgcttaacagacatatctcccgcatcgctctgcagcaaagccagcgtaaacaacccagtaagtgacaaccaaatgttgccccaaacgccaatgtccatgctggtgttgtaatgactcggcaacttataatgctggtacgcaccgatacccgtcgcgacgtggtgaaagatcgtcgccgcgacaatcgctttagcatacggcaccgacgaaaacttcttcgccgactccgcggtaaacggtacggcgttggtgagggaaatgaggactagagcgagtgtgatgaggcaccagccgtcgttgcgcacgttgtatgtttcgaggtcgttgggtgcgaggttcagttgcgaggggggacggaaccatccgatgaccattatggggtcgtatacacgacacaagccacgcaggccgtaccagaatgccgtgccatacgcatatgcgtggaagacggtagagttcatggaaggcatgtttgtcaaggaaaggttgaatcaatttcgcacgttggaagcgcagtgtacaaactcaactcgttga

SEQ ID NO: 39129 - DNA, 315 bp, Zea mays
  Clone ID: MRT4577_135686C.1
cggggtcgagggacgcgtcacgcgtacggccacgcgtgcgagtataggactgtagaaacacaccaagcgaagatgactagcgaggaccgtgacgacaagtgctaccgagatatgatacctcctttgccatgttgcggctttggcgagcgccacaaatgcgtgcattattccacaatgctcacttgctcgtagttacattattccacaggtactccgaccagttactttaatggccttaggacacccaagtgtgcaagcctataggctacaaccagctattgcggcgagcgtcttacaaccaccaagtgcccaatt

SEQ ID NO: 39130 - DNA, 579 bp, Zea mays
  Clone ID: MRT4577_135687C.1
attttggtttaaaacccaataaccgaaccgaataatctggttaatacggttcgggttctattttttcaacatgtatttcagttcttgctttttttaaaccgaatattttcaaaaccgtattaaccaaactggacctaataaacccgtccgccacccttatttataaggataccatggtattttatatcatgaggtatttggttgcatccctgaaaattgtgttcgcgaaactgtggtattctatataccgtggtatcgttggagtattggaaactccactctagcctaaagttttcatggcatgactatcttttgcctaaataccgtatccaaacaatagcttatattcttggagttggccaaaactatggtattggtattgacaattacataagtatagtaaaaccgtggttttgagagaaacattgttactaaacaagccctgagagacgttcctcgcatccatgtgatgatctcttatgataaggttttatttcgttaatcttctcattttgaacaacttatgcatctgatattgaggaaatgtgattcccgtgaacatttcttgggattattttc

SEQ ID NO: 39131 - DNA, 173 bp, Zea mays
  Clone ID: MRT4577_135688C.1
gggaaagctgcatcacaagagggcattacgcagttcactgtccttctgccatggccctgtagatgctggctctgtccctgctcgcgctgtttgcgctctagggaccttagccagactgagctttctgtacgaacacctgtgcggctcacacctggtggtagctctctagctaa

SEQ ID NO: 39132 - DNA, 1519 bp, Zea mays
  Clone ID: MRT4577_135689C.1
ttccctcgcgtccgtgccgtttccgaatggccacggccgtgctccgccgcccattcttcgccgcgctcctccccgccgccggaccacgcgcccgccgatacccggccgggaaaacacacgcacaaaactgccgtttccgaatggccacggccgtgctccgccgcccattcctcgccgcgctcctcctccccgccgccggaggggcgtccgggacctcatcctggttctgtccccggagacgtaggtcctctccttccgtgcgcgcggtgtcttccgactcccccaagcccgtcgcctccacctcctcccccaccggcggtgacagccccgacgaggaaccaccggtcctaccgctcctccaggagcttgcggattgcttgattcttccgcccaagctcctcgctcagctcccgagcgaccttcgtctcgacctcaatgacgctgcgtttgatctctccaacgggccagttctcgacgagtgtggccaagaagtgggtgatctgctcctgaacctggcaaaagcatgggagttagctgatacgtcaacatcaaatagcattgccaagcagctgccgttgatggagccctacttgacgcgcagcgccaaatcagcgtttggcaagcggctggtgtcagctggaaggaggtttcagtcaatgggacagtacaaccagggagaactcaaaaagattgctgaaacaatgatcaagaatggtaagctgctatcgaaacacccagtggttcaatctgatgttcaggctatgaaagaaaaaaggagacttaagtttggagaacttgagttcggagtgactgctcaaagtgccactatcggttctgcagtagcggcaatttttggattaatctcatggcaactagcacgaggcgtgcaaagtattcctgacaatacaacgcaatacacaaatgacaatgcactgcagttggccaagtcgctcaagaccgcactgcttgttcttggctacacatctaccggcctatccttattcgcggcttttgggctgctgttgctagcccagcagattaactctgagaacaaatcggagtaactgacaggcactcgctgaagttgtggacctcatgccttgcctttctatgctccaatgaggcaaacgttcatagggaattgcatacactgggaccttgtgtgtatcagtgcatgcaatgttctgtataaaaataaagagccaattgtttgtgattacggataaaataatcggtggagatattgaagcaaacatggaagtcagcctgggactgactgaagaacaaattgttagtgaacgcaacagggaactgcttgtattcaaaattgtgctttcagagtgtggtactgctgttactcatcaaaactgtaaaaaatcgatcttaagggggtgtttgtttgggtaatctaacaacttttgaactatggattatataatctaagcggattataatcccaaacaaacatcccttaagtatgatgaatgagtatatattctgtataatttttttggcgagg

SEQ ID NO: 39133 - DNA, 817 bp, Zea mays
  unsure (1)..(817): unsure at all n locations
  Clone ID: MRT4577_13568C.1
tggacgcctgcaggtaccggtccggaattcccgggtcgacccacgcgtccgccagtggctgcccttcaggaacgctgtcagactctggccgaaattctttatccagcttgcccacctacagcactggaggtgccgagccaaccaccaactccccaggtgggcacctgccctcccacggccctggccgaggggcactgcctggtccagcccgaggggtccctactgggccctcccattcagacagtggccggtcctcctccagcaaaagcacgggctccttggggggtcgtgtagctggggggctcttgggcagtggtgcccgggcctcccctggcagcagttctggtggagaccgctctccaccccctccaccacctccacccccttcggatgaggccttgctacactgtgtcctggaagggaagctcagagaccgcgaggcagagctgcagcagctgcgggacagtatggatgagagtgaggccacagtgtgtcaggcattcggggcacggcagcggcgctggccacgggagcgaggggaggactgtgcagcccaggcgcagcaggccacgcagcgcgtccagcgggcccaacagctgctgcagctgcaggtgttccagctgcagcaagagaagcgccagttgcaggatgactttgcccagctgctacaggagcgggaacagctggagcgccgctgtgccacttttgaacgggagcagcgggaactcgggccacggctggaggagaccaaatgggaggtgtgtcagaaatagggtgagatctccctgctgaagcagnncactgaagaatctcaggc

SEQ ID NO: 39134 - DNA, 123 bp, Zea mays
  unsure (1)..(123): unsure at all n locations
  Clone ID: MRT4577_135690C.1
atactanacaccgccgttacctactgtcgtgtgccgggtgtaaaaaagtgccgcctccaccttgatatcacgtcctagtcatttctcttttcttggacggcggactgggtcttctttggtgca

SEQ ID NO: 39135 - DNA, 402 bp, Zea mays
  Clone ID: MRT4577_135691C.1
aaaaaaaaaccatgcagaatatatactcattcatcatacttaattatgatggtaagaacgatttttttcagttttgatgagtaacagcagtaccacactccgaaagcacaattttgaatacaagcagttccctgttgcgttcactaacaatttgttcttcagtcagtcccaggctgacttccatgtttgcttcaatatctccaccgattattttatccgtaatcacaaacaattggctctttatttttatacagaacattgcatgcactgatacacacaaggtcccagtgtatgcaattccctatgaacgtttgcctcattggagcatagaaaggcaaggcatgaggtccacaacttcagcgagtgcctgtcagttactccgatttgttcctcgagccgaat

SEQ ID NO: 39136 - DNA, 468 bp, Zea mays
  Clone ID: MRT4577_135692C.1
agtgatttcagtgagtgatcggtgttcgcttgatctcatcataatcgtcagcgtcaattgaagaagatgccgatcagaaacatcgccgtcggaaggcctgaagaggcgactcaccccgacacgttgaaggcggctttggctgagttcatctcaaccttcatcttcgtgttcgccggctcaggctccggcatcgcctacaacaagctcaccgacaacggcgccgccacccctgccggcctcatctccgcctccatcgcccatgcattcgccctcttcgtcgccgtctccgtcggcgccaacatctgcggcggccacgtcaaccccgccgtcaccttcggtgccttcgtcggcggcaacatcaccttcctccgcggcatcgtctacgtcatcgcccagctcctcggctccatcgtcgcctacctcctcctggccttcgtcaccgcctacactgttccagcattcggactc

SEQ ID NO: 39137 - DNA, 785 bp, Zea mays
  Clone ID: MRT4577_135693C.1
ttgggacctcgagccggccgggacacgcatttcctgccgtttccgaatggcacggccttgctccgccgcccattcctcgccgcgctcctcctccccgccgccggaggggcgtccgggacctcatcctggttctgtccccggagacgtaggtcctctccttccgtgcgcgcggtgtcttccgactcccccaagcccgtcgcctccacctcctcccccaccggcggtgacagccccgacgaggaaccaccggtcctaccgctccccaggagcttgcggattgcttgattcttccgcccaagctcctcgctcagctcccgagcgaccttcgtctcgacctcaatgacgctgcgtttgatctctccaacgggccagttctcgacgaggtaccaaagaactcagcattcagcaactggatacatgctagaggtttcagcgcaaccaagcacgcttacaatgctcatttctttgctgagacatagtgtggccaagaagtgggtgatctgctcctgaacctggcaaaagcatgggagttagctgatacgtcaacatcaaatagcattgccaagcagctgccgttgatggagccctacttgacgcgcagcgccaaatcagtgtagcgtttggcaagcggctggtgtcagctgggaggaggtttcagtcaatgggacagtacaaccagggagaactcaaaaagattgctgaaacaatgatcaagaatggtaagctgctatcgaaaacaccagtggttcaatctgatggtcaggctatgaaaagaaaaaggagac

SEQ ID NO: 39138 - DNA, 492 bp, Zea mays
  Clone ID: MRT4577_135694C.1
ggaaaaaaattggaccctccccaaaagcagaaaaaagtttttttaaggcccctttttaggggggggttttttcacaattggtagcgggaggggaaaaaaaggggcaaaatttttccaaatttaaaatgaacctggggacccaaaggccccccccttccaatttttttttggggttacccaagcggaaccctttcttgaaaagggggggggaaaaaccctttttggtttttgaacttgggggggatcaggtcaacaacccggttgttgtacccccattttttgtcgacccaaaaaacaattttgaaaaaggggtttttaaaagcaatcccggctttggggtaaaaaatgttcaacctgttgtccccaaggaagtgggtaaaaaccaaatttttttccaaaaaaccaatgatacctttggggggccctttggaagcagccttaatagtttttttgatatcctaaaagggggccccttttttgtttttgaggggg

SEQ ID NO: 39139 - DNA, 485 bp, Zea mays
  Clone ID: MRT4577_135695C.1
cgggagacaaaacggcgaccgcgcaggcggtgcggccatagtacgaccctgcatccaatcgtggcctaagggactatctgaggccaccgagcctggacagtttctcacatggcccgctgacggcgcactctcatcagatgagattaatagggagtgaccggcgctaggctaccacgatctgagagagtgggagaaccaaaatgagagtccagaggaagcaggttggaccatacacatggggcactggtgctgatactactgcacctctcgctgccagagattaggagtgccaaacacgaaggagcctagggatgaatatgtgaagggtggacagcattctgggatctacttctgacacaatgatgcggagaggatacatgaccggaagaccttcagacattggaacaaattagcaccatatgaacgaaactgacagcagactgctgaggaaatggccatgcacgcatataagttctctatgtatc

SEQ ID NO: 39140 - DNA, 315 bp, Zea mays
  Clone ID: MRT4577_135696C.1
ctccgagtcacaggagcaccctcctgcctcctgtgcgaccgccgcggcgtacgtcaacatctacgacatctcccccctcaaccactacctctactggtgcggactggagatgttgcactcggggatccaagtccatgggatggaggatggctttggagctcatgactaccccaccagcggagtcttgcgaggataccccagaagctggcccggggttatcttcagaggctctgtgctgcgtgagagtaactcacatgccccggtccgaagggcgcactcccatagaggatgtgggcgaggattatggtgggggca

SEQ ID NO: 39141 - DNA, 102 bp, Zea mays
  Clone ID: MRT4577_135697C.1
tacacgcgtgcatacactacagataggactttacaaagctcacactaatctataactctcagtatatacattcccagtgtaaaactcttcattcataccaac

SEQ ID NO: 39142 - DNA, 477 bp, Zea mays
  Clone ID: MRT4577_135698C.1
gatctccctctctctcccaatcctccccgcctccccgcctccctctaccaaatcagcaccacccaaggcgcatccgagccacggccgcgcaatgccgccctctgtcgatgcaatgccggcccccggagacgccgcgggcggcggcgacgtgcgcatgatctcctccaaggagctccgctctcacgcgtccgccgacgacctctggatctccatctccggcgacgtgtacgacgtcacgccctggctcccccaccacccgggcggcgacctcccgcttctcaccctggcggggcaggacgccaccgacgccttcgccgactaccatttgttctcggcgcgcccgctcctccgacgcttcttcgttggccgcctctccgactacgccgtctcccccgcgtgccgcgactaccgccgactcctcgcgcaggtatcctccccgggcctcttccaacgcgtccgccccatccccaaggtcca

SEQ ID NO: 39143 - DNA, 200 bp, Zea mays
  Clone ID: MRT4577_135699C.1
ccggccgggccgggataacacagcgagtcgctcgttcgagcgtcctactcgacgagaaattctcacccatcacctccgcgtcgctccccccgttcgccgccaggtacgaacgcactgccaccccctctggccgtcggttgctgctctgattagggttcttactccgtgcggtcgcggattaacggggatagggggatgga

SEQ ID NO: 39144 - DNA, 458 bp, Zea mays
  Clone ID: MRT4577_13569C.1
tgaattttgtattacttattttgtacttgcgattgagcccatgcaccaaactttaggttgtctttaacctttgaaataccctaacgtgaatatttcttttcagcaatcattgactcttttgtagggaaagtaggctgaacttcttgcttttttccacacataataacagcagtggaagtggaccactcagttttctcccatgggtcagtggaagtggacatcagttatattttattagggctagtcggagaaggaagtgctcggtcgcgtccagagaagaagaggaagggaaacagacggcgtggagttaccgtaagggcataatggggaaaagccttcgcgggcccacttgccaggtttagataatatggctggtcccttggtacagtcaccaagcgggttcatgataatacgtgtgatgtgtcttggctaattgaccgggttagatcctataagga

SEQ ID NO: 39145 - DNA, 1937 bp, Zea mays
  Clone ID: MRT4577_1356C.1
cattggtacctcgagcgggcgggatacgtttggatcgtggacgacaggcactcgtggaacctacagggctttaacttctcccaacttcctcaaacaaatcctagcatcttcctaccccgtcccgatccatccatggcagcccctaccgtcgtcttactgcccgtgtggggtgctggccacctcatgtccatgctcgacgccggcaagcggctgctcacccgcgggggtcgcgcgctctcgctcaccgtgctcgtcatgcgagcgcccacggagcagctcgcggccgatctcgacgcccacatacgcagggaggaggcatcgggcctcgacgtccgcttcgtccgcctccccgccgttcagcccccgacggacttccacggcatcgaggagttcatctccaggctggtacagctgcacgcgccccacgtcagggcggctatctccagcctggcttccccggtggcagcggtcgttatggacttcttctgcacggcgctgctcgacgtgacccgcgagctcgccgtgcccgcgtacgtctacttcactgccagcgccgggatgctcgcgttcttcctccgcctcccgtcgctccacgaggaggtgacggtccagttcgaggagatggagggcgcggtggatgtgcccgggctgccgcccgtgccgccgtcttccctgccggtgccagtgatggacaagaaccacccgaattacacgtggttcatgtaccacggcaggcgcttcgccgaggccgacggcatcatcgtcaacacggctgccgagctcgagcagagcgtgcttgctgccatcgccgacgggcggtgcacgccgggtgtccgtgccccgacggtctatccaattggcccggttatctcgttcagccccccgcccactaacacagaacatccgcacgagtgcgtgcggtggctcgacacgcagcccgcggcctccgtggtgctcctctgcttcgggagccaagggttctccgcggcgccacaggcgcacgagatcgcgcacggcctggagcgtagcggccaccgcttcctctgggtgctgcgcggcccaccggcacccggcgagcggcacccgtcggacgcgaacctctccgagctgctccccgatggattcctcgaaaggaccaagggcagaggcctggtgtggccgacgaaggcgccgcagaaagagatactagcccacgccgccgttggtggtttcgtgacacacggcggctggaactcggtgctcgagagcctgtggttcggggtgccgatggcaccgtggccgctgtacgccgagcagcacctgaacgcgttcacgctggtggcctatgtaggcgtcgccgtggcgatgaaggtggacaggaagaggaacaatttcgtggaggcctcggagctggagcgagcggtgaaggagctgatgggcggtggcgaggaagggaggaaggcgagggagaaggccatggagatgagggatgcctgcaggaacgccgtggaggagggtggctcatcctactcttcactacgaaggctatcagagaagatatgtaaagtcgacaagaacctatgagtctgacgatgagaggcaattttacatcacattctttattgctgtaaactagcagtaagagaggatgtgattgattaaggttgagaataaattcttatcattgaatataaattagatgaatgatatattttatctaaaaataaagtaaaaatcaaacacctataatttggcaatttctattatatatatatttcaagtgttcatagatgcttagaccatagagccttggccttgtgtaattgtgtttggtacttaggtatcacgtatctctgtcgttaccttcaaataaaaagtgtaataagggggctgttgaaatcagatgtctaaatttgaatttgagtttctgcaaaaaaaaaaaaaaaaaatttgcggcc

SEQ ID NO: 39146 - DNA, 759 bp, Zea mays
  unsure (1)..(759): unsure at all n locations
  Clone ID: MRT4577_135700C.1
gtaccctcngagcccggccgggacttttaaacactcgcctgcactctcacaaaggcactcgactctatacaaagcacaacccacactcatcagtactccaatacccgtttctgttactacctcccctaatcacttaatccaacatgccttccaccggaacccacgttcgcgagatcagcgagaacccttcaaagaacgccgtcacctcgccgacggatcccaagacgaaagccgtcgacattgaccgcaaactcaagctctatggcgtcattgaagctttccgtcaaggaaagatgccgaataacgagcaatgcgttcgtgcgctcgattacgcccttggcaactcaccaatcaccgaaagtaagctctcgaaggacggaaaggacctcgtcgaggacttccgggacattatcaagatcgcgaagcagattgtcgtcgagaagaacgacgatgagctccttcagaacttcatctaccacacgaccaaggtccaaactccttccgccgatcaagtcaagaacgtcaacacttcgacctcgcaacaagagatgcaacaagacggagagcaagctgtcgaacaccttcgcactctcggcaaactcatcttcaccaactcggaattccgcaagctgttgaaggacgtcggtattctcggtcgggacgtcgctgccgacgctgccaccaaggcggctaacgctgctcgacccagcgaagagcaactccgtcaagtcgacgagaccgctccttcgaaccaatggg

SEQ ID NO: 39147 - DNA, 249 bp, Zea mays
  Clone ID: MRT4577_135701C.1
tttttgcgtgggggatcgcttggatggaaggttcttcttaaccgtagggctgcgcccggacccgtagcggaaccaaggcaactgcgcgtgccagggtccgagcgatcataagcttgcccattccatggacaacgagccatgcggcatgcccaggatgacctctctactgcaggcggactaccagcgacgctacaggggcgagatctagtgctactagcgctgcatgccgacaacacgcttacactacac

SEQ ID NO: 39148 - DNA, 2370 bp, Zea mays
  Clone ID: MRT4577_135702C.1
gggaaaacttacagaggaggcagaggaaatccttgaactcttaaggtcaacttggcggacactaggaatcacagagactgttcatgatacatgctatgcatgggtattatttcgacagtttgttcttacaggtgagcaaggacttctgaaagttgtgattgaccatttgaggaagatacctttgaaagaacagcgtggtccgcaggaaagattacacttgaaaagcctgcgtagttctgttgatgctgagggtagctatcaagacttcacatttttccagtctttcctgtctccaattcagaaatggacggacaagaaactaaatgactatcacctacatttctccgagggctccagcttgatggctgatgttgtgacagtggcaatgcttacaaggcggatccttggtgaagaaaatgacaaggtagcggagtctcctgacacagatcagattgaccgatacatcacttcttcagtcaaaaatactttcttgaagatggcacattctgtagagttcaaagcagacactacaaatgagcatgttttagcatctctagctgaggagacaaagaaactgctgaaaaaagatacagccatttttacacctgttttgacaaaatggcatccacaggcagcagttgtttctgcttccctcattcataaactttatggaaataaattgagaccatttcttgagcatgctgagcatcttacggaggatgtggtttctgtatttccggcagctgatgctttggagcaatacataatgtctgtgatggcctccgttacgggagatgatggtttggatagcctatgcagacataaactagttccatatcagattgaaagtaaatctggtacattagttttacgctgggtaaatgggcaacttgagagaattgaaacttgggttaaaagggctgctgaccaagaggtttgggaccctatatcccctcaacaacgccatggaaattctattgtagaagtctatagaatcatagaagagactgcagatcaattttttgcatttaaggttcctatgcgagatggagaattaaatagtctatgccgtggtcttgacaaggcattccaagtttatacacagctggttactgcacccctagttgataaagaagatttagctccgcctattcctgttcttactcgatataaaaaggagcttggaatcaaggcttttgtaaaaaaagaggtccaagaagttagaacagttgatgagaggaaagctagcgaaattactcagcttacaatgccaaagctttgtgttcgtcttaacagtctatattacggtatcagccagttgagtaagttggaggacagcattaatgagaggtgggctcggaagaaaagtgaaaacactaacatcagacgaaaaagtgaaaagtcaaagagtgccgtccctaatcagaagaatcaatttgatggcagcagaaaagaaatcaatactgctattgatcgtctctgtgaatttactgggacaaaggttatattctgggacctgcagcagccatttgttgagaatttatacagaaatggtgttgctcaagctcgattggacaccataactgaagtgcttgatttggtccttaatcaactttgtgatgtcattgtggaacaactgagggatcgtgtggttacagggcttctgcaagcatgcctggatggcttccttcgtgtgatactggatggaggttctactcgtgtcttctctccaaatgatgcagctttattggaggaagatcttgaaaccctgaaggaattttttgtttctggtggagatggactgcctcgtggaactgttgaaaacttggtctcgcgtgtacgtcctgtaataaatctgatcaagcaagagacccgcgtgctcattgatgacctacgagaagttactcaaggtggcaagagcaaatttggagcggactccaaaaccctccttagggtcctgtgtcacagaaatgattcagaggcatcacattacgtgaagaagcaattcaagatacccagctcagctccgagcgcctgattgattgcgaacaaaaaacagatatcgaacaggacagtgcagccttgctcgtaacccaagaaacggtgctccaccgcccattttcatgtttgtgtaacagttattattcatcggtaacactaggactttgggtggacgcggcagtaagcatgtatttacacaaatactaacacactggtcctgtattgattggtactagttttggaccattggagtttccccatttagggctagtttgggaacctcatttcccaaaggatttctgtttttttaaaggagaataaactaatttcttttgaaaaaaaaaaaaaaaaaactaacccttagattcc

SEQ ID NO: 39149 - DNA, 444 bp, Zea mays
  Clone ID: MRT4577_135703C.1
ccggcccggaattccggggcggccccacccgtccggaaggacctttttgggcaaccggagaacagggttttttttgcctcccaagttccggatgatccgaaggccaccaacaagaaaaccctgccaaaaaaaaaccagaagctgaaagagcttttgcaaaagcttttggcgtccggcaccaatcaaaggggggtaataacggccctaagggagaaggtaaaggtgctggaccggaggttgccccccaggaagagaccaaaggggggggggcccaagccatccaggcatgcttcttgggtccactgaagggataagtttgtagggtttggaggtttaatgtggtttggatcccaaggtggcttcctgggtccagttatggggcactgggtaggaatagccatgctggggaactgggcttggttttgaccaccacaagggggggca

SEQ ID NO: 39150 - DNA, 161 bp, Zea mays
  Clone ID: MRT4577_135704C.1
atatatatatatatatatatagggaagaggggcttccattagtataggaagccccagtcaggtatatctacgcatgcctgatctggttctggttctggctcgggcggattacagcataaaacgtgagctaaaacagcgtaaatgagtacgaaatttagcgt

SEQ ID NO: 39151 - DNA, 495 bp, Zea mays
  unsure (1)..(495): unsure at all n locations
  Clone ID: MRT4577_135705C.1
gggtacctcgaggccggccgggacgctcctcgcctgcttcgccgatgccagcgcactcctcccaccttctctcccgcaacccgtagccccacgacagcctccccttccccttccacctccgatcccatggcaccgcggcccgccgccgcagtcttcgtcgttgccgccgtggttgtcctgctccctcctcccgcggcggcggcggcgccccccgtgggggtaaactggggcaccatgatgtcgcaccccatccacccatctgcggtggtcgagatgctgcgcgccaacggggtcgaccgggtgaagctcttcgacgccgacccctggacggtctccgcgctcgccgggtcaggtgtccaggncatgctcgccgcgcccaacgaccagctcgcctcctggncccgcgaccgcgncgcgcgcgcgactgggtccgncaaaacgtcaccgccaacatcaaacgcgncgtcgacgtcagggtaaactgattgatgcatg

SEQ ID NO: 39152 - DNA, 381 bp, Zea mays
  unsure (1)..(381): unsure at all n locations
  Clone ID: MRT4577_135706C.1
gcggggggcgcgggaccttnggngcatnnattggcggggagcatcagggcacaacaactacaacaacttgtgctagcaaaccttgctgactactctcagcagcagcagngtgcttgcattcaaccaactagctgcattgaactctgctactttnttgcgacagcaggggtactattcagtcgctncctgctgcctgcccccggtggggggttgcattgagccggcggggggttttatacacagctggtggttgacaggggcgacaggctctaccatggagtcagctaggtggtgggagccctagtaccttcttggtcagccacagttggggccggtgtaccaggacgctgggcctaacgctgggaccctgtttcaactgcg

SEQ ID NO: 39153 - DNA, 423 bp, Zea mays
  Clone ID: MRT4577_135707C.1
atggtgctacacccacctctcaactcggtcaatgactgggtgggagactgtccttcatttgtcgttgtagttgatagttcaacttttagtgcgactatggaagtggagtacgcccttaatgagcaatgtgacttaggtttcatacaacaccttagagttgactacgatgagactttcagtctagctgcgaagccgaccactgtccacatggagtttgccatgaaggatcttgggtcccttcaccacttcctcagcgtaaccgttgagcgttgtctaggtggcttgttccttcatcagcgcacctacacgctggaggttatcaattgtgcggttatgacagactgtaatccatgcacaaccctaatcgacctcaatacgaagcttgttgtagactctaggcctcctataaaggatgcaacctag

SEQ ID NO: 39154 - DNA, 711 bp, Zea mays
  Clone ID: MRT4577_135708C.1
ctcgcgccgccaccaaatctccagcgagcgaagaggcggctccggcgagtgcgcggcaacgacgaaggcgtcggggccagtggcgagaggaagagcatgctgaagttcctgtccaaggtggtggtggagtactgccctctggacccgccgcctcccctccccagctccgtccacggacctcaagtcgcagccgactctcccgcctccgagggtcctcgtgacctacttcaccggagctgaagaggccatcgtctttgctgagggagctacggcgcagggcatccgggaccagatcgtcgcacggggccggctcatcgatacggagaagatgttccgcgacggcggggagaagtggcccgtcgtcatccccgaggaggagcttggcatgtcgttccctggcatcaagccaaagaaagccgaggataagccccaggccgagtgaccaagcaggagttttctactttatatatcatggttaactatggacatttgtacactcacagatgctggaagaaaattttctcttgccgctaccacttagaatgtgtgttaccagtttgaaagccatgtctggtccaatttttgttttcccgcattgacatatgcttccagttggtgctcttaactcgtacaccattttggctattgtcagcgtaatattctgtggacaaatttgactcagaataagaaacttcacaatatcgcagtctt

SEQ ID NO: 39155 - DNA, 355 bp, Zea mays
  unsure (1)..(355): unsure at all n locations
  Clone ID: MRT4577_135709C.1
caccacggagcccgcgcagacgcagcagagcacgacaccgaaccccaagcaaccacacgacgaggccgncaacgaccacaacgcgcacccaacccacagggggggggaggcagacacccgaagagccacagaagaacaagccaaaccgccgaaccagcaaaaaaacacgaaccaaccccaccgcccacacccgcaccggcaccaccaacaccaccaccccggaaggaaacgccaccaccgaaaccaccgagacgcgccacacaagaaccccaaagcaggccacagcccgagacgcaaggcgaagagccaccaagccaaacaacccgcgaacgcaaaaaccgccaggcaagcgaag

SEQ ID NO: 39156 - DNA, 354 bp, Zea mays
  Clone ID: MRT4577_13570C.1
ctcgaaaggacaactactctgtcctaatggtgaagtcaacttgctgacttggcatggtacatatatcatcttgctgaaatctttttaaaggaagtccttactgatctctgagataatgaactgtaaggctcattatatggcattgagtctggctgaccatattaaatgcacgcaacctctgcaccaatacagggtgcacatataaacgaacgtaagataccgaatccaacgttctagagaggaaaagtcttcacttctgaactaccctgcattctctttgcatcactgatggatcatctttgtcagacatctcatgaactcaaatcactgatgaaacaccattttcacaatgca

SEQ ID NO: 39157 - DNA, 905 bp, Zea mays
  Clone ID: MRT4577_135710C.1
gaaccagactggccacatcgagcgaggccgggtgatccgaccccaaaacaagtttggggctggcccaaccctcagcatacaacaggcacgaaacctcgcgccgccaccaaatctccagcgagcgaagaggcggctccggcgagtgcgcggcaacgacgaaggcgtcggggccagtggcgagaggaagagcatgctgaagttcctgtccaaggtggtggtggagtactgccctctggacccgcggaaggcggcggcagtggagctcctcgcgcagtgcaacggccgcaaggccaaggactccaacccggcctgctcggtcgagctccgccgcctcccctccccagctccgtccacggacctcaagtcgcagccgactctcccgcctccgagggtcctcgtgacctacttcaccggagctgaagaggccatcgtctttgctgagggagctacggcgcagggcatccgggaccagatcgtcgcacggggccggctcatcgatacggagaagatgttccgcgacggcggggagaagtggcccgtcgtcatccccgaggaggagcttggcatgtcgttccctggcatcaagccaaagaaagccgaggataagccccaggccgagtgaccaagcaggagttttctactttatatatcatggttaactatggacatttgtacactcacagatgctggaagaaaattttctcttgccgctaccacttagaatgtgtgttaccagtttgaaagccatgtctggtccaatttttgttttcccgcattgacatatgcttccagttggtgctcttaactcgtacaccattttggctattgtcagcgtaatattctgtggacaaatttgactcagaataagcaacttcacaatatcgcagtcttaaattaactgctcc

SEQ ID NO: 39158 - DNA, 356 bp, Zea mays
  unsure (1)..(356): unsure at all n locations
  Clone ID: MRT4577_135711C.1
aaccaaagcattatatgatattcggaaggaancgccgcggcagagcccctgagggacacgcgccgaagcaccaagaaagcaccgccaaccccaaccgcacaagcgcgccaggcaagaaacagagagaggcgcagagccagacaaggcaggggaaagaccaagacgggcgccagagcgccagcaagcacgaggagcgccagcccatcgggacggcggacgatggcgcctgtgacgacaaggaccacaaggagcccccgccggcgacgacggtcgagcccgccgagctcaaggccgagggacactaccgcgcggacatcggcgagaccagagccaacgcacgcagcctcaacatcacc

SEQ ID NO: 39159 - DNA, 269 bp, Zea mays
  Clone ID: MRT4577_135712C.1
acagagctagacgcctgccgcgccgtcgcaagcatgctcctataatcacccactctcggtcgctcctccccgttgggccttcctccctgcttcccgatccttcacttacactgtctctctcctcctccctgcacgaccactggtggtctaccccccctcctttctggtcaatagcgctcaccagttttcttggatctttgagcttagaaaatgcccacgggacagagaattctctttcaccaaatcagctaattggtgaaacaacctac

SEQ ID NO: 39160 - DNA, 268 bp, Zea mays
  unsure (1)..(268): unsure at all n locations
  Clone ID: MRT4577_135713C.1
cacacttgctccgagctagcagacactattgntatcaaacactcggctctatgcctcgtgggtctccttaacataggcatgggcatggccaccgctgctgcaaaccgcaaactgggttatggccccgggcgaggaggtggcggtggctgtcgcggtggaggcggtggatacggaggaccagactatgggtccggatcagggtacggtgagcgcgtgagcatcgcaagcgctgctggagggtatggacataaagcctaaaggcggtggc

SEQ ID NO: 39161 - DNA, 1238 bp, Zea mays
  unsure (1)..(1238): unsure at all n locations
  Clone ID: MRT4577_135714C.1
ccggccgggagcaatggcgaaatcttacaccttactgttcatcgcactggtcgttctggcccttctagtgagccccattgcttgctcccgcaagctcgccaagccgaacaagcccaagccgacccacaagccggcggccagggtcacgcccggcagcaaccacaccgatatccctgcagtgtccgccgcctacggctccggcggctggttgtctgccggcgcgacgtactacggcgccccaaacggcgacggcagtgacggcggtgcgtgcgggtaccagaccgccgtcgggcagcgccccttctcgtcgatgatcgcggccgggagcccgtccctgttcaagggaggcaagggctgcggcgcctgctacgaggttaaatgcgacagcaacccggcatgctccggccagccggccaccgtggtcatcaccgacgagtgccccggcggtgtctgcctcgcagaggcggctcacttcgacatgagcggcacctccatgggcgccatggcgaagcccggcatggccgacaggcttcgctccgcccgcatcctcaagatgcaagtacagcggccgccttccgggtgctccaacccgttctacttgctggtcgagttcggacggcgacggcgacctcagcgccgtcgacctcataccgggtgcggcacatggaccccgatggtgcagaactggggcgcgctgtggcgctacaactccaactccggcaaggcgctgagcgcgcccttctcgctccggctcacctccgactccggcaaggtcctcgtcgccagcaatgtcatcccggccagctggaaggccggagggacgtaccgctccttggtgaattattacccttaaattacagctagctgggagcgtgatcgagggtgtgcttcggccttcgggaggcggcgttgcatgcatcctggcttttgcgagaggcggtgccagaagatgaggaggccgaggttgaggaatggaattcttccctctccctccacggtctctgcagtcccctagtgatgtctgaacgtgctgttgatttctctgtaattttgtttttttctttttttttctttgtcgtcccgtagttgcgagaggcgcgacgtgactgatgtcgcatgccaatgtatcaagctgtgtgtgtgtgtgtgtgtctttgtaccacgcaatcctttcatataaatgaattgcggctatgtgctaactccaacccagattgcggtcttgtgtgctnnaaaaa

SEQ ID NO: 39162 - DNA, 538 bp, Zea mays
  unsure (1)..(538): unsure at all n locations
  Clone ID: MRT4577_135715C.1
cgtgcggggcgcgtccggccggcgtccgggaggacaccaagctggtggtgtacgagtacatggagaacggcagcctcgaccggtggctgcaccccaaggacaacgcggccacggcggcgctggactggccgacgcggctgggcatcgccatgggggcggggggggggcttatcttcttgcacgacgagtgcgcgcagcccatcatgcaccgggacgtcnagtccagcaccatcctgctcgacccggggttccgtgccaagatcgccgncttcgggctcgcccggntcctgctcnngtccggcgagcccgagtccgtgtccgccgtcagtggcnccttcgggttcatggctcncgagtgcgggcgcggcgccttggtgcaccntnngggagacgtgtccagctttcggggtggtgctgctggtgctggcgtccgggggggtttgccgcggcggcggcgggggcgcccgctggctgctcgcctggcggcgtgggcgtggctgcggctctgggggggggccctcttcccggcgtggggggc

SEQ ID NO: 39163 - DNA, 423 bp, Zea mays
  Clone ID: MRT4577_135716C.1
ccatcctcggtcgcgtcttatcatcgctcctgccgggagcttaatagagaccattatcgcaaggtgaggcggcagcttgatccaggacgctagagccagcgagaagaaggtaatggtggcggacagcttcctgagcacctcggagtccgagaacccggggcacccagacaagctgtgcgaccagctgtcggacgcggtgatggacgcctgcctggcgcaagaccccgacagcaaggtggcctgcaagacctgctccaacacaaacatgtagatgtcggtcagcgagatctccaccccggggagcgcgaactactagaagatcgcgcgcgacacctgctgcgagatagcgttgacctccgactacgtgaggttccacgacgaccgctgcaaggcgctgtggacactcgagaagcagacccccgc

SEQ ID NO: 39164 - DNA, 414 bp, Zea mays
  Clone ID: MRT4577_135717C.1
aaaaaaaaaaaaaaaaaaaaaaaaaacataataacagacaaaacagatcaaaaacataaaaatgtaactctcgcctcattcttctgatgatactgatctatcaaaagaaaaccccccgcgttccccccccctttcgggctttttgcttggaggttgtaacccgccctttttaaagaaccaaaattatgaacccctgggtgggagcaattaattttttttttcggcaacccacttttatttctcgggccccggtttatacactgctgagctggtaaaaccctggggttccccatatttatccccttgtaaagaatcccccttttccataatacctaaataagaaagggtgctgcaccgattctcctttccaaaagttgcctgacctgaatgctaatacgggcccccccttttaag

SEQ ID NO: 39165 - DNA, 538 bp, Zea mays
  Clone ID: MRT4577_135718C.1
aaacacaaaagccccacatttatttattcacaaaagcatcacaattataatataattgacaccggtgcaaatttttgtttgggcgaaaatccaaaacaaaatatctagctgaatgcatacaaaaaaactgttgatctttcttgatgcatcatacatagggaccaacgccatctgcttgctttagccatcatggagagagagatgtgacttactactctaggacctccctgcaagttgtccttcttatgtgctgtttacaggaatcactccctgattatagtccaccaccagctgcttttcctccaccaaatgctcaaccaatttcagcaccatcagtaggtgtgtatacattcactataccacaatcactagcatggggcgccgagccactcaaaaataatatctggcctttttgcaaatatagaactggttaatccttgaggaacagagatattgattacaattgctgtccttcaaggtctggcgttctggcggctctggactctggccggagattggagactgggagaccggacgc

SEQ ID NO: 39166 - DNA, 290 bp, Zea mays
  Clone ID: MRT4577_135719C.1
gggtgaatctcacatctttaccatataacaggttccctataggtaatagataaattattacattataaggtcacaacgggccatcaacccaaacttgaccgtgggactacggactagaccactcacgaaatcaccaccgaatcctcggagcgcatcattctctggtacacgttcttaacctgggccttggagacccaggtaccgacttgcacatcatgagactcgttacctcacgcacacgatgtgtagtcggggaagctgtccacgcagctcaatgagtgcgtggtctc

SEQ ID NO: 39167 - DNA, 194 bp, Zea mays
  unsure (1)..(194): unsure at all n locations
  Clone ID: MRT4577_13571C.1
ggaaaangcggcgggagccacgcgttcccgacgcctgggtccnaaactgcctggtttatattcacgtgatggttcttgagacgcgcccatttttttcccatgcaacattatacggcatttttgactgtctttgtaccaactctacaagctgtaattcgaggattcaaaccataaaaaaaaaagaaatttaaaaa

SEQ ID NO: 39168 - DNA, 404 bp, Zea mays
  Clone ID: MRT4577_135720C.1
cacccaaagaccttgtttcattcgaggcaaaagttgcagtgctttctacaataatattagtcatgtccaccttgctaagcccctagacaacgtgaaatagaaattcatacaaaaaaatcaaagcttattcatttgtaaaaaaacatatttacattgtatgataggcccagactactccctctcttgcaaggctggccagtgcttcactttatcgagtgtcaccatgtctgtgttctctccttaaatgtaatattgaacctctcctgaagaacatcaaatagagcgcttgtgccatcagaggtgagggtgataccatgtacatctgaaagttttatctttttgcatgaacctattcaaagcactaaaatcaaatgataacttttgtctggttgctaatttctccc

SEQ ID NO: 39169 - DNA, 185 bp, Zea mays
  unsure (1)..(185): unsure at all n locations
  Clone ID: MRT4577_135721C.1
cctcgaggccnngccgggccnggggaatccaataaaaaaaaaaaaaaaaaaaaaaaaaaaaaaaaaaaagattacaaacccggtcctctgtcacgccctaccaccagagctccccgcgaccacggctttctcccgtcttgcgtacccgcttttcgccccggaatctccccgctctgtaaacaaag

SEQ ID NO: 39170 - DNA, 1826 bp, Zea mays
  Clone ID: MRT4577_135722C.1
atttcccccgcgatattccaagaatcttctcttcctctcgctatatccctcatccgcccacccccattgcgcctcgaccggccgggactgctcccacacgctcggattcctgctcgctttctcctcccacgattccatcgccagccgccccttttcccttcctttttcccttgctcgcccgcccgcccaggaggactcgtccttcgcgcttcttcgccagctcgtccttcgcgcttcgtagccagccgtcggcgagagagggtgagaggatcctacgtgccttgtacgctcgctcgggagccggccgggatcgcgccgcgccaccgtaccccgccccggacatgtgcgtggaggggctggacgacgcagcagggaggctcggcttcggagaccaggacaccgacaggcgcgccggtgatgcgatggagagagtttgtgagaacacagtggctgttgacttcaagcagactaagctgaacaactttgtgccattcatccggtcaggggaatggtctgatattggaggtcgcgattacatggaagatgcccatgtgtgcatctctgatctggcaaagaattttggctatgactcagtcgatgatgaagtaatttctttctatggggtgtttgatggccataatggcaaagatgctgctcattatgtccgtgataacttgccacgggtcatcgtggaagacgctgattttcctcttgagcttgaaaaggtagtaaagaggtcatttgtgcaaactgatagtaagtttgcagagaaattttctcatcacaggggactttcttctggaacgacagcacttacagcaatgatttttggaaggtcccttctggttgcgaatgccggtgactgcagagcggtgctctcgcggcgtggcactgccattgagatgtccaaggaccacaggccttgctgcatgaacgaaaggaagcgcgtagagtcacttggcggctacgttgacgacggttacctgaacggtcagctggcagtgaccagagcgctcggtgattggcatctggatggcatgaaagaggtgggcgagccaggagggcccctgagcgccgaaccagagctgaagatggtcacgctgaccaaggacgacgagttcctgataatcggcagcgacggcatctgggacttcttctcgagccagaacgccgtggacttcgcgcggcggaggctccaggaccacaacgacctgaggctgtgctgcagggagatggtcgacgaggcggtgcggcggggcgccagcgacaacctgacggctgtgatggtctcgttccacccggacgcccctcccccgagccgagccaacaagaggaccggcagggtcaccaggagcatttcggctgaggggcttcacagcctcagagtgctcctggaaggccagtgacgtcgccgggcggcgcggcgccattgctgcccgttcgtccctgatgctgtgctacgttgctgatgagtgttaactgtaagtagcggtttccggtatcttggtgcttgctcttcttcttccgctgagggcgggcgactattcttgtccttcctccgacaataaaccaacgggcctgagatctcactgtgagacgctgtaaataaggaaatatggaagttggagctcgtcattaaggacgagttagcggtgtgcatccagggggcttttgtggctcagtatgtgatgccttttcgcccctcctgattttctgtaaataaaacgatgctgggagccatcggtgtgattgaactagtgttctgttatgcgtgctccccatcgattcaagatctacagtttttatttactaattactactagtac

SEQ ID NO: 39171 - DNA, 354 bp, Zea mays
  Clone ID: MRT4577_135723C.1
gtcctattgtgttggccttcgggatcggagtaatgattaatagagacgtcgggtccaggtagtttcagataaaaatgtgagtttgttgtacggccaaaaggtgaaaataaggggaggatctgtagccccaaatctgtgatgtaaactgcatcaggacagcagctaaatcaagcagaaattgctgagagattttgtaactgattgcagctatgttgaatgaatgcagtttgcacacgactaaaaaaaaaaaaaaaaaaaaaaaaaaaaaaaaaaaaaaaaaaaaaaaaaaaaaaaggcaaacgaatataaaagaaccaaaattacaaaacgcgagcatgcaaaagccataatatt

SEQ ID NO: 39172 - DNA, 347 bp, Zea mays
  Clone ID: MRT4577_135724C.1
acctgcggtggctgtgctgacggtcacaattcaacacatccggagcctcccgtctcttaagcggatgctgcacgaggtcaaggagatgcactccaacccctcacccgacttcatgtccctccctctcgaggaggacatcttggagtgacaatttgatatccttgccccgagagacagccagtttgagggtgaaatttatcatggcaggatccagctaccttcgcattatacattcaagccaccctccttcatgctactcacctacaaacagatttgctcgccctgattgccttgatgccaccgaccccaggcggggccttgctctcactgaatgacaaaccacatga

SEQ ID NO: 39173 - DNA, 277 bp, Zea mays
  unsure (1)..(277): unsure at all n locations
  Clone ID: MRT4577_135725C.1
cccggcaccatctgcatacacacaatagctcagaggagctgcgactgatcgactggctgccgccaccatggctatcacctcccgcgcgctcatcggcaagccggcggctggcacgagggacgtcttcggcgagggccgcatcaccatgcgcaagaccgccgccaagcccaagnnccggncnnggcgtcnncggcnnagccccctgggtnaccggtgccgaccgcgtcctgtaccctgggcccgctgtccggctcgcccccgagctcctgacgcgagt

SEQ ID NO: 39174 - DNA, 186 bp, Zea mays
  Clone ID: MRT4577_135726C.1
acgctcatccatatccccatcctcaccttaagctttcgaatctaacctcaaggttgaaatccacgtccagttctaacttatgagcgtgcacttcatttccatagactcatatcagtttaaatttattactcactatattctatccgtataaactttatacagtttctcttttcaataatcaatatt

SEQ ID NO: 39175 - DNA, 2494 bp, Zea mays
  Clone ID: MRT4577_135727C.1
ggaaccggctctccggcgacgtccccgcctggctcggcaagctggcagcggtgcagcacgtggatttatccgacaacgcgctcaccggaggcttgccggactcgctcggcgacctcaaggcgctcaggtacctgagcctatccaggaaccagctctcgggcgccgtcccggcctccatgtccgggtgcaccaagctcgccgagctgcacctgaggggcaacaacctcagcggcagcatcccggacgctctgctcgacgtcgggctcgagacgctcgacgtgtcgtcgaacgcgctctcgggcgtcctcccctcgggctccaccaggctggccgagacgctgcagtggctcgacctctccggcaaccagctcactggcggcatccccaccgagatgtcgctcttcttcaagctccggtacctcaacctgtcccgcaacgacctccgcgcgccgctgccgccggagctcggcctgctccgcaacctgacggtgctcgacctgcgtagcactgggctgtacggcgccgtgccagccgacttctgcgagtccggtagcctcgccgtgctccagctcgacggcaactccctctccggccccatccccgacagcatcggaaactgttcttccctgtacctcctgagcttggggcacaacggcttgacggggccgatcccggcgggcatctcggagctgaagaagctggagatcctgcggctggagtacaacaacctgagcggcgagattccccagcagctgggcgggctggagaacctgctggccgtgaacatctcgcacaaccggctggtcgggcggctgccggcgtcgggcgtgttccagagcctggacgcgagcgcgctggagggcaacctgggcatctgcagcccgctggtggcggagcggtgcaggatgaacgtggccaagccgctggtgctggaccccaacgagtatacgcagggcggcggcggcggcgacaacaacctggagacgggcggcggcggtggtgtagaggcgccgaggaagcggcggttcctgatgagcgtgtccgccatggtggccatcttcgcggcggtcgcgatcgtgctcggcgtcatcgtgatcacgctgctcagcgtgtcggcccggcggagggtcgaggctgcgggtgttggaggccctggccacgaccggaaggaggtggacgagagcatcgtcaccaccagctcgacgacgacgaccaagtcatcgtcgtcgccgccgcccgggggcaaggtaaaggaaaagctcgccaccggcaagatggtgacgttcgggcccgggagcagcctccggtcggaggacctcgtggcgggcgccgacgcgctgctgagcaaggcaacagagatcgggcgcggcgcgttgggcacggtgtaccgcgcggccgtgggcgacgggcgggtggtggcggtgaagaagctggcggcggctcacctggtgcggtcgcgcgaggagttcgagcgggaggtgcgcgtgctgggaaaggcgcggcacccaaacctgctggcgctgaggggctactactggacgccgcagctgcagctgctgatcacggactacgcggcgcacggcagcctggaggcgcggctgcacggcggcggagaggcggcgccgatgacgtgggaggagcggttccgcgtggtgtccgggacggcccgggcgctggcgcacctgcaccaggcgttccggccggcgctggtccactacaacgtgaagccgagcaacatcttgctggcggacgcggagtgcaacccggcggtgggcgacttcgggctggcgcggctgctgcatggcagtggcagtggcaggcaggtggcgatggcgggcagccggttccggcagggcggcggcggcgggatggggtacgtggccccggagctggcgtgccagagcctgcgggcgaacgacaagtgcgacgtgtacggggtgggcgtgctgatcctggagctggtgacggggcggcgcgcggtggagtacggggacgacgacgtggtggtgctgactgaccaggtgcgcgcgctgctggagcacggcaacgcgctggagtgcgtggacccgggcatgggcggacgcgggcacgtcccggaggaggaggtggtgccggtgctgaagctgggcatggtgtgcgcgtcgcagatcccgtccaaccggccgtccatggcggaggtggtccagatcctgcaggtcatcaaggcgcccgtgggcggcggtggcagaatgcaagcctccttctgatccgggcgccgtgaccgttgggcgttggcatgcgttgcaggcagggcaacggcatctctggcctggctcggtcggcggcagcccgctgcaagtactatgtgtgcattcatgctagtatagcatggcaagcacagtagggctagggacgagggcagcttctagctccgtctctttttccatgcatgcgtgtccattcattttcagccccactgtatgtaccttgtacttgtacgggcttctcttctcct

SEQ ID NO: 39176 - DNA, 612 bp, Zea mays
  unsure (1)..(612): unsure at all n locations
  Clone ID: MRT4577_135728C.1
tatttacctctctgtgatcttctcagtccttcaggttctggcccttgcatattacaccatatcctacttccctggaggatctagtggactgaaattcatctcgtctggtctcttgtcctcggcaacaagctgttttggtcgatgaccttcctttgtcaattgtcatacatttatttgatcataccatgttatcgctttaagatttttgtatgtagctgctgatcatccctttgaggctttgtttggtactctagtattgactctaatcctcatggtntgaggngnnnnnnnncnnannnnnnnncncnccanctcccncntnntcctcccnannanncccnnnnaaccancaaccacaatanacnaaannatatctncttcaacatttcttccaccacataatgattaacccattcaaatattacactaccaaaatgnntataaatatgaaccccactacnactacttccatgacaaaaataatcaacccctggtcggccatctcattgccactgagctgatgtacctatcagatgacgagaagggtggagagaccattttccccaatgcagaggggaagctattgcaacccaaggacgacacttggtctga

SEQ ID NO: 39177 - DNA, 210 bp, Zea mays
  Clone ID: MRT4577_135729C.1
atgtcttgcctcgccttactctttaaaaacactgctgaggagcagtccgacggagggttccttaatgcatttggagcaatcattgttggggcacctgttggaatcaattatttcacgccaactgatgttgagaattacatggtctctgcaccttgccatggagctatgctaggagcatggctcggtgcttggcctatgccccttgactag

SEQ ID NO: 39178 - DNA, 295 bp, Zea mays
  Clone ID: MRT4577_13572C.1
ctgacgctgtactgggaggcagacccaaaagagatcattcttgagactgttagatagcataacagatatcctcaccaacggatctctgacgatcgctactgccgaccttaccgacggcggatcgacgaaactgtgaccaccacaccctgtaacatgacgaatacgcttgaagaaacaaagtagcgtaggactgactactaccgtaagcagctgaaccaccactaccactcggggtgcaagatcataagtgacgccagtgccttcccgaaggccaagaacaggagcgcaaggtgct

SEQ ID NO: 39179 - DNA, 738 bp, Zea mays
  Clone ID: MRT4577_135730C.1
cctaataacttccccgcctccctccagacccttcccgctcccccgaggcggcggcgcgagcgagcgagcgagcaaccggcggcgatgggcaaggcggcgaagagctcgcggaaagggaagaaggcgtggcgctccaacatcagcaccgacgacatcgacgagttctacgagaagcagacgcgcgacgcccacgccggcgccgccgccatcccctccctcccgtccgactccctcttcttcgtcgacaagcccgcctccgcgtccacctcctccgccgccaccgcctccgacccggcccccaaagatgttcctgtcaaaaggaagattgagaaaaacagggagaaggtccttcaccatgagagtgtgttgaagcggaacccttatatacagacaattccatcttctttgatgtcaaagaaggataagaagaagttcaagaagcacgcaaagaaaaaggaattgcaggagtcacgggaagaaaaaagtgttcccatggaagaggattcagctgaaaagaacctcgacatctggggtggagatgctaaaggggctcctttgcccaaaaagggaatgaaaaggcttaataaaaatagatctaccacatctgtgattcctgcggttgaagttgagcctcaaggatgttcatttaatcctccacatgaagcccatcaagacgctcttgctctagccgttgctgatgaaatgcgcaagatctacacgaaagagttaggccccaca

SEQ ID NO: 39180 - DNA, 609 bp, Zea mays
  Clone ID: MRT4577_135731C.1
ctcgagtttttttttttttttttttttttttttttttttttttttgtttttttttttgtttttttgttctgtttttgttttttggtttttttttgttaacggccaacaaaatagaacggggcttacaccactgtggagggacccagggactttggatctgcagggccgcaaggacgggactaacaacaaaatatttttggggctcccagactttagttcaggtgacgccggaggatgaggcttaacaccgggctctttttttcttttggggctgaactctgcctggatctggccccatccgttgaggcgccgacgcttgtgaacgcgacggggtagacccaccttgtttcctcccctcgcgcagaggggcccggtgtgctgtagcttgggggataagatctcttctgttaccacacgggcgcctgagggccggggccctatgttaagcatgaggatctttcttttggggagcctccgggccttcggtgccttgggtgcccctttagacctgacacccaacaccctggggaggaggaagaaattgacctcaagctctgcgtactcttgaggtagcgaacctacttccccgggaaccgggaaaaccagcct

SEQ ID NO: 39181 - DNA, 504 bp, Zea mays
  Clone ID: MRT4577_135732C.1
aattcggcacgaggcctccagcctccgatcccatccgacgacatggtctgcgtcgcgtgcctgctgccgctcttcctgatcccggtggtcaacgccctcccttacctcatcgacctcatcatcgtacggttccttcctccctcctctctctctctccccgaccccccgggtttctgtgagatccatccagaacatcggcgtggtggtggttggggtttctatcaattcagcggtccttgtgggtcttggagcgtgtttgtctactaatctactgtcttgggctcgtggattcgtcggagcaggaaagtagaggtcaactcaaccgttcctacagacaaacaaaactagacagacctagctgccggttatcggttgtgattcgttcgtatgagccagctacggccggagatgctttcattctctatgacgacttgggctggatttcatgatcacgtttcctgtcagcagttcatacccacccagacccagatcacctcatcaaat

SEQ ID NO: 39182 - DNA, 1304 bp, Zea mays
  Clone ID: MRT4577_135733C.1
cattgggacctcgagccggccgggaaaaaaactgaaatatctgcggaaaaattaaccggccagccctggagctgcttctcggctcttccaacatcccctgcttgctaccgttcagttcagtcttcagttatccgagtgaccgtggatcagccatgcctgcgcttctagtgaacaccgtctcggtctcccccgccgcctcaaggctaggctcctcgcggcccgccacggcacggcgagcagcaagcgctcgccacggccacaggtgccgagccgaagcatccggcagctcgtgggtgtcggactacgacctgtacgagctgctgggcgtggagcggtcctcgccgcagtcggagatcaaggcggcgtaccggtcgctgcagaagcggtgccacccggacgtggccggcgccgccggcggccacgacatggccgtcgtcctcaacgaggtgtacgcgctgctctccgacccggacgcgcgcctggcctacgaccaggagcaggcgcgccgctccgagttcgccggctacacgggccgcccgctctactcctcctgggtcggcgccgagtccgagcgccgggcggtgttcgtcgacgaggtgcgctgcgtcggctgcctcaagtgcgcgctccacgcgtcccggaccttcgccgtcgagtccgtctacggccgcgcccgcgccgtcgcgcagtgggccgacgacgaggacaggatcgtcgacgccatcaacacctgccccgtcgactgcatctcgatggtggagaggtcggacctggcggctctcgagttcttgatgtccaagcaaccgcgcggcagagtccgcgtctccgaaggcaacgcggtgggagctcgcgcgcccaacatcttcaacgaagtcgccaagttcaagaaaaggttcgatgagatgaagcagaaatctgcggccagagaattccaggagtcggaggcggcacggcagtcgaggacttcagcagtccacgccatcagatccatgtcgaactggtggtactggcggccattcgggttcgggccatcggccccggtcaccattgtcctcgcttcgcgcctcctgccgccgccgccggcggcacccgctgaccccgtgacggagaggctccaagaagcagccgccgcccggcgcaagacgggaggcgcggccacggccacggcgcacgcagggcgcgaagactactggaccccgcagctgaacctgccgtcgtcagcttctccgccgagcattcaccagaggggaaggggcactcccgctcaccaaggccacggccgcaggcgaggagcagccggtgaa

SEQ ID NO: 39183 - DNA, 347 bp, Zea mays
  Clone ID: MRT4577_135734C.1
acgcggacgcgtgggcggacgcgtgggcggacgcgtgggcggacgcgtggggaaaaattaaccggccagccctggagctgcttctcggctcttccaacatcccctgcttgctaccgttcagttcagtcttcagttatccgagtgaccgtggatcagccatgcctgcgcttctagtgaacaccgtctcggtctcccccgccgcctcaaggctaggctcctcgcggcccgccacggcacggcgagcagcaagcgctcgccacggccacaggtgccgagccgaagcatccggcagctcgtgggtgtcggactacgacctgtacgagctgctgggcgtggagccgtcctcg

SEQ ID NO: 39184 - DNA, 658 bp, Zea mays
  Clone ID: MRT4577_135735C.1
ttcaccggctgctcctcgcctgcggccgtggccttggtgagcgggagtgccccttcccctctggtgaatgctcggcggagaagctgacgacggcaggttcagctgcggggtccagtagtcttcgcgccctgcgtgcgccgtggccgtggccgcgcctcccgtcttgcgccgggcggcggctgcttcttggagcctctccgtcacggggtcagcgggtgccgccggcggcggcggcaggaggcgcgaagcgaggacaatggtgaccggggccgatggcccgaacccgaatggccgccagtaccaccagttcgacatggatctgatggcgtggactgctgaagtcctcgactgccgtgccgcctccgactcctgcgcaggcagcgttcggtcgtgtcagtttcagacgaacaacggagaagacagaaacagtcagcgatcacctggaattctctggccgcagatttctgcttcatctcatcgaaccttttcttgaacttggcgacttcgttgaagatgttgggcgcgcgagctcccaccgcgttgccttcggagacgcggactctgccgcgcggttgcttggactcaagaactcgagagccgccaggtccgacctctccaccatcgagatgcagtcgacggggcaggtgttgatggcgtc

SEQ ID NO: 39185 - DNA, 330 bp, Zea mays
  Clone ID: MRT4577_135736C.1
ctgggggttggggtttttttttgttttgtttttttcttttttttttttttagggccggcccaaaagaactggatgtttttattgcgaaagaaaataagggttcaggtacataccgggcccacggcccacgttgaaatttttgttgattcgtgccctaaacaggtacaggccctactaatttgggccggccccgatccaaaggtgtgtttgggcaggtccagtgttaaaatttggcatccaggcttggtcttgggctaggctttaaccttaagggcaacaaccttctggtgacaggttatcttcaacaggcggtgggggggatttcccggg

SEQ ID NO: 39186 - DNA, 243 bp, Zea mays
  Clone ID: MRT4577_135737C.1
acacatactatcataccattttacttttcaccgcacagaaaaatcacacgccccgtctaacatttaattttctttccacaaccacaaacctataaacaaacaaccgaaacatcctaaatattacccaaatatcctattatttataatattttacataacctacacaatcttctataacattataaactacacaaggctataaactttaccagcaaaatctcaattcacccaatcatccactac

SEQ ID NO: 39187 - DNA, 359 bp, Zea mays
  unsure (1)..(359): unsure at all n locations
  Clone ID: MRT4577_135738C.1
tccctacaccgccggcggcgtcgcacccagccgcatccgccatggcgggcgcacaagtatgctctcggagtcatggaggaggaagcaatccgacgtgatgcggttcgtgcagcgcgtgcgctgatggcagtacaggcagcagccggccatcgcccgcctcacaaggaccacccgccccgacaaggccccgccgcctcggnaacaaggccaagcaggggaatgccgacaaccgcgcccgtgtcaaccccggcgtcagcaagaggcctgtgccgaagggtattgcctacggcaagcccaagcaccagggtatcccccagctcaagcgccagaggcaacaacaggtctgctcgctgaggaca

SEQ ID NO: 39188 - DNA, 376 bp, Zea mays
  unsure (1)..(376): unsure at all n locations
  Clone ID: MRT4577_135739C.1
cccacgcgtncgcccacgcgttcgctaagaagaaaaaataaagaatcgatgcatttaaaaaaagaaaatgaggcctaaaactatacaagcattatttacagcctaggctccactctgtaaaaaaccatgacaagcattattcaccaagtccataaactactgccacataaaccgaacacaacttcgagtcatcagttctcgttgtcaagctcatcgatactcgacgcgacagatctgacttttcgtagattaagacaagtctccaatggaatttcacacacggncgggcggccggccggcagtcaattagtcgaaggctgttgatgagtcaacttaaaattcctcgccttcaaaaattaaagttcagcgatcgatt

SEQ ID NO: 39189 - DNA, 502 bp, Zea mays
  Clone ID: MRT4577_13573C.1
gattaacatacatagggatacgcacataccacttgtcggtcccaaaacgggttaacctgtacagtgtggtctttacaacgcttacttagcagactagctcatctgcgagagctcatctggagcccttctgagcacataccctacttgccccttacaaaacatgacacggccaccaaaaggaaaccaacttaacgtgggaaggaaaaaaaaaacctgttggaagggaccaagacaaccatggggcatccaccaaaccgtaagaacgtcacacaaccaaaaaatacacggctcagggaggtcaaggccaaaggctgccccgcttaataacaaaactaactctcattataacattggttgctgactgcctgcttttctgacacccaaacctctactgccccttgcttgcaagactccgctagtacccgttgagcacggaggccaggtatctccttccccttggggaaggcgatttcacccggcgacgtgccactcctgcccttgc

SEQ ID NO: 39190 - DNA, 367 bp, Zea mays
  Clone ID: MRT4577_135740C.1
agcaggaacagaccgacttatattcgatatataagatcatagaccgagacaagctacacttagacaattacaagatgctagagattttattattattagaaagtagcagatgatagaacatcacaagtcaaaagcagagtcctgatcctctgagcttctcctgggtgatccgatccagcttttgtgccatctctggactcaagtagttcacccagtcgccaaccttggccgacctgaaaaacgcagagttcgccaccgagcgacggctacccggattgctcgctcccacgggagttgacggggagagcctgaaggttgtcgaagctacagagccttaccaccgtcttcacgacgccaccgggcttct

SEQ ID NO: 39191 - DNA, 496 bp, Zea mays
  Clone ID: MRT4577_135741C.1
gatcacttcctaattccgcacttcttactcactcctgtaccactttctcctcggccccgacaaaccaatcacatagccgagatactactcgtgcactccaccggcaccggagcattttctacggcgaactggtgatcgtacgcgcgcaggggcggcgggccaaggattaataccctgtggaggtacgtgaataccgttatccttgtccccgtcgcgcggatatcgtgctacttgaaaaggggacggtacatcgcaccgagacctgaccgtggcccccgtctacctcggcgtgtgtcttccatgactgcttcgctgaggtttgggaggtttctgtgattgttgacacgaacccgatcaagactcgcattattacgctgcacgtgcttctggagatgcggatggacgaggagcttgtgaagctgctgatcgaggagaccatcgatgccgggggtgcggtccccaatatctagcctgatctgctgccctataagacggc

SEQ ID NO: 39192 - DNA, 393 bp, Zea mays
  Clone ID: MRT4577_135742C.1
gaaactatggttcaagaaatctgtcgcgacatcaaaaagttggattgtgctaagaggcacataacaactacaataaccgctcttcaccgtcttactatgcttgtttcggctgttgagcaacttcaggttatggcatcaaaacggcagtataaagaagcatctgcacagctggaggtaagaataatttaattagctgataaacctgcataggctctagagttgatttcaatggatggaacattttaacacttgttgtgatcatttttgcatgattttgcacatgatttccaaccaaatttataactttgttccaggcagtgaaccaactatgcagtcattttgaagcctatagagatgtgcccaagataacagaattgagagagaaattcaaga

SEQ ID NO: 39193 - DNA, 290 bp, Zea mays
  Clone ID: MRT4577_135743C.1
aaaaaaaatcccctggaatagttccttttttttcttgggggggccttaaatttgaacttggaaacagggcccccaaacccatttttttttaaaacccctggtgaacaacgttggggggcccccctttttttcagggccagggctcaggccaaaaaatgggtgtaaactggttttatttttcctcccccacatttcgttatggacgatctcctccagggacgggttttgtaccaattttttcctatgcccgttttattttaaccccaccccctttatattttccagggtgc

SEQ ID NO: 39194 - DNA, 502 bp, Zea mays
  Clone ID: MRT4577_135744C.1
tttttttttttttttttttttttttttttttttttttttttttttttttttttttttttaaacaaaatagaagggcaaaacatatttttcaagccaaggggttatacatgctatgaaaaatttccgggcaatagcaacaatgactgattggaatttttgatcaacaaaaagggagaatatttacttttagctgaagaaaaaagagcagggctggcaacaatgaaaccaattgtctaaatccagtcccatttcattatcttgggggctacttttgcatgaccaaatttttatcggacgatcaagcgacacaggcacaaatttttggccatcttcactaatatccaaaataggaaccttcgaataagggcccaccaaacttttgattgggtggtaaaccccagctgaccacagggcttttttgggggtataggaaaaaacccctaaaaaaaaccctttttgggggtaaaatttaacatgtgaaaaaattcttttatgaggcggg

SEQ ID NO: 39195 - DNA, 1014 bp, Zea mays
  Clone ID: MRT4577_135745C.1
tccaagtgggttgtctaccagtctctcgtctcaactgacaagcattatatgcggaacgttattgccattgagccatcatggctaacggaagctgcaccacattttatcagttccgaacattcagtcctgctccccactaacataactgtggtaatttctttgggctactcagttatctttgccttatattcaacaaatgtagtgaagttttagcaatgattcaatggcaagattatgtttccccccagttggcttatcggcccagttggatatgggatgaaaggtgctctgtggatcagaatggatctggctttattgctaaaagcagtttcaatgaaagatgttttgtgtgaaagtatttgtttgattattggctgatccgtgtcgttgatgttgatttacagggcaggactgcacgtcgttttgtaattttagagaacttaactttcctagggccacaattttgttgaagaaaaggattgccaatatttgtatatgctaagcacttgtggcattattctattccagtgatgatgggacggccaaaatcacacttgtcggtttatcccaaaatcacagtagcgagaaatctgtaacttgtacaacctcttgaatttgcccacattttgttcttgtcaaaaaaaaaaaaaaaaaaaatccccactaacattactgggggcaggactgcacgtcgttttgtaattttagagaacttaactttcctagggccacaattttgttgaaaaaaaggattgccaatatttgtatatgctaagcacttgtggcattattctattccagggatgatgggacggccaaaatcacacttgtcggtttatcccaaaatcacagtagcgagaaatctgtaacttgtacaacctcttgaatttgcccacattttgttcttgtcaaaaaaaaaaaaaaaaaaaatccccactaacattactgggggcaggactgcacgttggtttgtaattttagagaactaactttcctagggccacattttttttg

SEQ ID NO: 39196 - DNA, 1379 bp, Zea mays
  Clone ID: MRT4577_135746C.1
atcgctgactctggagggtgtggtatatgttgttgatagtggattttccaagcagaaatgttataatccgatttcggacatagagagtttagttgtcgcaccaatatccaaggcatctgcaagacaacgagcaggcagagctggaagggtgcgacctgggaagtgctttaggatctatacagaggaatattatcttaatgaaatgcagtcagaaggaattccagaaatgcaaaggtccaacctggtctcctgcataatacagttaaaagccctaggcatagacaacatcctgggctttgattggccagcttctccatctccagaggcaatgattcgggctcttgaagttctattctccctaggtatcctcgatgaagatgccaaattaacagtacccattggctaccaagttgctgagatccctctggaccccatgatttcgaaaatgatcttgtcagcaaatgattttggatgctctgatgagatattgaccatagcatcatttctgtctgttcaatctgtatgggtttctgtgaggggagtgaagaaggaatttgatgaagcaaagcttcgatttgctgctgctgagggagatcatgtaacattcctgaatatctacaaaggatttcaccagtctggaaaatctagccaatggtgttacaagaacttcttgaattaccaagcactgaagaaagttgtcgacattaggggacaacttctcaggatagtgaagagttttggtatacaactgaaatcatgtgacagagatatgcaggcagttagaaaggccattattgctggttcatttactaatgcatgtcatctggaggaatacagccaaaacggaatgtataaaacaattaggacattacaagaagtttatattcatccatcttcagttctctttagggtcaatccaaagtgggttgtctaccagtctctcgtctcaactgacaagcattatatgcggaacgttattgccattgagccatcatggcttacggaagctgcaccacatttttatcagttccgaacattcaatcctgctccccactaacattactgtgggcaggactgcacgtcgttttgtaattttagagaacttaactttcctagggccacaattttgttgaagaaaaggattgccaatatttgtatatgctaagcacttgtggcattattctattccagtgatgctgggacggccaaaatcacacttgtcggtttatcccaaaatcacagtagcgagaaagctgtaacttgtacaacctcttgaatttgcccacattttgttcgtgtcagtttatcggagatgccgtttattggactatatagatgagttgtcttttttgtaaaaaaaaaaaaaaaaaaggccccta

SEQ ID NO: 39197 - DNA, 394 bp, Zea mays
  Clone ID: MRT4577_135747C.1
acccaaaaaaaatttgtttctttttttaagaaaaatagggggtgttgctacaatgggttttattgggaacccatactaacattatcctaaaataaatggaaccccctaaggcttccggaagcgggcgggccaaaccaaaaaagagtaaaaaaccgattctacatatgggttgaagccataaccgacaatcccggggacctggtcacggatcttgggaccataaaagcaaacggccagcttaagggccacctccttgggggcacggatccacaaaggaaggccccaccaaaacttccccgtggcaaaaaaacaccccagagggcggccgggggcgcaacctaaaaaggctggggcccacccaagtcccctaaaaaggtggaaggccagggaggct

SEQ ID NO: 39198 - DNA, 1036 bp, Zea mays
  Clone ID: MRT4577_135748C.1
ccaaaatgcaaaaggcgcgccaacgcaagcgcaaaatggctgaaaaattaaagcagcagatacaaacaaacacagcgttggttctggctttctggaacctagtgtgaggcacaaaggacatcatatggtacattacacagagctaaaaaaggttttcgcagcgtacagtttacccagtactccatctaaatattgggcaccctaactagttatcagtcgaattgttgccgaagagccatctcggtttcactcttccatgatgcatgtgacgattgccccctcatcctcttgaccttctccttgtctttgacagtggaacccttcttcttttcgggctcttttgtctgcatcggtctaccaccacactgagggcacaccataccctttccatgtgaataggtctttggtacaccacattgtagacacatccttagaagatcagctgcgtcttctggcccaggatttgcagcacctattactctttttccatcaatagaaccagctgtcactgaacctggggggttggctccagttgtggtaactcgctcgcggatagcaactatctgtggttttgccaccacaacagcacctggaggcggctgtttgctcccctctttcccacggcgatcgagtacaccgagggcctccgtcccttcctctggctcggcaaccctgtgcctcaaaaaatctggtggtcccgagacatcagcgaaggcctccagcgcggagggcagcaaggagcccccgtcgctgccgccggcatctccccccttagggtttggtcggcggcggagcttggggggcggctttggaggagcggactcctcgtcttcgtccgatccggcttcctcggctgacgaatcaccagactcgctcagctcggtgccagcgccggcgccggcggcgggatcgtcgtcgtcctcagcggaggagtagccctggagaagcgttaagctcattgtctggttattttttggttctttccgttcggctcaactagctgcgcatcgagtatagctgtgtcagcccggccggc

SEQ ID NO: 39199 - DNA, 327 bp, Zea mays
  unsure (1)..(327): unsure at all n locations
  Clone ID: MRT4577_135749C.1
ntttggcacaggggcgaaagacaaccggctgaccaaagaagagggcgccgcccgcaccccggggagagacacggggggcggggcaaaagacgcccaacagccgatggagcaccaagaagaaaaggacaccggcccagcctgccaggcaacacggaaccaactcataacccaccaactctgaggaacaaggctaaggaccaccggggagccacgcaacacccagagaagcaccaaacggacaactcaacccagcggggcaccgagaccgagagaggaccaggagcaaaagcaagccatcgcaccaaagaacagagaccccacaacccc

SEQ ID NO: 39200 - DNA, 705 bp, Zea mays
  unsure (1)..(705): unsure at all n locations
  Clone ID: MRT4577_13574C.1
gggtacctcgaggccggccggggcctccgcctccgctacctctgacctctcaatccgttactgctcaaggctctgcgctagccgcccgcgcgtccggctctagcctctgccatgggatcagccggtgaggcactcccgccgccggccagtgagacgcgaccatgggacaactattctcaggccaagctttccacagtcgctcttgcgcccaaagagaggcgtgcggcgtcaaacgcgccggcgggaggggaaggcggctggagcgggcaggacgagaagccggcggccgacgacgactggcttccgatcaacgcgaggaggaacgccaagtggtggtacgccgccttccacaatgtcaccgccatggggcgtgggcgtcacggtgctggtcctgtcgtgggtcatcacggtgtacacgctgtggcagatggtggagatgcacgagtgcgtgccgggggaagcggttcgaccggtaccacgagctggggcagcacgcgttcggcgagaaactgggcctnctggatcgtggtgccgagcagctggtggnntggaggtgnncctcaacatcgtgtacaggatcaccggtggccagtccctgcagaggtccacgacgtggtgtgccacggccggtgccggcgcatncagcttccatacttcatcatggtcttcgcctccgtgcacttcgtcctctcccagctccccgac

SEQ ID NO: 39201 - DNA, 331 bp, Zea mays
  Clone ID: MRT4577_135750C.1
gaccagacacaaaagataaataaaaccgcgcaagaaatattctatctatatatacagcccaatgctagctagtagttcaagcacttgtcacctgtatctacacattttgatgcattcacttgattaattgtttgtttgttcttgggcatatgttcatggcggatggctgagcctgatcgtcttcacgaccatcgccatcatctgcctctacaccgggcttctagaaccttgttgctgctttgtttgcttcttcacatgatgcaatatatttgtcctgctagccttcccacggtgagaacaatcaaacttggcagttttcagctttccggac

SEQ ID NO: 39202 - DNA, 2731 bp, Zea mays
  Clone ID: MRT4577_135751C.1
gagaatgggtaaataccgcaaaaaccagataagcccggtgcgccgtctccttccttctcggcgctctctcgcccgcgcctccatcactcgctagtcgctccctccgcctccgtccaccatgcccgcctcactccttcctccgaccttcctcccccaccacctgcgccgcttcgctcccgccggttgcactacctcttccgtcacctcctcctcggtctccatcccagcgagccgctacgacttcgagcccctcttggcctacctctcgtccccctccgtatcggcctccctcacctcgccatccccaccggcatccgttccggcgcccgagcaccgcctcgccgcgtcttactcggctgtcccgtcgcacgagtggcatgcgttgctgcgtgacctcgccgctagtgacgtgtccctgccgctggccttcgcgttgctacctttcctccaccgccaccgtctctgcttcccgctcgacctcctcctctcgtctcttctgcactcgctctccgtgtccggccgccttctcccgcactccctccttctctccttcccgccgtcgctctccgacccgccgtccccactgctgctcaactccctcctcgctgcgtccgccgcggcctcgcgccccgccgtggccctccggttgctctcgctgctccgcgagcacgatttcctcccggacctcgcgtcctactcgcatctcctcgcttcgctgctcaacacgcgggacccgcccgacgccgcactgctcgagcgcctcctcggtgacctcagggagtcgcggctcgagcccgatgctccgctcttctcggacctcatctctgctttcgcgcgggcggcgctcccggacgctgcgctggagctcctcgcctccgcgcaggccattgggctcacgccgcggtctaacgcggtcaccgctctcatctccgccctaggcactgcagggcgcgtcgccgaggcggaggcgctgttcctcgagttcttcctcgctggggagatcaagccgcggacgcgtgcttacaacgcgctgctcaaaggttatgtcaggattggttcgctcaagaacgcagagcaagttcttgacgaaatgtcacaatgcggagttgcgccagatgaggccacttacagcctgcttgtggacgcgtacacaagagctgggaggtgggaaagtgcgaggatactgctgaaggagatggaggccgatggggttaaaccaagctcgtacgtgttcagtcggatccttgcaggattccgtgacaggggggattggcaaaaagcttttgcagtgctccgagagatgcaagctagtggagtaaggccagatcggcatttctacaacgtcatgatcgatacatttgggaagtacaactgccttgggcatgctatggatgcctttaacaaaatgcgagaagaagggattgagccggatgttgtcacatggaatactctcattgatgcacattgtaaaggagggcggcatgaccgtgctgcggagctgtttgaggagatgcgtgaaagcaattgcccaccaggcacaaccacatacaacatcatgataaatttactcggagagcaagaacactgggagggtgtggaagcaatgctatcagagatgaaggagcagggactggtacccaacattatcacatatactactctcgtggatgtgtatggaaggtccggtaggtacaaggaggcaattgattgcattgaagcaatgaaagctgatggtctcaagccatcgcctactatgtaccatgccttagtcaatgcatatgctcaaaggggtttagcagatcatgcgttaaatgtggtcaaggctatgaaagcagatggcctggaggttagcatcttagtgttgaattcgttgattaatgcttttggtgaagatagaagggttgttgaagccttctctgtgctgcagttcatgagggagaatggtttgaggcctgacggtataacatacacgacattgatgaaagctttaatacgtgttgagcagtttgataaggttcctgttatctatgaagaaatgatcacatcaggatgtgcccctgatagaaaagctagagcaatgctgcggtcaggtttgaaatacataaaacacatgagggttgcataggaaactaaacacaattactgatagcatctgatggaatcatataccttctcctgatcttatagaacatttcaacagaaggtgaagcaccacatgctgacagacacgatctgcttttgcacaagatgatagaatcatcaatatagtcacttcgtcttcctaatcacctaggggaaggcgaatatataatacatcttgatcatttgcaatggaaggagattaaatacatgacaccaagaagtcaggatcttggtataggaaacaaatacatagtctgtccagacctcaaaatttgagttggaatcttggaattgacatttccttataactcaattccagtattttgctgagaaaatcaattgtaacatggaatccaattccagccttttcaaattgtatctaggcgtagacatttctagaatttgtctagggcgatacaaaaggaaatgtattgcatttttattgcctaaaacaaactttggcattaggtcctgtttggatccttgaattgaattgtattctaacaatcataatttagacatagatcaattaagttaatatagttttacatggaaaaagtttgtatgctactgttggtcatatgaggaa

SEQ ID NO: 39203 - DNA, 318 bp, Zea mays
  unsure (1)..(318): unsure at all n locations
  Clone ID: MRT4577_135752C.1
gggggcccacaaagggttttattcaactaggaattttggggaaaaaaattttaacgtcgttgttaaaaaatgtaccccgggtaataaacagggcggtttttaaaaagtataaaaaacgaagcaaggggtggctgtttgatctttaaacttggagagacccggggaacttttttttaagggattggtctaaaaaatatttaagctttctaataattgggccaacgaataaatttttnncggaataaggtgaatccatttgggggcgcccaaaaaccgttgaaatagtacaaggaaccaagggaatgggggatttttagg

SEQ ID NO: 39204 - DNA, 652 bp, Zea mays
  unsure (1)..(652): unsure at all n locations
  Clone ID: MRT4577_135753C.1
ttcccggtttccccccaaacccgtccgagaggcagtcatcccgccgcgatgagggccaaggtgagcttccctcccgtcttacgaatctcgttgcgccgctatctgtttcgtctcgtagtggcctcgcgccgtgcggttctctgtgatgagcaaacagatgacgagtccgatcgaatccattccattacaccatgtggacaaccgaggcatttgtctgagagaacccaccgttcttgctgtattgatgctagtatttttttttggtgtttcctagtgtcgttcggttgtttgttttgcctttatttatttatttattttttggttggcatgatgaggaaagaaatacaagtctgatctgctagatgagaaattcctcctactcattctgaatgccgacgttccaactatgtattgcactaatgttttgaagttcccctagttgccaatcgaacacatctgctgatgattgttaggacagtgcaaaaccacaattaaatcgagtcgctaatacaaccaaaacgtctcctactaatgttgtgtacttgatcgaatgaccatcagatgggggttgaacatgactatgtcccgttctctgcgattagcttgcntatgacgagtccgttctttcccattccgcgtcggcgttgccccg

SEQ ID NO: 39205 - DNA, 551 bp, Zea mays
  Clone ID: MRT4577_135754C.1
tgggaccctcgaggccggccgggccgggatagccgtcgaatcacttctcccggtaaggaaagtcctcatacccatgggagccgacgcaggcaaagtacgcgctcttctgtgtgatcaaataggcccatgtcgtctccaagagcgagctgcctccccgcccgtgacaccgcaaggcgaaatcaacgaagaggctgactatgtgcacgagcctgatcagagacggtgcgtgctgttgctccttatgacaagcgtatcactgaactgctggaggatgggaaggacttaccgtcgtcctgaacattgctaagagaaagattgtaactcagcctagggcaaagaagaacacagaggagatgttgcgcgtcctcaggaagatgaggtcaacatgctagcgctctctgaccataataaatacagagcatgtcaagctcatgtaacctgccagagatatatgtcccagtgtctgattttccgtacatgcagaacctaacagacgtgcctgagtattatgtatcgaaccagctcatgatattttgctccttccaatgcat

SEQ ID NO: 39206 - DNA, 176 bp, Zea mays
  Clone ID: MRT4577_135755C.1
cccacgcggccgctcacgcgtccgcggtaagcttccaagcgtagtccggcggcgtcgagtcgaatggcgggcaaggcgcacacgcgctaggcgttcctcctgttcatctacgtcctcacggtcgccgcgtccagctgcatcttcctcacgctgtcgctgcgcctgctgccgtcccc

SEQ ID NO: 39207 - DNA, 720 bp, Zea mays
  unsure (1)..(720): unsure at all n locations
  Clone ID: MRT4577_135756C.1
tggaaacttatgaaaccgttttttattaggaaagccggtccgtctcgttggtcagtcctgctagccccgggtggctggggtgaggctcttccgtctaagggttccccggtctatgcagaggccagtagtcctcatgtagtgaatacagcttgggcaatgttggctttaatttatgctggacaggttcagcgagatccaacaccattgtatggtgctgcaaaagaactgatcaatatgcaacaagagtcaggcgagtttccccaacaagaacacattgggagcttcaattgttccttttacttcaactatggaaactaccgtaacttgttcccaatatgggctcttggagagtttcggagacgaattgttgcagaaaagaagaggaaccaacaaacatgattgttttaggcatcaacaaattcgggggtgaaagcttgtaaggggctcaagtttaacatgtggtgaaagacatgtcaatatactaaagctgatgtccatctggctaaaccatatgtacatatttttactatggaaacaacgatccatatgtatatatggaataaagggccacatatatgaccgtttcgccatctnatattatatttttgaagtgaaaaaaaaaaaaaaaaaaaaaaaaaaaaaaaaaaaaaaaaaaaaaaaaaaaaaaaaaaaaaaaaaaaanngggggcggccgatatggggggtccttttttacgttcc

SEQ ID NO: 39208 - DNA, 613 bp, Zea mays
  Clone ID: MRT4577_135757C.1
ccggccgggaaaaagcgaaaggagagaaggaatccgatccatccaagccaagccaaggcagagaagaagaagaggaggaagaagaagcatcggcagcatgtcggaggggactgccaactgcgtggacatcctgatcgccatcatcctgcctccgctgggggtgttcctcaagtacgggtgcggccacgagttctggatctgcctcctcctcaccttcctcggctacatccccggcatcatctacgccatctacgccatcaccaagaacaactagctagtcatccttgccgacgacgatccatgtctctgtatctgtgtctgttcatatgcctgatgccgacttgtgctgtatgtagttgcttgaattcagtcgtgttcctgttttggaaaaaaaaaaaaaaaagaaaaaaaaacaaaaaaaaatttttgtccaacaaccagcagggcaacaagcaagatttacctgcccttcgcgacaccatgagctccacggagtgcggcggcggccgcggaggagccaaaacattgtggcctgaggtggttgggctgaccgcggaggaccccaaaaaggggatccttaaggacaagccggaccccaacatcagggggctgc

SEQ ID NO: 39209 - DNA, 155 bp, Zea mays
  Clone ID: MRT4577_135758C.1
atttaaaagtggttgtatctgaatttactgtggggataacatacactgtaatggggaaaaattacctaaaaccaatttcaaaatggctttctttgtatttcagtttaaaaacccagtgcatgtacgccctctgagatgcaataaacaccttgaac

SEQ ID NO: 39210 - DNA, 391 bp, Zea mays
  Clone ID: MRT4577_135759C.1
acaccgcaggcgctcgcacgcgagagctcaaaacttttctagagctttttgacccgaacacaatgcatacgcaggcacacttcaccgtgtttatggcggacacataacacgacgcccgccccgcctgcagcaaacgacgactgatacatcgcgccttcgcgacgctacccaacaccatgcacgaaactacacccacaacactagaccatgaaaaaacgcgacgaactttctcccgaacacgccgtagccatatccgagccctagcgagataatcaacaaagtccgaaatccagcacgtgtttgagtaacatcagtcatgtagttccatgtgaacgctggctcttaaccggtgacaagtgtccaccagcacctaaattactatgagctgacg

SEQ ID NO: 39211 - DNA, 536 bp, Zea mays
  unsure (1)..(536): unsure at all n locations
  Clone ID: MRT4577_13575C.1
cctgccggggcctccgcctccgctacctctgacctctccaatccgttactgctcaaggctctgcgctagccgcccgcgcgtccggctccagcctctgccatgggatcagccggtgaggcactcccgccgccggccagtgagacgcgaccatgggacaactattctcaggccaagctttccacagtcgctcttgcgcccaaagggaggcgtgcggcgtcagacgcgccggcgggaggggaaggcggctggagcgggcaggacgagaagccggcggccgacgacgactggcttccgatcaacgcgaggaggaacgccaagtggtggtacgccgccttccacaatgtcaccgccatggtgggcgccggcgtgcttacccttccctatgccatgtccgagctcggctggggcgtgggcgtcacggtgctggtcctgtcgtgggtcatcacggtgtacacgctgtggcagatgggggagatgcacgagtgcgtgccggggaagcggttnnaccgggaccacgagctgggggcagacgcctt

SEQ ID NO: 39212 - DNA, 374 bp, Zea mays
  Clone ID: MRT4577_135760C.1
agatcttgagaaactaaaaaaatttcatgtgtagagatttccatggtctataggaaaagttggagtaaatttcaagaattcagttttggactcaaggttgatttgctggaaataatatccactagctaactttggaccattgcaacttttaatctatagacaattcggagatggttaatgtagcaaagttgaagtgttgcattaggtgtacaaagttacttaagcaacctgacccaagaaccatatggaactagatgaaaactgtgtccaaagatgggatgtcagatatgggaatttcagaagctgagtttcagtgcattttgtcaagtttggagcactgtaacttataatccatggagctatagattatggtc

SEQ ID NO: 39213 - DNA, 1578 bp, Zea mays
  Clone ID: MRT4577_135761C.1
cattgggtacctcgaggccggccgggatgcgcgcgtcggccccgtgggccgtgagtccgtgatccagcgtcccaggacccaggctcccagtaccagcctcttctatccggcatccagcgagcagcaaatccagagacctcgactcctcctaaccctagccgccagccgccaggctccagtgctccaccgctccagcagatcccggacccggaagcagcgaggaaacacagggcgaccaaggcccgtctggactctggatccgccggtccgccactccgcccctcatctccgacctgagcgcgccgccctgccccgccccgcctctccctcgagcgctgtccgcgcctccgcgcctccgcggtccgcgtccggccgtccgcccagggcccaggcagttgctgcctgctggcttgctgccgtccgccaggccgcctaggcacacagcacactacttctacagttctacggccagcgcccagcggtccagtccagcttccaaatggctagtgaggactcgaaagatatgctgaagaacgtggactggaagaccgtgggcggtgctgtgactactgaatctagccagccagttgtcaagaaacgccttccgaagaagatcagacaagtccctgagtgctattttctgcctcggcgatctttgccttctgcactggcaatctatggtgccgtgtgtgctgctggagttggtgcaggaatgctgatcgaggtgtggataaacaaaaagatcaaagaggatagtgctattatctgggagatggataaatgatgtgcagttctgcaccacactttgatatggtggaagcagtttcggcactgcgatatttgctagctctcaagttaagaattttgtttataggattccttcgtccgtttgttttattttgattgaggtattgccaagatggattcaagaacgttcatccgcagttcatttaccagaacacgagtaaaaactctggctgctgaaaatatagctccaccacaactctaaaataacttataatttgaaatcgaggaagtatttctgttatcatgctaaataaaatgttgtatattctagttttttttcacatgactccctcggttccttggaagtgcaacacagcacttgcttgtttcaggtttttctctctcttttgcctctattctccacaaatgagaaccgatgctaagggcatgtacaatccacactgtatcttaagggatatatgagggtgtaaatgaaaaaaagaatgatatatgaggttttaaacgaaaaaaaaaaaaaaaaaagcgggttaaggaatgtctatgtcacacttttctaagtctaaggtacggttctacactcctacttatacaattcaaatcaatgagttatcttttaagtgattctagtgaatacgataaaaaaatgtagatacattaggtagtatgaagagtttcttagatgtatctagtgcttggagaactataacatagtaattaagtcgtacatgctatacgaacatgtttggctgagctataggataagctgttgctcgtcgatccgtcatatggacattgcactgtatattactc

SEQ ID NO: 39214 - DNA, 205 bp, Zea mays
  Clone ID: MRT4577_135762C.1
tagcacatttttctcttcatttcattagtattttattacaatagtaaatcgatcccattgtcattttttccactctataataacaataaaaacaaaaaaaaattttgtctacctcctactaatgtacttcttcacccctgaattaatttcttacccttacctgccaacctaccacctttccctatattaagtcctattataactt

SEQ ID NO: 39215 - DNA, 262 bp, Zea mays
  Clone ID: MRT4577_135763C.1
ttgaacaggagggtacttctttataagcaggcgtctccacgttagtacacagcatagaaacgacgctatggagaaaaactgatacggcttttcagctgtgtaataaggggatgcgcttgatgtccgcctggattcgatggacgagaacaagactggcctaagctaaaactaggtgggcaagattttattattgttgaccacatctcatttaactacttgatcgggacgccataattgtctggggcatgtgcactggtgctag

SEQ ID NO: 39216 - DNA, 324 bp, Zea mays
  Clone ID: MRT4577_135764C.1
acccacgcgtacgtcctattattcccccactcccccgggttataatcgccaccaccagaccacaccacagcagccgtttattacactggagccgcgcccacaacaaccgccaaaaccgctagtatcatgccgcccacaaccaaaagccataccagctacagaagacaccgccctcgacgccaccgtatgcctcaatagcaatcaagacgaagagaaacccaccgaacccgccctgctccagaaacccaaacttcctaagctcaagtcgtaatagcatcagctacacaactcctagcaacacacaagcccactgtacacctacgt

SEQ ID NO: 39217 - DNA, 438 bp, Zea mays
  Clone ID: MRT4577_135765C.1
ttgagctggctatggaaccaaggcctagactccatagatttgaattgaagcatgcgcggccacgagccgcaagagggcatctgaaatcaggggactttatatacaaagctaaacgtaaggtgactagtgatttacacatgttgggctccttgccaagtacagtctgactacctgcaaaaagccatgcgtgtgccgcctctgattctatgtaagcagtaatcatctgacactgctgaagtgctatctatcctagcatcataccgtttgaccgaggctaaggcattgcatccataaaaggtgggtactatggacagaagcgtgactgctgcccagattccgtttagagcctgacggacgccagctcgagacaagacccataccacatgctctgtatggatggctccgacccaggatggccgttggccgctacctagatgg

SEQ ID NO: 39218 - DNA, 361 bp, Zea mays
  unsure (1)..(361): unsure at all n locations
  Clone ID: MRT4577_135766C.1
ttcaagaatcatangatagtcatgatggtctgcatataagcaggggtaatattttaattactgtggcggaagtaaaactaacaatggacattggcgatgacgtgtgtacatccattcataagcggaagcaaccgaaacaaaagggtgctgtgaggttaactgaggtttcatgcaatctggttcacatgatatggtacacatgagattgaccctatgagcctgctgaaggtagaactggttcaccccaccaagagctaaccgagaaacttgtcgatagcagaatggacttagtgccaccatttcggagggatgtacaagaaggtcggctcctccaatatggacgtcatgaagtggatgcttt

SEQ ID NO: 39219 - DNA, 2096 bp, Zea mays
  Clone ID: MRT4577_135767C.1
cggacgcgtgggaaaagaaactgctgatgatcctgttagcaatcagtagtttgaggctagttccacttgcactgtatccgatcactaaattggcatgtaaccatagagattattaggttactcataccacgctctgatgtccaaccattaatgtattggtataatgcgacgcacaaaacgaacagaaaaaaatccagaaaaaacgagtctttaatcctcgcgatcgaccgcaaagcccccctctgccccctccttttcccctccctcccaaacgcaccgccgcgtccgcccccttcgctgcccctgcccggtcggttccgatggggtacgtgctgtcggcggtggcgagggtgctggagcagcccacggcgtggggggcggcccgggagatggcgctcctcgcggggccgctctgggcggcggtcctcctcggcctcctgctcggctgggcctggcgcccgcgctgggcagctggcctcgtcgccgcccccgcccccgccgccgctgcgcagccgcccttcgccacgctcggtttctggaaggcccagctccccgcccgtctccgcgccccgctcggctccgccgccgccgtgcggcacggggaggaggaggaggagacgaggtctccgtgcgaggtggcaggtcgtcggaggcggcgagcgaggagctggcggtggggaagcgtgacctggccaacctctggaggctggtggagggcagggacggcggcccggcctggatcaagatgatggacaggtcgcttcccaccatgacctaccaggcgtggcggagggacgcgcagaccggacctccacagtatcagagtagcagcatctttgaggacgccactccggaggaagtgagggacttcttcggggacgacgagttccgtgtgtccaacaagtgggacgacatgcttgtttaccataagacgctggaggagtgccagaccaccgggacgatgaaagtgcattgggtccggaagttccccttcttctgcagtgacagagagtacataattgctcgccggatatggaaactggggggcgcctattattgtgtcacaaagggtataccatgctcgtccattccacggcgcaacaaacctcgaagagttgatctgtattattcaagctggtgcatccgtgcagtggaatccaggagagggaacggaggagggtcgacagcttgtgaggtgctcttgttccaccacgaggacatgggcatcccgtacgagatcgcaaagctcggtatccggcaagggatgtggggatgcgtgaagagaatcgagcctgggctccgggcctatcagcaagccagggctgcaggggagccggtgtcacggagtgccctgatggcccagatcaacaccaaagtcggcgacagctttgtccggtcgctggagtccgacagcgacgggtccgaaaccgtggaagcggaagagaagcctgcgaggaaccgtgtggcgaggttccttgtgcttggaggggcagttgctctggcctgtactcttgaccaagggctcctgacgaaggctctcatcttcggcgtcgcgcggaaattcgtcgggcagaggaaggcactgtagcatctctggcatttatttctcagcgtcgtccgcttggcccgtggtccgcactaaccggacctgtcctttcactgtcgtagagtggaggatagaggtggttcagtgtctgcctaattggggcaaatgccattgaccattgtggctgaaagagaacagagctgatgaaaaacattttggtgtacagatatgctgccggctgttggatagcgaggaatggggaatagagcaaacaatgtacttctcgtttggagaacggaactcctacgatatatataaatgtgtttcatctaatcttgtatctcagacaagaacagatcagatgactgtgcagatgagaacaagcatttttctatgtagcttaccgcggttttaatccggctacggtttctacagtattttgtcttaatccggctacggtttctacggtattttgtctctatggattgcagctgcagcagtggctgccagccagctgaacaataatttgaatctagaatttgaattccat

SEQ ID NO: 39220 - DNA, 610 bp, Zea mays
  Clone ID: MRT4577_135768C.1
gctcccttgtccaacaaatcaaatgatgcaagggatctacaactgtagatgaacttgggatggtccattcatttttgagcacgaggggtgattcttgtaactatacgaaaaatctaatgatgcccgtctccgcggcatacagagaagcagccaacgtgttctgcaagcccaaagccagcacggagtacatcgcgtacagcagcgacggcttcaagctgctcatcccgtacaagtggaacctcatcaaggagcgcaagttccaccggcaggtgctccgctacgaggacaacttcgaccccaacagcaacgagtacgtcatcatccacaccacgttcaacaagaccatccacgactactgctataccaaggagttcctctaccagtttgactacctgctcctcaggcaggcctactgcgtgaagaccgactacgacggcgggttcaagaccgactccgaggccaccgtcaacatcctggagagctccacccccgagatcgacgggaagctagactacgccatgtacgtgctcaccaagacggccgactgcgaccagggcaggacgcaccacctcatcgagggcaccgagtaccacggcatgctctacatctg

SEQ ID NO: 39221 - DNA, 379 bp, Zea mays
  Clone ID: MRT4577_135769C.1
gggggggacaagacccttaaaaaacccaagcccttgaatttgggggatcaaaaagggcattgttttttggaaattaacctaaccggcccaccctaaaagggggggggagccccaaaccaagattttaattttttcttgggtaactgggtaacaaaggccgggtttacctatgacaaagatcgttttttgttttaccagagcaatcacatacaagggacgttttttacaaaacgggtggtacttaaaagggaacaaccacttttgggatttacccggccatgatgcaaataaagggttttttgcaaaacccagacttgggcgcctttgggccataaaccttaattggaaccccaagttcggggcctagggggcccttttt

SEQ ID NO: 39222 - DNA, 285 bp, Zea mays
  Clone ID: MRT4577_13576C.1
cggaacgggaaaaaactcatttggggccgggggggtttaaagcaaaccccagggggggttaaatacaaaattacaaaatcctctcaaaaaaaaaactttattttaaaatcggcctactttgtctaaaataaaggtttgcccaaaccatttggcggaggtttcgacccaaaaacagctttggggaaggttaatttttttggcccacatgggttaaaaacaaaaaaaactccccatttttttaaaacatcccctaattgggggggcttttcctttcccaactataaa

SEQ ID NO: 39223 - DNA, 290 bp, Zea mays
  Clone ID: MRT4577_135770C.1
cctcgaggccggccgggattcgagctcttcggccgccgctcctgtgagataagctaatactacatgaatccgaagcgtccatggcagatatacctgtgctcacatcgtgaccggcgccctgtctgtcccgaaaggagcccgcgcggctgcccaacgcgtggacaaccatgtcctgcttctggacgaccgggcacacggagccctagatggtcttgaagtacatgaagaccgccgagcgcccggtctccgacctccgccacgacatcaagagagatctctccgacgacgtc

SEQ ID NO: 39224 - DNA, 387 bp, Zea mays
  Clone ID: MRT4577_135771C.1
atgggcacgacccaactggcccatgaggcgggacagcttggggatggcaccgcgaggcaggcccacgtgccaacgagagggagagggagaagggacgacgtcaggagaagcgagcaccgtctgggaccaagcttggaccgtctggcctcagacgtggaccgtctggtcgttgaaaaaccagaaaaacctaaaggtgacgggttcggtaaaatgcattttagcgtcctcgcggaccgtctgggtgcacggctggatcatctgcgactactttatctgatatctgaccacacattaaatgcacctgtagccgttgatatagccattactgctgaccgttgcgatttcagtcgtcgatgtgcagtggcgcgggccattcgcgttgactga

SEQ ID NO: 39225 - DNA, 201 bp, Zea mays
  unsure (1)..(201): unsure at all n locations
  Clone ID: MRT4577_135772C.1
ngacgccttcctccttccacgttccctgcccgccaaccaggacgtacacgccgggcacacgtcacagccttgaagcctccctcccacacaaccccaagccccaacacaaacacacacacacgatcggtctcgtcgcagcgcagcgccgcgccgcgggtttgatcgtcacnaagtggcgacttccttcccttccctctttcg

SEQ ID NO: 39226 - DNA, 341 bp, Zea mays
  Clone ID: MRT4577_135773C.1
ttttatcccaaaagatgtctcgtacatgcttatatagccacagagggggcagctattaagaaacaactagttaggaaataactaacaaggaaacaactcacaaggaaataactcccaaggaaataactttcaaggaaacgacttatatggaaataacttacacaggaaacaattggtttggtggctaacttttcttctaaccaattgccttcccttcctgtgtgctggctgagcgctctgtttccctgcgcacataaacgcgcgcctggcgtatgttcccccccacaacaaatattttttacaaaaatttctgcaggacttaaaaaccctttctcaaaatt

SEQ ID NO: 39227 - DNA, 171 bp, Zea mays
  unsure (1)..(171): unsure at all n locations
  Clone ID: MRT4577_135774C.1
accccattcccgcagtgggagcaaactgcatgcccagagacccagcggacacacgcggtttggtttgcagcgactggcatactatgtggatgtgacagtggcgtttgtaatgagagcactttctttnctttctatttcactggancacaataaatggctgtaaaatctcca

SEQ ID NO: 39228 - DNA, 113 bp, Zea mays
  Clone ID: MRT4577_135775C.1
gattcgtgaggaactgcagtgagacactctggcgttgtcggatgacttaaatgcttggggcggcctgcgtagtgtcggtgctcgcactgcaaggagtgaactacacggggcgt

SEQ ID NO: 39229 - DNA, 741 bp, Zea mays
  Clone ID: MRT4577_135776C.1
ttttttttttttttttttgcaatcttaaatggtctttatgcattagagctttattacatgattaccctattagattgaaaaagccggtgacttgtttcgggcctaattcttactttgggagcaaaataacttgtgagatttattgtttctcgaatgaggttgatagagcatttgctttttgttcgtcaaccttcaccaaaaggtaggggacatatgttgagcaccaatattgcccaccagacgtcccgcggcgcggacagtccgtggtggcggcgaagacggtctgaaaaaatcgagcaaccttgaagaatccttgaagaacctctgtgagaactgatctcacggcgggacataatacgctaccagggataagtgaatatccagatctcctgctctgctgctcgccacctcgggggctctccggcgttggctcgacgcggcagcgccccccggtagcctagttccggatcccccaccgcccacgccccacaggtcaagttctgtgaccccggtgagtaagctcgatatcttcggttcctcgcacgaggatggggatttatagccgaggaggcttccgtggttttgctgctgggattttgttgctttggcgagggattggaagctacttccactggctactgatcaaacagttggatctgtggattccgcaacaaataagtttctttaaggctattgttggaacttgctctcccgagcaagatgatccaccggggagtgaaa

SEQ ID NO: 39230 - DNA, 365 bp, Zea mays
  Clone ID: MRT4577_135777C.1
gaaactcagagagtacaaacccattacttgcacgtacatgatgtaccaagctggggcaattctagactactcggacaattcagactatactacgacgacacatagctcaccctctctctcccggtctcctccggctcccagcccgtcgccgaccgcaagcgcgcccactctgaccacaacaagccgtcatgcccaaatgcgcgctccgtacactgtccgactgtacaaacgtaccggcgcaacgcgctacacgaccaaggcaccaatctcgtaaaagtaaccaatgaccaatcaccgtaccttcctaaagatgacctcataacacacgacgggtactcacaccttcttctctcgctccacagcat

SEQ ID NO: 39231 - DNA, 688 bp, Zea mays
  unsure (1)..(688): unsure at all n locations
  Clone ID: MRT4577_135778C.1
aattcggcacgaggctcccgttcagccgcgtgcgctctctcgctctcccagagtcccagcgcgacgactggcgaccgccgcccccaccctgcgccacgtgccgagggcttcgccgggcccttcgccgctcgccggcgacgagtacacaccagatccaccaatctcggacctgttccctctcaatacacgtgggttgttgtcgaaaatgaaccaatgtccccctcaatctctcccaacataaatggattgtgggaaattatattgtttctgagcgaggactacaatatacataactgctggaggccgatgaagcccaaagctttgtgcataagcttcagctcagtgtctcggggggccttcctcatgctgtgccagtgccaggcttgagaacagaagaacatgagctggttaaagctgttttccaggtgctgcaaggcttcgagacgtcctggttctattgggacagtgatgtgccttggtaccatgagaaagcggngatatatgtggctcacttgtcactgacgggccttaggtctttgttgagtccattcctgttcacggcaacatgcttaaagcaagtagagctttttgttgggaaggttaggatgcaacatcacaagattccgacgttggatgcngtcgctagctcggntgattcttggcttaagagctccgcaaagcagctctg

SEQ ID NO: 39232 - DNA, 757 bp, Zea mays
  unsure (1)..(757): unsure at all n locations
  Clone ID: MRT4577_135779C.1
atcgaaaggaggtctggttttcctgctcccgttcagccgcgtgcgctctctcgctctcccagagtcccagcgcgacgactggcgaccgccgcccccaccctgcgccacgtgccgagggcttcgccgggcccttcgccgctcgccggcgacgagtacacaccagatccaccaatctcgggcctgttccctctcaatacacgtgggttgttgtcgaaaatgaaccaatgcccccctcaatctctcccaacataaatggattgtgggaaattatattgtttctgagcgaggactacaatatacatgtattacatccactaccttcgttcgttatccggtatcctatactgatcgccccctgcctcaagtggatccacaatggttctgcctcgtcgaaccccagaactgctggaggccgatgaagcccaaagctttgtgcataagcttcagctcagtgtctcggggggccttcctcatgctgtgccagtgccaggcttgagaacagaagaacatgagctggttaaagctgttttccaggtgctgcaaggcttcgagacgtcctggttctattgggacagtgatgtgccttggtaccgtgagaaagcggggatatatgtggctcacttgtcactgacgggccttangtctttgttgagtccattcctgttcacggcaacatgcttaaagcaagtagagctttttgttgggaaggttaggatgcaacatcacaagattccgacgttgggatgcgtcgctagct

SEQ ID NO: 39233 - DNA, 197 bp, Zea mays
  unsure (1)..(197): unsure at all n locations
  Clone ID: MRT4577_13577C.1
ggggcggcctttctttttttttttttttttgaacaacacatagttntggaaacaagtctacagattaacgctgatacacgagctgtgacaagcgttaggacaggtacacacatagtacacttatagggttggccatatatgtatagaagaggctttttgagggtatagaagtactagatagggcgcctactggcata

SEQ ID NO: 39234 - DNA, 431 bp, Zea mays
  Clone ID: MRT4577_135780C.1
attcagggtcgtcgagaacttggatttgccccttcccactggatgccctcaactaggtgcaagataatggggatagctttccatttttcctcgtcgaataaatggttcagtccccaagtacactagtgtgagcaattgtacccatggaggttgaaagcctttggagcgatagaccacacgtggcaaaaaagcttgagcaaggacttgatgccgatagaacaaagcaacagtgaagagcaagtgaagttttgattgatgaaccaataaggacacatgatgacatgaagtggatcatatcattcatgatgttgattgcatgtttctgtaccatccccattagagaaagagataaaatggaatgcccaaaacatgtataatttgtagaacatttcattttattattcaagggttgtgtagagaagtaattgatc

SEQ ID NO: 39235 - DNA, 163 bp, Zea mays
  unsure (1)..(163): unsure at all n locations
  Clone ID: MRT4577_135781C.1
atggggaangggtattggggggggggggttnagacccctgggattgggaaaacccttaagccctttgttaccgtgggggtttggggaacacctgggccgcgtcaaacattttggggtttaaaacaccggcggggtgcaagcccgcaaaaatcaacccttgttt

SEQ ID NO: 39236 - DNA, 233 bp, Zea mays
  Clone ID: MRT4577_135782C.1
catatccatgcaatttcgagcgcgcttgttcatattatttgtttagtttgtttcacaaaaataagttcgcaactttaaaactcttggggtacaattaaatgacacactccaaaaaagtgacttatttttgttcgggaacaaccacccaaactagggcggggcaccaaacttgttcaggacatccatttggagcattgctggagggcttttttaacttttcctggaaccaatac

SEQ ID NO: 39237 - DNA, 522 bp, Zea mays
  Clone ID: MRT4577_135783C.1
atttatttttatttttgttttattgtcaagccggaagcaatcgaatatgactcgttgatgaaacaacagaatacatcccacttctaaaggccatgctaaccggatagaatctgaccagtgttataacgtggtgttgcatgtgccttaagcacacacactcaacgacaggtccataaaagagcttcctagactgacttaaggctcccattgatggagggtgaccagcaccaatctttatgccttgtgccatgtaactgaactgtcctttcgatccctatatcgaaagcgcttccttttgcctgccttataacctgacaactaactaagtgggcccttggactaagacctatcactggaaccccttgaactataccgatccattcttcctttccttgcactattaccttccattcaactcccttgagcgataccgcttcattgaatacgttaaactcgaacgatctcttctgtattcccttgaaccagaacgcttccttataggatgatgcaaaggacatgtga

SEQ ID NO: 39238 - DNA, 841 bp, Zea mays
  Clone ID: MRT4577_135784C.1
tttagtggcacaggatcgaatgtcacatctttatatataacaggagttctatacaaaataaataattacattataaggagacaacggtcctgcaacccaaagttgactgggagacgacgacctagacctctcacgaacatcacagcatcctccacgcgcctcatcctggggtacctgttcttgaccgagaatgacgcacagacgaagctgccccgcaccatggcggatctgcggcgttgccagagcgtcggtgagaaattgccacacccacggcaacacccggtttctctgatcgccaccaccatgtccacgacgccacggtggtgcttccgcgttgaactccgatcggttaacgaccacgcctaggggacttctccagcgacggtaatcctctgctcacgtgggtgtgggttggcttcggcgtacatggatctggggtgcgggtgcgtctttatacccagacgaatcggccaagggttgaacggagggcgtcaccatcccgattagcacggcggtcgccggattctagtggagttgttgagatctctggcgcagtttgttgcaatctggtgatacgcgctcaaatacgcaggggatccacatggcccaccagtcagccgtagtgcacccgcaaggatgagatcatctgtgacctcagcatgatgtcactgcaccggaatatattaaagaattctggcagctcgccaagtatgtacgtgagcatatggtttccggcccaggttggttgggtgagccgagccagagctccatgcgtccaggtaacgtgtttcctttttttgttattttcttttttacttttataattctgcccacgcgtccg

SEQ ID NO: 39239 - DNA, 267 bp, Zea mays
  Clone ID: MRT4577_135785C.1
ccacaaggccagcttcatcctgcccacctttgccaagaaggctctggagtaagggaagttgacatggacgatattaagagtgctgaaaaacaaaaaatgaaacaagaaggatttgaatgttccttgatgagcaatggaattagcgcagaaggattaaaaagttggacttataggccgtgaaaaggactaagacaaatatagagtgatatactctaaatgtagagagaagatgaaataaagatctaatagatcgcttttctcatgaaa

SEQ ID NO: 39240 - DNA, 489 bp, Zea mays
  Clone ID: MRT4577_135786C.1
ggcttaccacgcatcagtgatcaccgagtcactgacgccttgcccggaaccaaattattgaccgacaacgcgatgctccaaggggtgctgtcccgcgcgcccgccaccgacgctgcggcagcaatgaaggccaagcgggcgggcgcgtcccccggtgaagaggaggaaggggacggccgttctgcgcgggggaagcggcagcagctgctcgggcttggccccgccaccgctttggcgtcggcggcggcggcggaggaagggccggagacgcgaggcctgcggctgctcagcctgctgctgcggtgcgcggaggcggtggccatggaccagctgacggaggcgcgggagctgctccccgagatcgcggagctggcgtcgccgttcgggtcgtccccggagcgcgtggcggcctacttcggggacgcgctgtgcgcgcgcgtgctcagctcgtacctgggcgcctactcgccgctcgcgctccgcccgctg

SEQ ID NO: 39241 - DNA, 465 bp, Zea mays
  Clone ID: MRT4577_135787C.1
acgagactgagtctgctgccgttggaactcgtggcttcaatacttcaaagcataagaagtatggttcagtaggactcctggctccaaacatgcatgcaagaattgttcatgtggaaactggttgctccttgcctccaggctcttgtggggagctctggctccatggtccagctataatgaaaggttacttgaatcatgttgatccatgcgcaataaatggtggctggctgcgaactggtgacattgcctacttcgatttcgatgggtacttgtatatagtgggccgcttgaaagaggtgatcaagtacaagggatttcagatagctccagctgacttggaagcagttttgatcgaacaccctggaattgttgatgtggctgtgacgtctactgaggatgaagaagctggagaggtaccagtagccttcgtggtgaggaaatctggaagtggcctatcgtgcacgc

SEQ ID NO: 39242 - DNA, 147 bp, Zea mays
  unsure (1)..(147): unsure at all n locations
  Clone ID: MRT4577_135788C.1
gttataaccaccctaaccctaacttnngtaatnccccccatccttacnaccctcgttaaccctaacaaaaaanactcataccccccattatgtaanatccattgtggcatccacctttattatcagtctcttcnacacancnganna

SEQ ID NO: 39243 - DNA, 559 bp, Zea mays
  unsure (1)..(559): unsure at all n locations
  Clone ID: MRT4577_135789C.1
tccttttcggtacgatccgaatccacccatgcacagctctgtgcagagagagactcacacactgatgggtgaggtatggtctctgcatgcgctgcagatccggcgcggcgaggcctgctggactggaagacgaggttccacatcatcgagggcatcgcccgagggctcctgtacctccacagggactcgcgtctccgcgtggtgcaccgcgacctcaaggccagcaacatcctgctagaccacgacatgatccccaagatctccgacttcggcatggcgcgcatcttcggcggcgaccagaaccaggtgaacacgaaccgcgtcgtgggcacgctggggtacatgtcacccgagtacgccatggagggcctcttctccgtgcgctccgacgtgtacagcttcggcatcctcatcctggagatcgtctccgggcagaagaacagcagcttccaccacatggagggctccctcaacatcgtcggctacgcgtggcagctgtggaacgccgacagggnggagcgcctgatcgacccggccatccttgcgcgtgctccgtgcg

SEQ ID NO: 39244 - DNA, 581 bp, Zea mays
  Clone ID: MRT4577_13578C.1
tttttgacggcgtttcgcgggacctcggcctctccatatccgagttctcggtgtgcggctggttggccaacgaggacgccatggtctggggctgagtcgccagtggacactatggccaagtacgatgcccgcagaagggtcactgatgattgcaggcgttccgaacgccatgggctggctcgcgatctccctgtcttagggacacttcctatactgtacggggggaggtcgctggaaggatacaatgtcggcgtcatcgactacgtggggcctgatatacgtagcaaagatatctacttataacatgaaaggagctcttggcgccgagaaccccatgtctgcaaccttaggtgtcgggttgagccgaagcgcatggctcgttaattcctaggatgctaattgctataataggaacctacgccctgcctactgacgataccaagcctgttcttcattccgcaatcttcaatatggacgtctactatgaatattaaggacgagtgctaggattctctacatgtcctgagagggatggacgctgacatcactgacttacgcaagatatacagatagctgtagca

SEQ ID NO: 39245 - DNA, 1051 bp, Zea mays
  Clone ID: MRT4577_135790C.1
ctgagatcgtccacggcgacaagacttacactattaccgaggccaccaccctcaccatcactgattgcccttgcactgtcaccaagcctgtcatcaccacctccgctgtcgtctgccacgactgccctgctcctcccgcccaccacggcaacaactccaccctggtccccgtttaccctaccggtaagcccggccacggtggtgagagcggcaagcctggctctcctgctggtcccggtgctacccccaccgctggtgctccttccgaggtccccaccgcgggtgccggcaaggtcgccgctctctccggtgccggtctcgctgcggtcgtcggtcttgctgctttcctgtaaatcaacagctagcaagcctgctccacgtcgtgcctacgatgctttacgctcagtaatacttaattcacgtgggggcttccgtcattcctgatggagtggtgtggaacagttagcgatggtttggtttcagttggggatgcaagcgatctttcggggaatgtatagaactttttattttgggttacgaacatacgtcacgggagaaccggtatacccttgcaacgctctatggagtcttgtctaatgatggccacgctttgcaggagttgagacattcttgtatatgagttttgtctcggtgttcggaaggagctcgcatattccctgtgtgtgagatcttctttcggggctgggaatataatgtgttttattgccttgagcaaaacaggacgatcttgtctagcttcactcgcggttcgtctttgtttctgctcccatcaataacttcaagagacgcatttccaacctcgaatcccgtttcctcttcttgatacatatttttgggttgccaaacgtctttaatatttgcggtcaggttactggtgcatatatatatatatatatatacacaaagccgggcgtgtttatggtctcttgtcaatcagattcaatgttattgcgagcctctgggaaaccatgtatcatagtcaaggcaaaagcaagcattgctgagaggccagttttggtccggcattatt

SEQ ID NO: 39246 - DNA, 881 bp, Zea mays
  Clone ID: MRT4577_135791C.1
cactcctaagggcaattgggttcctcgaggccggccgggacccacacactttctttcgttactactactataccttgacttttagtcaatttcactcgctacagcacatctaccaactatacaacttccgagttaccttaatttaatcccaaccccaaaccaaccgacaaaatgaagttcgctactgctctcgctttcgctgctggcgtcgctgcccacgccaagaacgtcacctacaccaccgaggtcgtcactgcctacaccacctactgccccggtcccactgagatcgtccacggcgacaagacctacactgtcaccgaggccaccaccctcaccatcactgactgcccttgcactgtcaccaaacccgtcatcaccacctccgctgtcgtctgccacgactgccctgctcctcccgcccaccacggcaacaactccaccatggtccccgtttaccctaccggtaagcccggcaagcctggttctcctgctggtcccggtgctacccccaccgctggtgctccttccgaggtccccaccgccggtgccggcaaggtcgccgctctctccggtgccggtcttgctgccgtcgtcggtcttgctgctttcctgtaaatcaacagctagcaagcctactccacgtcgtgcctacgatgctttacgctcagtaatacttgattcgcgtgggggcatcgatcattcctcatggagtggtgtggaacagttagcaatggtttggtttcagttggggatgcaagcgatctttcagggaatgtatagaactttttattttgggttacgaacatatgtcacgggagaaccggtatacccttgcaacgctctatggagtcttgtctaatgatgcccacgctttgcag

SEQ ID NO: 39247 - DNA, 2074 bp, Zea mays
  Clone ID: MRT4577_135792C.1
gtatgcagtatgtaaccattactgcgtttttttcttcctttgagacttaagctcacatgtcttgtagttcatgtatatactagacagaaaaaaaatgctgaacactatattacaaatacaatcttattatggtatttaggggcagactagttggtggcttcccaccaagtccagttttgatcctttctccgatcaaagcccccaaagaacaacaggcaagaagaaaagaaaaatgcagtgtacttaccccgacaccaacaaaagagaacaaggcatccaacggaaataaggaatccaataccaatcccactattgccaactactatctagctgtgtctatctgtcccccgcccatacctctccttctgttcttcacctcacctggctctagctggctggctggctgcctgcctgcctgcctgtgcagtatgtacaccacttcattatcatgttttccctttcttatctttttctttctttatattagtagtttattgcttgcgtttttttttctagatcaccactcgtcctaaggccgcaatgtgattagtaattataataccaactaataattaccacagtaactgagaggagaaaaaaaaacaagaaacccatgaacaaacgggaggccggcggagacgacggcggctggtgaacgcaggacgaggcggggcgctagttcatgtccaccatggcgtcgtggaagcgcgagacgcggtcgggcgtcacgcactgcgtgatgagcctcgcccctggcttgtgggcccatggcttgacgaggatgcacgtggcgatgtagtccaggttcgtcagcggtaccacgtgggctggcgggccccacccgtagtccacctccgcgaagccgaggcgcgtccaatccgacaccagcagcgtccggtagtcggaggtgatctggtaggggtccacgccgtcggcgccctcctcccccgccgcccaccgcgcgaactccaacggcagccgcttcttcccctccctgatgatcttcaccacgtcggtgacggacgacgaggacaccttgtcggccggccgggacccacacactcactttcgttactactactataccttgacttttagtcaatttcactctttacagtacatcatcaactacaaactttcgagttaccaataatctaatacccaacccccaaaacccaaccgtcaaaatgaagttcgctgccgccctcgctttcgctgccggcgtcgctgcccacgccaagaacgttacctacaccaccgaggtcgttactgcttacaccacctactgccccggtcccactgagatcgtccacggcgacaagacttacaccatcactgaggccaccaccctgaccatcactgactgcccttgcaccgtcaccaagcccgtcatcatgacctccgctgttgtctgccacgactgccccactggcgagaagcctggcaagcccaaccaccccggtatgggccacaactctaccatggtccccgtctaccctaccggcaagcctacccacggtggtgagcaccccgtcggtcccggtgccacccctaccgctggctctccttctgaggtccctaccgccggtgccggcaaggtcgccgctctctccggtgccggtctcgctgccgtcgtcggtcttgctgctttcctgtaaatcagctgctagcatacaatgcctacgatgttttacgcccggtagataccctatttacgctgggagtgcaatgtgggaaggctagcaatggtttcgattcgatttgggatacgcaagcgatctttcagggaactgtataggaactttttttatatatcctttttgggtttacgaacatacgatacgggagaaccggtataccactgcaccgctctatggagtcttattgtctaatgatggccacgctttgcaggggtttttggagacaaattcttgtatatatatgagttttgtctcggtgttcggaaggagctcgcatattccctgtgtgtgagatatcttctttcgaggatgggaatataatgtgtttatcttgcctttatggctacaaaaaaaaaaaaaaaaaacccgcggcc

SEQ ID NO: 39248 - DNA, 312 bp, Zea mays
  Clone ID: MRT4577_135793C.1
atctcccccaaattaaacttttttggtcaaaccacattatgcgtccttttttaaaaaaagaaaagggggaaattttagtttttccccccctcacaaaaaccttaaggcctttcttttttgatttcccgtcactttattttttgggcccatagtcggggggttatggggggtcccaattgcaaactgtttaacaaaaacccgaatttttttagaaggaaagctgggaccttttcccccacaaacattttgattggtttggggaccgttcaaatgccctggtggcaaagcccatgggctctttttgggcaaggg

SEQ ID NO: 39249 - DNA, 1563 bp, Zea mays
  Clone ID: MRT4577_135794C.1
ctcatgtcgccaacagagcagagccctgacgcgtgggcggacgcgtgggcggacgcgtgggcggacgcgtggggtgaaaatgtgacatgcatccagttcaaccctgttgatgatagatacttcattagtggttcactggatgaaaaagttcgcatatggagcattcaaaaccgtgaaattgttgattggaaagatttgcatgaaatggtcactgctgcttgctataccccagatggacagagtgcactaattggttcccataaaggcagctgccatatttatgatacatctgataataagcttctccaaaagaaacaaattgacctgcaaattaagaaaaagaagtccagtcagaagaaaataactggatttcagttcgtagtttctcccagggagtacttcaagggtccttattacatctgcagattcaagaatcagggttgttgatggccttaatctagttcacaagtacaaaggtttccgaaacactaacagccagatttcagcatgtttagctgctaatgggaggtatgtgatctcagcaagtgaggattcccatgtgtacatatggagaaacgatggtagccttgaaaaaggcagaagcaaggcgaatgttactgtcaccaattcctatgaacatttccactgccaggatgtgacagttgctgttgcaccgccatctaatggctcagcagtggtatccagatcaaactccacgaagcacgatgagcgggattctgtattggagcatcctatgctgcatgctgtccctgaaaaactgcaagattcctccgatttgcagcttcaaagtggcaatatcctaagcaccagttcaaatcacagcggtgatagagcaacttggcctgaagaactgatgacgccaacaaagcagagccctcagtctagtgccagtcttctcagcggtgctgatcaagctccaagctggtcagcctggggaactgtaattgtcacagcaggccgtggaggtcagatcagagcatttcagaactttgggtttcctgctcgagtatagtactgtagctatgagaccgctgcctggtcttggcgtctgccctgcagcaagacgggtgatttttgtgtatagataggtgaaagtttgggtgatctgcacgcagtctgggactggattctgttgctgctcctaggtgcacctgcctgcgaacttcaactaacctacgacctggtactcaaggtacggcgaattcgtttgcccggaattgtatatgagaatggagcccgggaaggacgagcgggcgtcggccggttggagctagatctttgggatctttttgccagccatcttttcatctgttttctccattgagtccagtttagctttttcatttttttttactttatgtttaccagctattatatatttttgtaagaaatcttagttctacagaaatagaaaagcaaaaaagagttgcatagagtggtgaattcgttgtactggtatagcaggctttgagatgttggtagtacagctggtataataattgagcggctaggaaaatatggagacaaaacaattgagttctg

SEQ ID NO: 39250 - DNA, 353 bp, Zea mays
  unsure (1)..(353): unsure at all n locations
  Clone ID: MRT4577_135795C.1
tnttcgatgaattttatactcaccaccaccctataggacggcagaatctattataactgctactaaaaccccgcnggnacaattgctacctttatctgaatcagagcggataacctccatcattcctgtgagttaattttcttaaaaccaatatctaatgatactcaccattaaaggctataacaaaaaaataccccttaaaaccttttcataaatcaatctactaatatcaaaacaattcaacttattcctcctaaataacttaaatacatccctcattaactcaaatattaccctccttcattcactttacaaaaaacaactataatacacaactcatgtcataaacttca

SEQ ID NO: 39251 - DNA, 2354 bp, Zea mays
  Clone ID: MRT4577_135796C.1
ggtccagctcagcgacggatgacagccaggacagcgccggagcctccgtgcaccatggccgggtgcgcgttaaggtgaggcagtctgggaagtcgtacaaggagctcagtggcctgttcatgaaccaggagattcaggctcacaatgggtccatctggagcatcaggtttagtccagatggccggtacctcgcgagtgctggggaagactgcgtgatccatgtctgggaagtgtccgagtttgagaggaaacgcgaggagaacggactgtgcaatcctcttgttgccatggtgtgcaacggttcaccggagacaacattagccttggccagcagtctggatgggagcaatcgtgagaagaagcgtcgggcaaggttcttggagggtcgtaggtctgtgagctcagaccggctaatggtgccagagcatgtgtttgcactgtcagaaaagccgattcggaccttcgtggggcattcagaagatgtgcttgatctctgctggtccaaatcccagtacttactttcatcttcaatggataaaacggtgaagttgtggcacatttcgagcgcttcctgtctaaaaacattttcacacagtgactatggtaagaatcacccaccacttgcccttaatctttgtcactctgccagcatgctgaattttcttttgttgaatctgtatcctagtgacatgcatccagttcaaccctgttgatgatagatacttcattagtggttcactggatgaaaaagtccgcatatggagcattcaaaaccgtgaaattgttgattggaaagatttgcatgaaatggtcactgctgcttgctataccccagatggacaggttttaatcatctatacataattctttgatttaatatcttcttcatgttacgatctgacacatctctttctttctttctcgaagagtgcactaattggttcccataaaggcagctgccatatttatgatacatctgataataagcttctccaaaagaaacaaattgacctgcaaaataagaaaaagaagtccagtcagaagaaaataactggatttcagtttctcccagggagtacttcaagggtccttattacatctgcagattcaagaatcagggtttttgatggccttaatctagttcacaagtacaaaggtttccgaaacactaacagccagatttcagcatgtttagctgctaatgggaggtatgtgatctcagcaagtgaggattcccatgtgtacatatggagaaacgatggtagccttgaaaaaggcagaagcaaggcgaatgttactgtcaccagttcctatgaacatttccactgccaggatgtgacagttgctgttgcaccgccatctaatggctcagcagtggtatccagatcaaactccacgaagcacgatgagcgggattctgtattggagcatcctctgctgcatgctgtccctgaaaaactgcaagattcctccgatctgcagcctcaaagtggcaatatcctaagcaccagttcaaatcacagcggtgatagagcaacttggcctgaagaactgatgacgccaacaaagcagagccctcagtctagtgccagtcttctcagcggtgctgatcaagctccatgctggtcagcctggggaactgtaattgtcacagcaggccgtggaggtcagatcagagcatttcagaactttgggtttcctgctcgagtatagtactgtagctatgagaccgctgcctggtcttggcgtctgccctgcagcaagacgggtgatttttgtgtatagataggtgaaagtttgggtgatctgcacgcagtctgggactggattctgttgctgctcctaggtgcacctgcctgcgaacttcaactaacctacgacctggtactcaaggtacggcgaattcgtttgcccggaattgtatatgagaatggagcccgggaaggacgagcgggcgtcggccggttggagctagatcttttgggatctttttgccagccatcttttcatctgttttctccattgagtccagtttagctttttcatattttttttgtactttatgtttaccagtcattatatattcttgtaagaaatctcagttctacagaaatagaaaagcagaaaagagttgcataaaaaaaaaaaaaaaaaaaaaaaaaaaaaaaaaaaaaaaaaaaaaaaaaaaaaaaaaaaagaaaaaaaaattaaaaaaaaaaccaaactaaacgacaaagagcatgcaaaagtgatacctaaatttaaagtgacaccttaactcgattacaccggccggaatttgaaaaaacccgggagctgccaaaacccatgcgtctcccaacttattccccttt

SEQ ID NO: 39252 - DNA, 1822 bp, Zea mays
  unsure (1)..(1822): unsure at all n locations
  Clone ID: MRT4577_135797C.1
ccggccgggcctcttctccgcgtccccttgttcgcgggtgtaccatcgtcctcctcccgatcctagcatgtcattacgatggcaagccgcatcgcatcgttcccctccttcctcgcctttgtcgtcgtcaccgtcgccacgttattcccctcctcttcctcccggcagcagcccgccgccgccgtgccacagcccagagggttctatataagctgcgggtcggacaaggacgtgcaggtagggagcatcaagtgggccaaggatgagggcttcaccgccgtcgggaacgcctccgccatcaacaagccccacctcctccccctgctcgccgcgctgcgctacttcccggacgccaccgcgcggaagtactgctaccagttgcccgtcgtcaagggcacgcgctaccttgtccgcaccacctacttctacggcggcttcgacgggggcaaggaaccgcccgtgttcgaccagatcgtggacggcaccctgtggagcgccgtcaacaccacggacaactaccggcgcggcatgtccacctacttcgagatggtggcgcaggggcagggcaagaccatgagcgtgtgcctagcgcgccgccccgacacggcgtccagccccttcatctccgcgctcgaggtcatcgacctcgccgactccatgtacaacaccacggacttcagcaggttcaccatgaccaccgtggtgcgcagccgcttcggcagcaagggcgatatcgtcagctatccagatgacccgtacaaccggtactgggcgccgttcgcggacgccaaccccatggtggagagccactcctccatctcgcccgacgacttctggaaccagccgccggccaaggcgctcaaggccggaatcacaaccagccggggcaagaagctcgccgtgcagtggccgaccacggagctccccgcggcgacctactacgtggcgctctacttccaggacccgcgcacggcgagccccttcagctggcgcgtcttcgacgtcgcggtcaacggcaacgacttcttccgggggctcaacgcctccgcggccggcgtcatggtctactccagcatgatgcagctggccgggaagacggagatcttgccggccgggaacgagacgtcccccgtcggcccgctcatcaacgccggagagatctaccagatcgtcccgctcggcggcaggaccgccacaagagacgtggttgcaatggaagacctggcaagcagcctcaagaacctgcctccggactgggctggagacccttgtctaccacagcaacattcctggactggggttgaatgctcccagggatcacccgtgcgcgtcttgtcactggatctaaaaaaccatggtctttcaggatcgctacccgacagcattgtacacttgacagggatgaaaaccatctatctcagtggtaacaatctctcaggccccatacctgacttgagcagcatgcacgccctgactgcagtgcgccttgatagcaatcagttcagtggaacgatcaacccatcaatggaaaaactagccaatctcaaggagctacacctgaacaacaacaatctcacgggcaaaataccagatggtctgaaaaacaaagctggacttgatttgagaactgaggggaacaaatttgaatgaggctgacaaggaggaaatcatgagtacgatgctgcacccatgcacacagttcaatgatgaagggagaggactgaagacttcaaaatttgtacgatgacatacattaatggctgatgtataagagctgaagagtgatttcatatccagcaaaaataaaaaaaaatttgcggnc

SEQ ID NO: 39253 - DNA, 1628 bp, Zea mays
  Clone ID: MRT4577_135798C.1
ctctcgtctcgtcacacaccatccgaaagccaccgggcaaccaaccaggccgccgtgtgatcccgatcgcgtactgcgcgcacgcagtccaggtcgcccgcgcaccacacggacgccttctccctctcccgcagtacagggtacagctcgcgctcacacaagacaccatctccctgcctgcgatccgatgcgtccaacgttttcagccggggtacggtcctaccaccgctgtgcctaataattggcggctagctagctagctagctgcagctgctgcgatcctggatcggcacagccggttcttgatgtggagggagcggcggcgggcgctgctcctgctggtggccggcgcggcgctgggactgatcggtgccgcgctcgcgagcgcgccgccggaggccgcgctgaaggtcgggttctaccatgcgacgtgccccatcgcggaggacgtggtcctcgccgagatgaggctcatcctcatggaggacgccacggtcgcgccgtccctgctccggatgcactaccacgactgcttcgtgcagggctgcgacgggtcgatcatgctccagtcgaggaagaaggggaaggcggagcgggacgcgctgcccaaccgtagcatgcgagggttcgacgccatcgagcggatcaaggcccggctcgagaccgtctgcccgctcaccgtctcctgcgccgacatcatcgccatggcggcgagggacgccgtctacctgagccacgggccgtggtacgacgtggagaccgggcggcgcgacggcaacgtcaccgtggccgagtacgtcgacaacgacctgccgccgccggactccaacattgtcgacgtgaagaccttcttcagcgtcaagtcgcttaactcgaaggacatcgccgtcctcttcgggtgccacagcatcgggacctcccactgcggcccgatccagaagcggctctacaacttcaccggcaacatggacggccaggacccgtcgctggacccggcctacgccgccgagctcaggaagctctgcccgcctcctcccagacccggcgacgatgataggaaggtcaaggtgcctttggaccccggcagcaactacaccttcgacctgagctactaccgccacgtgctcgccacgggcgggctgttccagtccgacggcagcctcctgcacgaccccgtcaccagaggctacgtcgagaaggtggtcaaggcgtcgtcgcccgacgacgtactacgcggacttcgccacggcgatggtcaagatgggccgcaccgacgtgcttgtcggcgatcatggggagatcaggccaacgtgtggcatttttgttgactaggttcaggattgggttgaagatgcgaagataatctgtacgggtttctgtcaacgtgtactgtgcgtgctgttagatcagaaagagcacggtcgctgttaactgtgtatccgggaatgctgttctgttcacacacggtcgtcactgatctactgaattgtcagccatgatgtaattatttatctacgtattagttgtatattcttcggatctacgcgtgttgttttgacgaagtaggcacatgcaaaatagtttggtcacccacaatttggtcaccagattttgccagagggcagagc

SEQ ID NO: 39254 - DNA, 218 bp, Zea mays
  Clone ID: MRT4577_135799C.1
gggcgattgggatcctccgagccggccgggaggagagaatctatcacaagaaacaaagcttggcattcttcgactgaatacttaattattgccaggacacgagaaacaaaggatgaggcctcacctgatactcggcggcagctctggctgtactcgccatccatcaagctgctagaagaacgatcgtcaccacggccctgctgtaacaagtgcgaaga

SEQ ID NO: 39255 - DNA, 286 bp, Zea mays
  Clone ID: MRT4577_13579C.1
ggctagtccctacccaacagccaacttatacatgccgtcattgaatacgggggcctgatccaataccatggccacatcgatctcgccaccacccgacttaatggctctcgacataacaatatcttaagctcttataaccttctacgacttagactatcaaacagggctatcttacgccaactacatgatccaattggctcgttgccaaacattaaacgcctaaaccgatctaacacaggcgattccgaaaggactccagaaaacacttgtactctaccacacttaa

SEQ ID NO: 39256 - DNA, 1013 bp, Zea mays
  Clone ID: MRT4577_1357C.1
gccggccgggcccggcagccctggtggtctattctcatttattggcaaaactgctgaaattaccgccgatgaagactcagatgaaacctcacggcaccctgattatttgcttctccatcggattcctggacgagggctcatcgtacgtgccgcggggcaaccctcgatctccctgctctatatatatatatacaaggagaccttagagcgggaggaaggaaatctatccaagcaacaaacttggcattcttgcctgttcttaattattgccaggacaggagaaacaaagatgaggcctcagctgatactcgtcggcactctggctgttctcgccatcctcgcagctctcggcgaaggctcgtcgtcctggccctgctgcaacaactgcggtgcttgcaacaagaagcagccgccggagtgccagtgcaatgacgtgtcggtcaacgggtgccatccggagtgcatgaactgcgtcaaggtcggtgcaggaattcgtcccggcatgggccatggccccgtcgtcacctaccgctgtgacgacgttctcacaaacttctgccagagcagctgcccggaggcgccggcgccataggcgggtggccggtgtcttcttctgacgtacggcatgggacgccaagtcgagtttgcttctctccagtttcgtcagagaaaagaaataaataaataaataaatgtcgccggccgctctgttcggtgcttgctcttgttcgtcgtccgtgtattagtactctcttttttctttttctttcttgaataaagagccatatgctgcatatgccatgctcaaaaaaaaaaaaaaaaaagccgccctgttggttggttttggttgtttgatttatgggctaggccctaccgtgaaattttattaaattctataaaaatcttaaaatctcatgtatagaaatggcaaggaaatggtggaacaaatagtcttatattgctaaaaaaaaaaaaaaaaaatccgaaatggattaataattattaattgccct

SEQ ID NO: 39257 - DNA, 271 bp, Zea mays
  Clone ID: MRT4577_135800C.1
aaatgtaccacacgatgtcattcagaaagcagtgcagcatacattgtgcccaaatgtgcgttataccggagcattccagacattcaagtccccctatgtgttgaaaccctcactgtagcagatcccacaaacagaagttaaaaggtacccaggtatgcctgggtagcattttttatgttgcagcaaaaaatgatacatttcccgcttgcgagggggattcaacttcctatttcccaggttggggacaggaaaaccagagatcactcccatg

SEQ ID NO: 39258 - DNA, 250 bp, Zea mays
  Clone ID: MRT4577_135801C.1
attttctgtagacaccttaacaacctctgaaaaagagtttttaaaaaaacataaaaggttggtttttttccttactatttcttcagaagtatttcagatataaaacctgaaagtgtgtgatgcttttacctgccaaataatttaactatattcagtataaataagaaacacttattcttgatttaaagtaactaatatttctaaaatccctatggtctaagtagcaattctaaataaaatacacaagtat

SEQ ID NO: 39259 - DNA, 858 bp, Zea mays
  Clone ID: MRT4577_135802C.1
ccctgcgccgcaaacgcgacctgccggttcatcactttccccgccgcctgctatcctagcgggttcgatccgcctttggaagttggattggcgaatggtggcgcaccaggaggcggaggcgacgacgacgacgacggtggacccgatgcgcctggcgtcgcggtggcggtccccggcggagtgggttgccaccgcagcggcactggactcggagcccatgccatccgagctcaacaccgccaacagctcgggcctctttgcagtcgtctccgtcgacaagatgtccgtcaagtacctcggcgtcaaccaccacggccatgacgtcggagtcgtgcaggccgactgccccgctcccatgcaccgagccgtctactactttgagatgaccgtgaggaatgctgggctcaagggccagacctccatcggcttcaccaccgagagcttcaagatgcgccgccaacctggttgggaatctcaaagttgtggataccatggcgatgatggctatctttaccggggtccagggaaaagtgagtcttttggtcccaaattcacatcaggcgacataattggcgctggaattaactacatagaacaacttcttttcttcacaaaaaatggatctctgattggagcctttccaaaagatattaaaggaccactatatcctactattgcggttcatagccaggatgaagagttgacagtaaacttcggaaaagaacagttctgttttgatattgagggttatattcttgagcagaaatgacgcaacaatctattagcgacaaactgtacttgcaacctgatatcagtcattggattgttcgttcatatctcctacattacggctaccag

SEQ ID NO: 39260 - DNA, 638 bp, Zea mays
  unsure (1)..(638): unsure at all n locations
  Clone ID: MRT4577_135803C.1
cacgtcgttccgccgnacnagnnttcaccggcgcttggcgccatgcggccaggnntgtgccaggtgatnncggcgcnncgtcgttgaccgtgcgcccttcgnatgaggggccnntcccgcccatttcctcacnnggcgctcgnagggtgnnctcgacaacccaacatccgccttcgtgtctcttattgtggtctgcagcacccctttggcgagaaacatggttgcggcagcgcatcgctttatggaccggcacggnagggggcttcgnntccgcggcccagcgcgtccttcaacacttggctcccccatcaccgtgncctgttggcagggctaccctttggacgcatcataaatgttattggtgaaccgattgatgagaagggtgacataaagacaaaccacttcctccctattcatcgtgaagcccctgcctttgttgagcaggccactgagcagcaaattcttgttactggaatcaaggtcgtggatcttcttgcaccctaccaaaggggtggaaagattggcctcttcggtggtgcaggagtgggtaaaactgtgctcatcatggagttgatcaacaatgttgctaaggcccatggtggtttctctgtgtttgctggtgttggagaacgtacccg

SEQ ID NO: 39261 - DNA, 434 bp, Zea mays
  Clone ID: MRT4577_135804C.1
actacacagagggaagagtgagccgcccttctctccccccagaggccagagacggacacgatggcggcgcccacctcctccgcggcatccaccctcgcccccttctcccaccccaaaaccctagccgccgccaccgccgccggaggctcatcctctgtcgccttctctccggccgcctcccaccccgcatgcgccctatcagtctcgggcgcccgccgccatgccgtcgctcgacttcgacaccgccgtcttcaacaaggagaaggtctccctcgccggccacgaggagtacatcgtgaggggcgggcgcaacctcttcccgctgctcccggaggccttcaagggcgtcaagcagatcggggtcatcggatggggctcccagggtccggcgcagggccagaacctgagggattccttggtggaagccaagcctg

SEQ ID NO: 39262 - DNA, 840 bp, Zea mays
  Clone ID: MRT4577_135805C.1
cggccgctcgaggcggcgggcgggcctcccaaccgcctgcagaacagagagccgcccttcgctccccccagaggcagagacatccacgatggcggcgcccacctcctccgcggcatccaccctcgcccccttcgcccaccccaaaaccctagccgccgccgccgccgccgcctcctccatctcctccgtcgccttctccccggccgcatcccaccccgcatgcgcgctctcagcctccacccgccgccgcgcggtcgccgccatggtcgcggccccggccaaggtcggcgcggccatgccgtcgctcgacttcgacaccgccgtcttcaacaaggagaaggtctccctcgccggccacgaggagtacatcgtgaggggcgggcggaacctcttcccgctgctcccggaggcgttcaagggcgtcaagcagatcggcgtcatcggatggggctcccagggtccggcgcaggcccagaacctgagggattccttggtggaagccaagtctgacatcgtcgtcaagattggcctcaggaaaggttccaagtcttttgaggaagcacgaggtgctggattcactgaggagaacggaaccttgggagacatatgggagacggtctcaggcagtgatcttgtgctgctgttgatctcagattctgcccaggcagacaactatgagaagatcttctctcacatgaaaccaaacagcattcttggtttatctcatgggtttctccttggacatctgcaatcacatggccttgatttccctaagaacatcagcgtggttgctgtatgccccaagggaatggggccccgtcggtcggagactgtatgttc

SEQ ID NO: 39263 - DNA, 244 bp, Zea mays
  Clone ID: MRT4577_135806C.1
ctctttcgttcggagacctacagggagaagcctccttgcaatgtgacgaaacacggtgataactgcacggaggcgtggactcgatgtaaccacgagagagtcagtcaaaccgactgtgagagcagactcacgaacaacgaggcagggctagtccttgacgagctcaggaacagatacagcagctttcacagcgagaacctagggtcctctgcaccactgacgtaaatcggctaagggcaggaag

SEQ ID NO: 39264 - DNA, 795 bp, Zea mays
  Clone ID: MRT4577_135807C.1
gggctactctaaggtgaggaaggagagactgggtgacagaataactgccctacaccagatcgtttctccgtttggcaagactgacacggcgtccgtcctgcaagagaccattggctatatcagattcctactgggacaaattgaggctctcagctacccctacatgggccacggcaatgggacctccattcaaaatggaccaacaactggagaaaggaaccatgcagggctcctaccagatcagtaccccggccagttgctgaaccataataacaacactggagcacggcagcctgcagcagtcggccagcctgatgagcagcagcagcagcagggtggtgctaataataatgacgagacgaagaaggacctgaggagccgggggctgtgcctcgtcccggtgtcatgcacgtcgcacttcggaggggacaacgccgctgactactgggctccggcgccgctcggtgggatcctccgctagagcgagcgcgccattgaagcatgcatatgcgttttctcgtttagatgtggcgagctagctgctgttcgttccgtacaagtatatgttcgtcaggctgctgcagggtggcgtgcatgcatatatatgctgctggttgctgtgggaaacataccatcatgagcagtcattcttggtagggggagaagcagctgcgtgtgcgtcgtatacctaacctgtaggctgattgctcttgatgctatgcgagtaagtatgacgaccctttttgtgggcgcgcaaggcttcattaattattttggatcttcaaagggaggcgc

SEQ ID NO: 39265 - DNA, 2029 bp, Zea mays
  Clone ID: MRT4577_135808C.1
ccggccgggaaaacaaacaagcccgattcctctctccgaacagcgcctatgctttttttttcttcagccccccccccccccccccctcacctcttcttcttctgctggtatctatcgttgttgttcccttcgttctctctccatctatctccctcagattacttgcgaccagcgacgctctggctggcccctttgagattgacctggggcttccatacaccaagagtgcagcaagaggatagatagcatttgttgcagcgctctctaggtcgtctctctctctctctctctagctagctagcgtcgtctcctccggtgaggtgatgaacagaggagaattccagacctcccttgtccagcagatgatctggagcggcggcggcggcggcaataccacagcggcaggcagcagcaacatcatgagcagcggcttcaagcagtcttgccatgaggatcaacaagaggcctcccgcaacctgcagctgctgccctccctatcgtctccgtcgtcgctgctcttctccaatgcccagcagttcccgcacaccacctcttcgggccagcagctagcccacaccaacgccggcggcgcagcagcctggttctctcccaagtctggacgacgacggcggcagcggtcaggacagccacatgccggaatcgtggagccagatgcttctaggggagttcgctggagagcgctacgccgccaccgcatgtctgctgtcaaagggcgtagaggactggggggatcacgctgcggcagctgcaagcgcgtgcatggtgggtggcggcggcggcgtggaggaggagggctcggccgccatgcctctgtacagcttatatggtggtggtagtcacagtcacagtcacagccacctcgctgcagctggtgaccatgagatgccgccggcgccagcagcagcagcagcaggggccaataagtctcagctgagccagatgctcctcgcctcgtcgcctaggtcctgcgtcaccaccagcctcggcagcaacatgctcgacttctccaacaacggcgtgcccccggcgcccgatcagctgaagagccaccaccaccatcaatccgataactcatccgaggtgaggaaggagagactgggtgacagaataactgccctacaccagatcgtttctccgtttggcaagactgacacggcgtccgtcctgcaagagaccattggctatatcagattcctactgggacaaattgaggctctcagctacccctacatgggccacggcaatgggacctccattcaaaatggaccaacaactggagaaaggaaccatgcagggctcctaccagatcaataccccggccagttgctgaaccataataacaacactggagcacggcagcctgcagcagtcggccagcctgatgagcagcagcagcagcagggtggtgctaataataatgacgagacgaagaaggacctgaggagccgggggctgtgcctcgtcccggtgtcatgcacgtcgcacttcggaggggacaacgccgctgactactgggctccggcgccgctcggtgggatcctccgctagagcgagcgcgccattgaagcatgcatatgcgttttctcgtttagatgtggcgagctagctgctgttcgttccgtacaagtatatgttcgtcaggctgctgcagggtagctagctagagagagctgtgtctaattaagaatcatcgcaagggtggcgtgcatgcatatatatgctgctggttgctgtgggaaacataccatcatgagcagtcattcttggtaggggagaagctgcgtgcgtcgtatacctgtaaggctgattgctcttgatgctatgcgagtaagtatgacgaccctttttgtgggcgcgcaaggcttcattaattattttgtatcttcaagggagggcgcttcaagtagaagatctagatcttctctggtcccctgtcgcaaatttatttcgttggtcatgtatatgtaattaaaatctagcaataagttattagtgaacatgtttattt

SEQ ID NO: 39266 - DNA, 327 bp, Zea mays
  Clone ID: MRT4577_135809C.1
ctgtgcggcgctcgaggcggccgggctcgatacagactctcggaaaccattctcgctctcgatccatgaaacgaacataggcgatacctgatgtgaattgcttaatcccgctagccatctcatgttttgatcgctacgttgcgccctgaatccttctaggctcacgacacgcttgactgtgccttcctcccccatacctctcaccagcggtgtcttcggtatgtgaaaacccaattcttcaaccctacaggatccaacagagaaatcggggctgtaaggtcaccttcgttctacaagtaccgcctcccccggtctgccctattacag

SEQ ID NO: 39267 - DNA, 413 bp, Zea mays
  Clone ID: MRT4577_13580C.1
cggacgcgtgggcggacgcgtgggttttttttttttttcttttcgtcgccgtcagaagcagcgcagcaattcagtgccccgacctggctcactcgtccgtcatcatcataaccaaaaatacaaacacctcctgataaacacgcgctgatcctcactctagttgtaacaggtagaactagaaaaacaaaaaggcaagaagaaacatctaaaccgaagcaggcatacactattttctcccgatcgagaaaaaaaagccacaaacctcgcaaatacgccatcacaaaccacgatcgcacgccaatggatcaacaccggaagaaaaaaactaaaggcacaaacaacaccgatcgctaagccaatgctgaggccgcggccagcgcggcggcgagccaccacaggtcgcacggcgcgcc

SEQ ID NO: 39268 - DNA, 1728 bp, Zea mays
  Clone ID: MRT4577_135810C.1
ctggcaagcaaagctcttcagccagtgcagtattggagaggaagtgcaggtcattttccgattctactactagcaacttgaagggctcatcaagagttgctaaagggtttgctgcaagcatatctggatcagaagtatcagttgacctttcctttactggtaccctttccccttctccatcatttgatgccaaggtagttagtaactcaaactcagcacctgctgctagcacagatctttcattggcattgccctcaagtgatagtttaacaccatctttgagtcatgattccaatactgaggtagtggactctagtagcaaaattaatttttcatatgatgaagaacagaaggtctggatcccacaagataaaaaggatgaaattgtcttgattcttgtccagaggcagaaagaactgcaagcacatacacgtgactggacagactgggctcaacagaaagtgatgcaggtcgcacaccgacttgcaaaggagaaggatgaacttcagtcactcaggaaagagaaggaagaggcagaccgtctgcaagaagagaggcaccatttggaagagagtactcggaaaaagcttctagagatggagtctgcaatttctagggcaaatgctcagctggagaaggcagaagcttctgctcgcagacgtgaggttgagaatgcacaactcacgttacagatggaagctgcaaagcgacatgcagcagagtcagcaacaaacatttcagagcttttaaagaaagatgagaacagccgtaaaaggtctcagcgttgggaatctgatagagccctgttacaagaggatcttgcagcacaaaagagcaggttatctcgggttcaagaacaccttcagcatgctaaagagctaaaggatcaagtgcaggcaagatggaaacaagaggaagctggaaagattgaggtaattgcccttgtaacctcaaagaagaaagagagggagcaaattgagacctccatgaggtcagaagagaatttactgcatcttaaagcagcgaatgacacagaaagatacaagagtgagatccgtgctcttgagcagcgtattgcacagatgaaggtttctttggactcttcaaaggttgctgcccccaagtggggtgctgacaataaaacatatgcattgcatctttctgaagggagaaagaacagcagtgcccaaattttgtccaacatagcagtaccccaagatcccagttttgatgatatacagcgtgaccgggagtgcgtcatgtgcttgagtgaggagatgtccgtggtgttcctcccttgcgcccaccaggtggtctgtgccaaatgcagcgacctccatgagaagcaagggatgaaggaatgcccttcatgccggacccccatccagcgcagggtgcgcgcccgccccgcaggttgctagatttcacatataccatttggattttatcctgttttttttgttttaccttgattgctcagcttgagttgatggaagattggagagaataatgggggggatgtgagtggtgaaacttggacaataatacatcgttaaacatcaaacaagccccagcggacagtgggtactggttgggtttgttatatggatataccggccgcttctgaatgctttggttttgttgcaaaaaaaaaaaaaaaaaaaaaaactcgaggaatgtgggcggcacgctcgtcaatttccggttctaagtaccgtactgttttgt

SEQ ID NO: 39269 - DNA, 574 bp, Zea mays
  unsure (1)..(574): unsure at all n locations
  Clone ID: MRT4577_135811C.1
ctattatagactcttgatatatttgttgtgagtagttggccaactaggtctggcctagtccgtacatgttggcatcacgtagctacatataggtagattttcttccactgggaataagtcaataaactacatgatagactaccatatcaatataacttaacctttggccacatcttagaatacatgattttaagaactggcagcttctaactaactcctactctccttttgtgctgctctttttctcttgttcgcgcgctcgcgcctctcttcctccttgatcaaccggagctgctcctcgtcctctctccttgcaagtgccgcgcttcttctttcttccctttgtatgctagcaaaatcagcttccatgtcactctcgtcttcatcgtcgctgccagcaaatttgtgatagctatgcattatttgtctgtcatcactggatttccttctttttactgtatacctttctactccacgagaggccttgaattctgangaatggatgagctgtttttgtgctgatttcaatctcgcgttttgcgcagccgatctggtctgaccaatgagctgacct

SEQ ID NO: 39270 - DNA, 533 bp, Zea mays
  Clone ID: MRT4577_135812C.1
gccagttgcacacagatggatcctacaatcttagtaacaacctaaagactgtttaaatctatgaaacaatctaccatgaccaatttaaattacccgggaaagggtaggagaggggattaatgatcagggccagttgcacacagatggaaaaatgcttgcagtcactcccaaatagaatcctacattacatataaatcacaatgaaaataaaagtgcctaacgttatagaactgtgagattttgtttaaaaaaaaatcaataataataaaaataaaccgctgggtatcattggtgcacatggaataacgtaacacataaggatgataaggctggaaaatacggaaaaacaattaagactcgaaacacaagtttatttttaaaaaaccaaaaaagtttgccagagaaataaatgctcaatagaaaagcaggactttcagcaggatggcctttaagaccaatctgaaacaacacggacacaccctaccccacccccaacctatcacaaattctagttgatgtaaaaagaagggaaa

SEQ ID NO: 39271 - DNA, 199 bp, Zea mays
  Clone ID: MRT4577_135813C.1
ggcagatcccgcctcgcgcgcctcatcctcgtgcaggtgacggcaagctttcctcctggattcgctcctcgctctcttgccttcattggcggttattgatctgatgactgttcgtggtggtttgctcctccaggcgctgcacctagtggccggagcttgcttctattgctgtcgttgtccaagggggcggcggtgaaca

SEQ ID NO: 39272 - DNA, 303 bp, Zea mays
  Clone ID: MRT4577_135814C.1
cccacgcgcgcgcccatatatccaataacgcgagggcccacacagaaaaccctaaccggcgccacggaagcggcctagcagggaagcaagaacgaccaccccgccgccgacatgaagcgcaaggcccgcgacaccagctaccgccggaagagccgcagaggcgcactctacggccccggccaccggccgacgcgctcgcagaggcgcacgggctgccgacagagcgccgccacaagtacaacgtgcgccccaggcgcatccgcaaggacgacgaggcgcaggacgcgcagcgaacagacaagg

SEQ ID NO: 39273 - DNA, 508 bp, Zea mays
  unsure (1)..(508): unsure at all n locations
  Clone ID: MRT4577_135815C.1
aattcggcacgaggcgcaacccaccttgccggtgctccgacgcattgacacgactcgctcnaagccgctcttatcgttctacttcacctcttttcagctccgactaccaccagctactgccgccagccagtgctgcagttttatcctagccctagaccagccgcgacgcacatcgcatccgcctgtgtgcttactttatcttgaccgtacagctccgtaccctgtacctctctgtcaatggctcctacgttgaactcggatggagattcttttactccattcacaacggtactaagagcctgtatgaagctgacgaacctgcatgatgatcgcgacagcgcaatgcgcgatgaccagctgcctgatgcccttgctcgctaacaaaatacacctaccgttacgggaacttcatgacgaaactgtagctaatgtgcactcatccagctgacatctcctaccaccacaactggtctggactcctcaatttcttccactagaaggaccccca

SEQ ID NO: 39274 - DNA, 162 bp, Zea mays
  Clone ID: MRT4577_135816C.1
cctacgggatcggccggaaataacattattactgcttgacaatgtagtatgatgtgcatattaaacactacatagataactattcatatttaggattaaaatctaagatgaccactaatattgcttcaaaaagagcagcttttgtgaggccattcacttctc

SEQ ID NO: 39275 - DNA, 238 bp, Zea mays
  Clone ID: MRT4577_135817C.1
gaataaccaagcccaaacacacggcgactgtgcatgcgctggtggacacagctacagcagcgagacactacgcaggcgtggaggccgccagccgagaccccggacatggcggcggtaatggctacaagacgacgcggcagacgaccagcttgcctctatgtacgcggagagaattatcgcggcctgcgccaaaaaagacaacgagatttctgtcctaaaggacgatgcggatcgaacg

SEQ ID NO: 39276 - DNA, 348 bp, Zea mays
  Clone ID: MRT4577_135818C.1
aactaggccgtgttcctggctggtttccatacggctcccccccactggctatcagactcgattctgcgctgactttacatgcgccctaataccgacatgaactataaaggaacaaggctgttactgctggaagcctcctctcgcgcttgcgtgtgccggccctaggggtgagcggattctggccctgctttctcaataccggaagcggggcgctttgtataaatcacctaccgtgtctcactttttgcaggtccttcgctggctcctgggatgagtacacgaggccccggcacactccgatcggtgcgccttaatcgatccctatgcccgcgtatactatgaggactg

SEQ ID NO: 39277 - DNA, 1104 bp, Zea mays
  Clone ID: MRT4577_135819C.1
ggccgggccgggaccccatctccagcccctccgacgcggccccaccatctccacctcccggccgaacagacacgaaccagggaccaacgacaaatctcgcgacctctcgaaatgagcggtaccggaagcagcgtgtagcgcgagacgaacgccgccctaatccaaaccctagaggcgggaggaagacggcgagcgaacgcagcaacgattcctgatctctaatatcctagcacggcggcggccgcggccggatctaggggtaacgaaggatgtcggactcggcatcgatggcggccgccatcgaggcgcggttcagcagccgcgacctcatcggctgcggttccttcggcgacgtctataaagggtttgacaaggaactgaataaagaggttgctataaaagtcattgatttggaagaagctgaggatgacattgaagacatccaaaaggagatatctgttttgtcacaatgccggtgcccatatattaccgattattacggctcttatcttcaccagactaaattgtggatagtaatggaatacatggctggtggttctgttgctgatcttcttcaagctggtcctcctctggatgaaatgtctattgcatgcattctgagggacttgttacacgcaattgagtatctacattccgaaggaaaaattcaccgtgatattaaagcggcaaatatcctcctcactgaaagtggagacgtgaaggttgcggactttggtgtttctgcacagctgactaaaacaatgtctaggaggaagacatttgttggaactcccttttggatggcacctgaggttattcaaaattctgaagggtacaatgagaaggcagatatctggtctttaggtatcactgccattgaaatggctaaaggtgaaccccctctggcagatattcatcccatgagagttcttttcatcatacctcgtgaaaatcctccgcagcttgatgagcatttctcgaaaccaatgaaagagtttgtctcactatgtttaaagaagaatccagcagagaggcctagtgccaaggagctttttaaacattgttttataaaaaatgcccgaaagacttccaagcttttgagcg

SEQ ID NO: 39278 - DNA, 571 bp, Zea mays
  Clone ID: MRT4577_13581C.1
tgggtaccccttgtgggccggccggggactctagctcggggtcttcacgcacgccggcgcaaactgtcgcccgcgacaccgacagcagctcgtaatctctcccattccggccaccggacgtatcttgacgccagtgtccgtctctattctaaggccttcgacggcgcgagttcgttctgacaggcagtaggcggacagatgagggcagtgcatcatgcacaccacatgggatcacgccgagatcacaagtcggtaagcgtgcttgggcaactttactgcctgacagcacgcactctagcctgctgcacaagtgcctaggagataacacctgcgagcactatcactatgatgccttcaacaccttcttaagtcagactggagctgggcaagcacgtactcccgagctatcttcggtgatctatagcccactgtgatcgatgaggggcgcactgccacgtaccgacagcttttccaccctgcacagctgattaatggctggggggatgccgctagcagtctggcccgcggtcactacactacttggtacggagagtgaggatctgtgacttga

SEQ ID NO: 39279 - DNA, 515 bp, Zea mays
  Clone ID: MRT4577_135820C.1
aaccttccagacaagcgaccaagaaaatcccccctatggatcatcgcctcgtggccgctctcctcgtcctcctgggcctcctcctctccccggcgccggcagcggcggccgcgggggacgaggagcccctgatccggcaggtcgtcggcggcgccgaccccctcgacaacgacctggggctcgactcgcagttcctcggcttcgtgcagcggttcgggaagacctacagggacgcggaggagcacgcgcaccggctctccgtcttcaaggccaacctccgccgcgcgcgccggcaccagatgctcgacccgtccgccgagcacggggtcaccaagttctccgacctcaccccggccgagttccgccggaccttcctgggcctcaagacgacccggcggtcgttcctgcgggagatggccgggtcggcgcacgacgcgcccgtcctccccaccgacggcctccccgaggacttcgactggagggaccacggcgccgtcggccccgtcaagaaccag

SEQ ID NO: 39280 - DNA, 566 bp, Zea mays
  unsure (1)..(566): unsure at all n locations
  Clone ID: MRT4577_135821C.1
ggaggtgtcttctatctcatcttgcagaagcgatatctgactatatcatttaccaagttaactccggggcccagtgtatacagatatttgattcatggggtggacaacttccacctcatgtgtgggagcagtggtcaaaaccatatatcaaaaaggtgacttccttttcttgctttcatgtattaccaacttcatgattggcggtgctgctatgtatctgcactgtcttatagaacaacattgatggctcccactaaatgctctaaaggtcagtatctcctaagaaatacccttgttcttataccgaaatgattctcatatgattaattgcattacccccctacaatttctggtaccgcattgcaagaattgttatggttatgaccacaagttccttataaccacgaaagtgaaatttagagagaaaaaaccantctctcaaaataatcagtagctggtgcttacatcagcancatgttctcagtgcacatggatttggaattttttatactgtatgttactataatttggtttgcatatcttcaagantgcaactancacagtgt

SEQ ID NO: 39281 - DNA, 195 bp, Zea mays
  Clone ID: MRT4577_135822C.1
gaaacagggaaacccattattttatttattgcaccctcgaaaaggccaaacaaaatggctacaatgccctaaagccaaagcgtcggagagtttgcctccataacctttcaccccggaaaaaaactaaaaatttttgggctgaaaccacacaaccaatctcttttggtaagggcccacactttggggccccaaaat

SEQ ID NO: 39282 - DNA, 276 bp, Zea mays
  Clone ID: MRT4577_135823C.1
tagattctttatgaagagctgagtgctgtaactcagtgttggatatttgtgaattggtggtttaaagttcaaatacaaaaagagaagactgaatattcatcaaacattccttcaggaaccacgaaggcatcattttaaatgtgacatacattactgagcaaaacaagaacagatattgtgtgcataaaaccctgctggccattgaattaaggatcatgtaaaaatatgtatgtaggcccggtgcagtggcttatgcctgtaatccaatcactttgg

SEQ ID NO: 39283 - DNA, 263 bp, Zea mays
  Clone ID: MRT4577_135824C.1
aaaaaaaacaataccgccaaacttaataaccccacatcaaagggggggaataaagtcttacaacgtcaggtggaaaccccccaacgcccgattgataagaaccgacagaaacctaacacgattggggcccctcagggccgatcacaggatagccggggcacacaagcccgaccaccccctgccagtaaagcgtttaagacttggcacccttgtgggcggccttaccctggtaaaacttaagaccgccctcctgggagtccttc

SEQ ID NO: 39284 - DNA, 919 bp, Zea mays
  Clone ID: MRT4577_135825C.1
gcttccaatgctggaggtggtgctggtggtggaccacttgattttcttagaaacaatccacagtttcaagcagttagggaaatggtccatacaaatccacaaattttgcagcctatgctcgttgagttgagcaagcagaatcctcaaattctaaggttgattgaggagaatcatgatgagtttcttcagttactaaatgagccctttgaaggcggagagggggatttcttagaccaacctgaggaggatgaaatgcctcatgccattagtgttacaccagaggagcaggaggccattggacggcttgagtccatggggttcgacagagcacgcgttatcgaagcattcttagcctgcgataggaacgaggagctagcagcaaactatctccttgagcatgctggtgaggaagattaagcgggagtagttttcatacgattttttttagtaccgagtgacgaagagttgatatggagctgacgatcatttgaattgatttcgttgtgcaagacttgtattacataaacatttaaatacatgtagctgaacatttcagtagaaatgctacggttgtggtctcccatcgttgactttcattagcgtggtggtaaacatcggttctgctcctgtcctgtattaacacaagcttggcttgggaggaagcacaaggagctattgccacctagcaaaaggataaaagggaggatgacgaattggcgatgtgtttgcgacacgctgccctcaagtgtggatgatgagtgcagataggttgatgactgtgccaaggctgtcaagtgtgtaaacgaacgctgccttcgtagttctgacaactgcgacagttctgtagctagacctatttgctatcttcatgataaaattatctaaatgggacggtccttgaccgattaattgcacaaaa

SEQ ID NO: 39285 - DNA, 1064 bp, Zea mays
  Clone ID: MRT4577_135826C.1
gggcccgctccctatacttttcccgcaggggcttccatgctggaggtggtgctggtggtggaccacttgattttcttagaaacaatccacagtttcaagcagttcgggaaatggtccatacaaatccacaaattttgcaggttttgtattctttgttttggcttacattctatggcttcttatgtagcacctgcctgaactttttgctggtaccatgttatagcctatgctcgttgagttgagcaagcagaatcctcaaattctaaggttgattgaggagaatcatgatgagtttcttcagttactaaatgagccctttgaaggcggagagggggatttcttagaccaacctgaggaggatgaaatgcctcatgccattagtgttacaccagaggagcaggaggccattggacggcttgagtccatggggttcgacagagcacgcgttatcgaagcattcttagcctgcgataggaacgaggagctagcagcaaactatctccttgagcatgctggtgaggaagattaagcgggagtagttttcatacgattttttttagtaccgagtgacgaagagttgatatggagctgacgatcatttgaattgatttcgttgtgcaagacttgtattacataaacatttaaatacatgtagctgaacatttcagtagaaatgctacggttgtggtctcccatcgttgactttcattagcgtggtggtaaacatcggttctgctcctgtcctgtattcatcggacgcaagtataacacaagcttggcttgggaggaggaagcacaaggagctattgccacctagcaaaaggataaaagggaggatgacgaattggcgatgtgtttgtgacacgctgccctcaagtgtggatgatgagtgcagatatgttggtgactgtgccaaggctgtcaagtgtgtaaacgaacgctgccttcgtagttctgacaactgcgactgttctgtagctaaacctatttgctatctttatgataaagttatctaaatgggacggtccttgaccgattaattgcaggttgtttttgttttcttt

SEQ ID NO: 39286 - DNA, 2616 bp, Zea mays
  Clone ID: MRT4577_135827C.1
agcccgtgatggcacacctcggggcatctgccgctggggtttcggtcctattcgccccccaaactccggacgagccttccgcgcgacgctgcacggctccgccagccacccgtaaaaccctagacggctagccggcgcacggaagcgggcagcggagcggaggtgagcctctcctgcgtcggattgtccccgcccccgcccccgctaggcgccatgaagctgacggtgaagaccctcaagggaacgcacttcgagatccgggtgcagcccaacgacacgattatggctgtgaagaagaatattgaagagatacaagggaaagacagctatccatggggccaacaactgctgattttcaatggaaaggtcttgaaagatgaaagtacattggaagagaataaagtcaatgaggatgggtttctagttgtcatgcttagtaagggtaaaacatctggttcaactggaacttcatcttcccagcactcaaacactcctgcaacaaggcaggcacctcctctagaggccccacaacaagctcctcaacccccggtggcaccaattacaacttctcagcctgaaggacttcctgcacaggcacctaacacacatgacaatgcggcatcaaatcttctgtctggaaggaatgttgacacaataattaaccagctaatggagatgggtgggggcagttgggacaaagataaagtccaaagggctctccgtgccgcttacaacaaccccgaacgtgctgttgaatacctctactctggtattccagtaacagctgaaattgctgttccaatggtggtcaaggggaaacacaactgatcgagtggcgacgaggactgaggtcgctcctactggggaagctggtctctctgggattccaaacaccgctccactagatcttttcccgcagggggcttccaatgctggaagtggtgctggtggtggaccacttgattttcttagaaacaatccacagtttcaagcagttcgggaaatggtccatacaaatccacaaattttgcagcctatgctcgttgagttgagcaagcagaatcctcaaattctaaggttgattgaggagaatcatgatgagtttcttcagttactaaatgagccctttgaaggcggagagggggatttcttagaccaacctgaggaggatgaaatgcctcatgccattagtgttacaccagaggacccaaatatatgtccatctaaccttctcctaattacaccaaataaaaaaccaaaataactccaacacaactttttacttcattcttccatgtatacccctacttaaatgcacaccgatgattgatgtgcaccatggtcattgtacccctcaggccctcaccttaattttagccccagctccgaatcaacttatatttgggattggcggggtgagattacatcgatttaacctcactgttctaattatgaattaatagcttatcaattattttgcagtttcaagcagttcgggaaatggtccatacaaatccacaaattttgcaggttttgtattctttgttttggcttacattctatggcttcttatgtagcacctgcctgaactttttgctggtaccatgttatagcctatgctcgttgagttgagcaagcagaatcctcaaattctaaggttgattgaggagaatcatgatgagtttcttcagttactaaatgagccctttgaaggcggagagggggatttcttagaccaacctgaggaggatgaaatgcctcacgccattagtgttacaccagaggagcaggaggccattggacggcttgagtccatggggttcgacagagcacgcgttatcgaagcattcttagcctgcgataggaacgaggagctagcagcaaactatctccttgagcatgctggtgaggaagattaagcgggagtagttttcatacggtgagaactctgctatcctctggttggttaccctccttaacatatatggcaagtggctcactgtggggtgatttcctttttttttcttcttttgaaccttgtctctcgtcgacatctgaccgacattgatcaagattttttttagtaccgagtgacgaagagttgatatggagctgacgatcatttgaattgatttcgttgtgcaagacttgtattacataaacatttaaatacatgtagctgaacatttcagtagaaatgctacggttgtggtctcccatcgttgactttcattagcgtggtggtaaacatcggttctgctcctgtcctgtattcatcggacgcaagtataacacaagcttggcttgggaggaggaagcacaaggagctattgccacctagcaaaaggataaaagggaggatgacgaattggcgatgtgtttgtgacacgctgccctcaagtgtggatgatgagtgcagatatgttggtgactgtgccaaggctgtcaagtgtgtaaacgaacgctgccttcgtagttctgacaactgcgactgttctgtagctaaacctatttgctatctttatgataaagttatctaaatgggacggtccttgaccgattaattgcacgatctaatgtgagaaaaagtacataatcgcttggattgcatcaggt

SEQ ID NO: 39287 - DNA, 350 bp, Zea mays
  Clone ID: MRT4577_135828C.1
cggacgcgtgggcggactcgaactttattttactctctattatacatgatgagggcgggatctactgacactgtactgctccttactaagctggcatttcaatgcaagagaaggtaccttcatgccttcgctctgtggaatataatgaagaatgatgtcagctacaaaggtcaagcgaactttcttcataccctatcggatatcagctcatccatacataatacatcaaggatccactatcattcatggatagcgtgtttgatgtcctcttcacgcttgaccttaatgaggatactatgcatgaatggataagtcgaaccttggaggcttttctaatatctaaggaaaac

SEQ ID NO: 39288 - DNA, 440 bp, Zea mays
  unsure (1)..(440): unsure at all n locations
  Clone ID: MRT4577_135829C.1
tagcagcagcaggtagtagcgttcagttcatctccctttctccactcccccctgcccgtcgctctcccccgcatcccatcgcgacccaacccggcgcccgccccggatacggtgcgcgtctccactgatccgcacgatcgcgcgctcgcccgcgccccggccccggcggccggccgggtgagcagtagctggagctgcgtctgcgtgcatggatccctcggggccagccgggccgtcctcggcggcggggagcggcgacgacgcgctcgcgccgccgcagcagcaggtccagccgctggctcaggcgcagccgcagccgcagcaggccgctccgcctccgcagctcancaggtacgaatcgcagaagcggcgggactggaacacgttctggcagtacctgcgggaccaccggccgccgctcacgctggcgcggtgcagcg

SEQ ID NO: 39289 - DNA, 365 bp, Zea mays
  Clone ID: MRT4577_13582C.1
aattgtttttagcaaacaaaggtggacatactatattaatcattaatataatactactacaccgaggcatactcccgtctcgtagagggacatgcccatgacgatatacatgcccatccatcctatattattgtttgtgaattcattcgtgcatcccatctttgagtggcccgactacagatccaatggggatcatgcatcgtccttgtctgctaacatgacaaggagggcaagggccttattgacagaaagctagagccgtaacttgggcccttcatactggtgcaggatggagcgaaaggcctcctcctccaccgggtactagatctttcatgttgccacccacacctgagcaggaaagcccg

SEQ ID NO: 39290 - DNA, 483 bp, Zea mays
  Clone ID: MRT4577_135830C.1
ttttttttttttttttttttttttttttttttttttttttttttttttttttttttttttttttttttttttttttttttttttttttttttttttggggggcagccaaaaaaaaaaattggaggcagggaaaccggacaggcgcatagaaaaaccagggacaaaccattaaaaacgggaattaaagggcattaaggggaccccccgggaaaggaaaaaaaagtttttgctaaaggggggtcctaggccaaaaaggggaaaaaaaaggggtctcaaaaaaaaaaaagcccttcgtttcgaagggggggaccctgatcgaaaaaaaggaaaactccgatggggaacacaaaaaggaccaggaccggtatatgaaccaaatacagggcttgggggggaaacaaaatttggaaaaagacaggaacgggaaaatggggtaaaaaccccccaacaaaaaacacaaactttttttgggggggcggaccc

SEQ ID NO: 39291 - DNA, 503 bp, Zea mays
  Clone ID: MRT4577_135831C.1
aatcgaaatattgtacaatctttactgctaggaaaatttgttcaaatgcatctcgaatgcttgtgcagaggaaagaaagctctctctctctctctctgtgttcatggctcttgtttcagtttcaactgtaactgtaacagcctactctagattggtgttgttgttgacagcagttgctgtttgaacttcgatttgctgttctcccagtaggattagaaaggaaccacacattctcattggagcataattcagtctgtcagttaaacatgataaggagacacggcaggcagtgaagatctgtagtagctccaaatttgcctcctggcgaaacacctttccttgaaacggctatcaagcgtgctcttcttcacgcacaacgcaacctgttcctgcaccatctatgcaacctggctggctcaggctctccaccgtcccgcgcaccaacatgcgttggttgatcagtgatcactatcatatattccggtgttcattcccgtcttttc

SEQ ID NO: 39292 - DNA, 308 bp, Zea mays
  Clone ID: MRT4577_135832C.1
gactcctacaataaggggtacaacttccaatgaagaaaagttgcttcaatgatggggagagggcattgcagccattaaatcaagtataggatctgttgtgcttcatcttagaaagttgcctatcggtctctgcatgcaccgctcattgctatttaaaaggggacggcaaggccgaggggttgccgctgatgtcgttattggtgaggttgacggtggtgatgccgtggatgctcgagtggcgcttgtccttgacgctggagttgaggcggatgatgtacttctatgcatggttggccaactacattgga

SEQ ID NO: 39293 - DNA, 283 bp, Zea mays
  Clone ID: MRT4577_135833C.1
gaaaaaattaggatggatactatatgataaacactttaatctcttacagtaaatcatatattatacaattacacacactataataagcaagaaaacacacaccaaacgtaagtttactgctagctaaattaattctttaagtagaaaggaaaacacacgtaaaggcttgaattgcaacaacaataaatcagctactagcgtcataatactccataaagattttggatcccaaataacatgttagaccattaccccactgggaacaaaccgaaataactcttgt

SEQ ID NO: 39294 - DNA, 402 bp, Zea mays
  Clone ID: MRT4577_135834C.1
acaaaactcagattcttggatatttaatttttgaaaaattgtgggcgtggtctttcaaagaaaaacaattggagacgtcagttcattcttttgccacagaaaatggtctacaatggcaacgctacgatttcatcttgctctattccctgtattttcatcaagcacatgtccttagctgcacggagcaaatgcacgtctgcaacggtgggcactactggaacacggaccgcgttgccagtgccacacagaagggcgcttccatgccgttgcgcgcacgggtgatcacggcatgcgtgcaggcgaggcgtgcgccggcgccggcgcgctaaccactcggggtggggacgtgccgttcctcgggacgacggcgccggagcccaccatgtcggcgaagaggcggtc

SEQ ID NO: 39295 - DNA, 353 bp, Zea mays
  Clone ID: MRT4577_135835C.1
tcctatacgtcgaatgggttcctcgagccgcgcggccccaacaagagatagactgcctagacagaaagttcatcgcctcgctgctatcccgacgccgtcgtcactacgatcacctttaagccagagaattaaaacctttacatgaagaagatagtgtgcacggcccccatcggggcctcgtgcaccatggcggtgttgatgaaggtgaaggcttcgtcttccacccctgcctacacagggaaccccccctccatcgtccgcgcacgtgtgggcctgcttctacgcaaacagaatgactgagacgacggacgaggggaggaggacaggagcacacggccccatgcgcttttttt

SEQ ID NO: 39296 - DNA, 637 bp, Zea mays
  Clone ID: MRT4577_135836C.1
ttttttttttttttttttttttttttttttttttttttttttttttttttttttttttttttttttttttttttttttttaaaaaaaaaaacgggaaaaattttgaagcgggggggccaatgattgcaacaagccctttattttttacgggggagaaattcgattcacccccccacccgtttacccaaaaaacatgggccgtttggggccggccggttttttcccgttaacccaatgggttatattagcttattaagggcccacctcggacgaaacactccggggggggggggggcccccccccctcaaaaggaaatgctgggggggatccccttggaagggacccctgggggggcccccctgggggaaaaggggtggggaaaaaacaacttgggggggaactcgggggggccgttcctgttcctaaagtgggggggggggttttcgcccaccaccttgcccttaattttgaccaggggggggttaaaccttttaaacccccccagcccccgggcgttggaggcccactcgggggggtccccctggccaaggaaccccttgggggaggagggtttggaaaggatttcaatgagcaaaaagcccaagaggggctggatctggctcgggaagggggggg

SEQ ID NO: 39297 - DNA, 631 bp, Zea mays
  Clone ID: MRT4577_135837C.1
tcccgggcaaccccctaagcaagcagcaagcgcacacgtgaaacgtacacctcacctcggcgagcgaaagggtaaaacgctgatcggagcaacgaagcccgcagccatgccgactgcgacggccacggacacggcatgctcctcgccacgcggcgctcttcctgcccctgctgctgctcctgctcgggctccacgccacgtccgccgccgccgcgcgcgcggacgacagaccggacgccgagctcacgtgcaccaagccgtacccggacccgaagaagcccagcgtgaagccgcccggccccggcgcctaaagcccgaccttcccgggcttaggcatccccggtatgggcgggttccggatccctgggatgggcgccgacgggtggggcgtgtgctacggcgggcccgccggaaggatacgccctcggcggcgaggtggcgcccaccgtgactagctacgagaaggggccctgctacaggaagaagacacctgccccaataagtgctagtactcaaacagctgcaccggcaaggggtatcagtggcagtagtggacgatgcagatgcaccgtcgactgcaaggtcaagtgcacggcctactgttgattagactcatccgatgctggcgcgt

SEQ ID NO: 39298 - DNA, 520 bp, Zea mays
  unsure (1)..(520): unsure at all n locations
  Clone ID: MRT4577_135838C.1
aaaaaaaaaaaaaacggcncttcacccaagggnnncngggcggggccagcgaagcgangcagccgccgcaccaaccgccngagaacgggcaacacncccagccnccgccgcaaggacccggggggcccangccnccgcagcagcaggcgcccccgcggccgnacaaccagcagcagcaggcgccgcagnacgaccagggggcccncccgcagccgggggggcagcagcagcagnacgcngcaccgccgccgcagaacccgccnccgccncagacgcagcannacgcgacaccaccgcagcagnacgccccncngccgcagcagcagnacgcnccnccaccgcagcagcagnacgcnccnncgccanagggnaccacgccgggaagcggngaagncaggacgcngnggancggagaacnncagcacggganggacgagaacnaccnccacnacaacgccnnngcggccggggcccagcaganngcnnccgggaaaannanacggaacaagcaaacggggca

SEQ ID NO: 39299 - DNA, 276 bp, Zea mays
  Clone ID: MRT4577_135839C.1
gtgcatgggtgaaccgctgatacccctatcttgcaacagcaccctgttcgcatctaaccgagtggaggaggaaacggagatggataccaacaacaacaacagttgcaacattctgtgtcagcgctgagtgaactagtcatggtgaaccctatggtctacctacaacagcaacaactttttttatctagcccgttcgctatgggcaatgcacctacatacctgcaacaacagttgttgcaacatcagttgctgcaacaaattggaccagcttttact

SEQ ID NO: 39300 - DNA, 392 bp, Zea mays
  unsure (1)..(392): unsure at all n locations
  Clone ID: MRT4577_13583C.1
tcgatatttataaatcnnaagcatttcgatatggagggnccaaacnnacgtatgcggtgcgtgcgataccataacatctatctatagcgtgaccttcattcacttcactgaccgcaacatacaacgtcattgactcacaaaactctctcgctactcaacttattattctacaagtacatccacctttcaccttaatgggctataaacaccaagctctgaccgactatactttacaacaagtgatcgcgctgaatgtctaataacacccaatttcccacgtggaactacattccttggctcatataacaatacacaccatcaccacgcaacattaacaacagttactaccagcactgaaccacctagccatagtgaaccctgtcacctactta

SEQ ID NO: 39301 - DNA, 442 bp, Zea mays
  Clone ID: MRT4577_135840C.1
agagcttaactgaagcatcaaattcacctaatggtttgtcgagctcaagcagcaattaatggcagtacatgtacatatgaagctagcgctagctggctcaccaagcgcccaaattaactaatcaacccgtgcaggcccccttaatctacccccatttcattaatcctatcagtaatcatgctactgctaatgacacaatcagagtagggtaccagtactatgtacagagaccaagacaaaggaacctaggattaattaattaattaacaaggaagccctaatcccctggcggtctggacggataataatctagtcagacccgaggtcagtagaggccggaactggcggaggtgacgaacgaggacgcatcagcgaaccggtcaccaaccccagatcccacaagagaccaagataatcaatcaaatcaagcaaattaaccaac

SEQ ID NO: 39302 - DNA, 1133 bp, Zea mays
  Clone ID: MRT4577_135841C.1
cgtttgtttgtttggttgttgcgtgcaggacgagtgggccgtgtgcaaggtgttcaacaagcagctggcggcgaggaccgaaccaataatggcggcggccggcgcgggcgagctcgagcgcgtcggctcgctgggcttcctcagcgagctcctcgactccgccgagctgccgcccctcatcggcgccgacgtcgacgaggtgatcgacttcaacggccccgcgtccacctccggcgcgccgggcacgagccacagccacctcccggtcaagatggaggagcacgcgctgctgcacatgcagtaccagcagccgccgccgccgccgccgcccccgacgtcctactactcgagccagtacttctctctgccggcgatgaactccggcgacgtccttcccccggcgatccggaggtactgcaaggcggagcagcaggtggtgtcggggcagacggcggcgtcggcggtcagcccgtcccgcgagaccgggctgagcgccgaccccaacgcggagatctcgtcggcggtgaccccgtcgtcgcaccagttcctgcccgagttcgacgacccggtcctgaacctcgccgacctctggaagtactgaagctgaagccccctgaacgacgatcgatcggtggactggctggggacgcccgcccgcccgcctcgatcccatggtttggttggttaattgcttgatgattcgattgattatcttggcctgttgtgggatttggggttagtgacggaccgtgacgcgtcctccgcctctactgacctcggggtctgactagattattgcccgtgcagaccggcaggggattagggcccccctccttgttaatgaatcccccgcccccatcctaggttccttgtcttggtcactgtacatagcgccctactctgattgtgtctgtagcagtagcatgattattgataggattaatgaaatgggggtagattaagggggcctgcatctgcgtcagcaatgcagtgcatgcatggggggttttacgggttgattagttaatttgggcgcttggtgagccagctagcgctagcttcatatgtacatgtactgccattaattgctgcttgagctcgacataccattatgtgaatttgatgcttcagtt

SEQ ID NO: 39303 - DNA, 282 bp, Zea mays
  Clone ID: MRT4577_135842C.1
gttgggtacctttatatgtgaaatttcggctttgtgaacctttttacatgtttgttcttaggataaaaccctgaatttgcgtgcagccgctaaaaccacaccaccagctgctcatatttgcatttcacggactaggggagcactaaaccaaccctgcagctgttggtattgtttacagtagcccccgcaatggccgcgcggggaggctgcaaagatcggagccttacgtgttggttttaaagagggaggggttgtactttcacctgaagatgatcgaccgcg

SEQ ID NO: 39304 - DNA, 887 bp, Zea mays
  Clone ID: MRT4577_135843C.1
acctccggcgcgccgggcacgagccacagccacctcccggtcaagatggaggagcacgcgctgctgcacatgcagtaccagccgccgccgcccccgacgtcctactactcgagccagtacttctctctgccggcgatgaactccggcgacgtccttcccccggcgatccggaggtactgcaaggcggagcagcaggtggtgtcggggcagacggcggcgtcggaggtcagcccgtcccgcgagaccgggctgagcgccgaccccaacgcggagatctcgtcggcggtgaccccgtcgtcgtcgcaccagttcctgcccgagttcgacgacccggtcctgaacctcgcggacctctggaagtactgaagccttcccctggacggctggacgacgatcgatcggtggatcggggcgcccgcccacccgcctcgatcccatggtttggttggttaattgcttgatgattcgattgattatcttggcctgttgtgggatttggggttagtgacggaccgtgacgcgtcctccgcctctactgacctcggggtctgactagattattgcccgtgcagaccggcaggggattagggcccccctccttgttaatgaatccgcccccatcctaggttccttgtcttggtcactgtacatagcgccctactctgattgtgtcagtagcagtagcatgattattgataggattaatgaaatggggggtagattagcgtcagcagtgcgttattacagggcaaagtctacggattgattagtgaatttgggcgcttgatgagccagctagcgccagcttcatatgcacatgtactactattgattgctggtcgagctcgacatagcattatgtgaaaatttgatgcttcagttaacct

SEQ ID NO: 39305 - DNA, 2332 bp, Zea mays
  Clone ID: MRT4577_135844C.1
gccggccgggttccaaagcaacacttttcctctgagccgccggccgtcccgggctctgtctctgttcttctgccccgactccgcccacgcatctctttctcctcttcccccgcgcggcggccgcgggagtgttcgtgttcctcacttctcccgcttgcgtccccgacactccctcagatccgcggccgtttcccgatccgaggggcattccagccctaaatagcggccggtgagcaggtctccttccgccggcgcggaccacctggagggagtttatcctggagccgtcttcctcctcgcctccttttgcggcgcggcgcggaggccggagtcgcttggaggcccagctgtgtttgggttgatttcttcgtttgtcgtggttagaggcacctggtttgtttttttgctgaagctggtggtacatgtgaatagcagggcctgtcttctgcctctgcttttgcttcgaagcaatggcgaatgcaagcaagcacttgcaaccttcaagtcaagcaggcaatgacaagaagtatcagggcacgctggttgcttcaccagcaaaggccatttcacctaagtgtgtgaaccgcattgtgccatcgaagcaactgatcttgggtgggggttcaataggccatgtggcatcatttctgatcaaggtcgttgcccttgaggcagtcagaagagtttctaaaacaagatgccctttcatatggaattctgttcaagcattgcagatccttgtgtatcctccatttagctggatccaaagatgggcaccgctcagatttctcgtgcagggaattcagaaactatccatgccactgttgtttctgtcagtcacaacaacagtaagtgagctgtcttccaagcatgatgatgaaccagataacaatacagaacattctgagacaccttctgaaacaaatgaattggcgtcaacttctggcacaagcgatgctgctgatggcacaaaggaaatcgtgcaagagaactggcttgtgttacttttcagggagcttgagaagcaaggcatcactttgcctgagaggtttactgaagatgagttacgcagattttatgttgctgcaaatggtgactttcaaagtttactctcttcggttaagaagacaattcattggagggaaacatttcacatacttacattgcaagaacttgatagatggtctcacttagtcttttggcatgggtttgacacgatgcttcggccttgtttagtagttcgtcttggacttgcatgctctagcatacctcctcatgatagaccccgtttcgggcaagcagtagtttctcaaattgaccatggcgttgtaaatttgatcaatgaagaagattcaaggattaccgttttactggattgccatgggatttcgccattcagatttccaatgcaaatgatgaggtcgttcatcactgtggttcaagaaaactacccgaatcgtcttggggtattgtttgtcatccgtcttcctccagttgtcagagttattgcacagacatttcttcaagtcttgaaaccagctacaaagcagaagttgcgttttgagggagattcgtacaagaaggcattggcggagttcctgcaggctgtgccagcgtttctgggcggtaaatgcagctgcccgcgatgtgagagtcctcgtgatgattcagtgatacaggcaggggaagggagcaagaagcagccccgcttggtcagcgttgatgacgggtcacctgtcacagacttggacttcgacttggatgaagagatcccatcaccttatagctgcgagaacgccatcagggctgcgataatcggcctgctgatggtgtgcatcttcgtcgcgtttctggctgggatgatcgaccctgcatccgttccagccagtgcctgagaggctgagagcttgtggaatagagcatgcacgtacatgtgttgctaattaggatgcagggtgctgtatttcttggcaggcttcttgtatgttgtcgtcagaccgccatagagcgctttctcccagtgtgagcgcgcgcatgaataatatatatcctctgtgtcaaatgttggttagcagttcaattcgggcctactagatttcactattttcttttttatcttgatcgggcctactgaatttttgctcctttttctcaaaaaaaaaaaaaggcccctagggccatagagcttatatgagctacgctctggccacggcctgggtggaccgcgtcatagatccgcccctgcctgccagttctgcttcacagtgaatccattaacagtgcgtttggatgttggaatttagactcggaattcagaattggaatttagact

SEQ ID NO: 39306 - DNA, 1380 bp, Zea mays
  Clone ID: MRT4577_135845C.1
gcgccgcgcggggagaagaccggatgggtcatgcacgagttccgcctcgagggcaggcttccccagccgctcccgcgctccgccaaggtccggccctcgtgtacttactcgttccgtcgttcggcgttgcaagcaagtctcctgcccttaatttccggccggtgggcgtgggctaacaagtcccctctcttctttttcttgccgccttgtctgtttttgttgcgtgcggtgcaggacgagtgggccgtgtgcaaggtgttcaacaaggagctgcaggcggcgaggagcgagccattattggcggcggccggcgcggcggagctcgagcgcgtgggctcgctgggcttcctcaacgagctcctcgactccgcggagctgccggccctcatcggagccgacgtggacgaggtgatcgacttcaagggccccgcccccgcgtccgttccggacgcgagctacctcccggtcaagatggaggaggagcacgcgctgctgcagatgcagcagtgccagtaccagccgccgcccccgatgttgtacccgagccagtacttctctctgccggcgatgaactccggccacctccccccggcgatccggaggtactgcaaggcggagcagcaggtggtctcggcgcagacggcgtcggtgatcagcccgtcccgcgagaccgggctcagcaccgaccccaacgcggcgggcggctacgcggagatctcgtcggcgacgaccccgtcgtcgtcgcaccagttcctgcccgagctcgacgacccggccctcaacctcgccgacctctggaagtactgaagcctgggcgacgatcgaccggtggctgggccgcccacccgccccggtcacgtggtctggttggttaatttgcttgatttgattgattatcttggtctcttgtgggatctggggttggtgaccggttcgctgatgcgtcctcgttcgtcacctccgccaggtccggcctctactgacctcgggtctgactagattattatccgtccagaccgccaggggattagggcttccttgttaattaattaatcccccctcccccatcctaggttactttctcttggtctctgtacatagtactggtaccctactctgattgtgtcattagcagtagcatgattactgataggattaatgaaatgggggtagattaagggggcctgcatctgcgtcagcaatgcagtgcatgcatggggggttttacgggttgattagttaatttgggcgcttggtgagccagctagcgctagcttcatatgtacatgtactgccattaattgctgcttgagctcgacataccattatgtgaatttgatgcttcagtgaaaaaaaaaaaaaaaaaaggcccctagggcc

SEQ ID NO: 39307 - DNA, 240 bp, Zea mays
  Clone ID: MRT4577_135846C.1
cggaattgcaggagcgggcggcgccgttttttttttttttttttttactgtgaataggagtttaactctttacccgggaaaaagaaagaccgaggagtgttttacgatttcaattctcttctttcacccgtggtagggtttagacaatctaattagaaaaatttactctcggaagaacttccggggaaaaaacacaactcttttttgaatgcaactcatcactctttgcatgcattcatc

SEQ ID NO: 39308 - DNA, 230 bp, Zea mays
  Clone ID: MRT4577_135847C.1
actgaaccggtgtatggcccagttcctttatctgaatctgctcaagcttggcaacaaccgaacccgttccaagcttctggtcaagctcaaatgggggctggtggatatccaggtgactgggtcaacctttttttttccggaccaccacttgggttttccaaaccggctgtgccgcaaagcacccaccaataccatgtggtttgtgggcccctttttttttccgaatcccg

SEQ ID NO: 39309 - DNA, 715 bp, Zea mays
  unsure (1)..(715): unsure at all n locations
  Clone ID: MRT4577_135848C.1
gttgcgataaagcagatggacttgagcaggcacaacgttaaaagcataaacgggggtgttcaanaactcaaanagcaactgaagatgctgaagatggaagaccaaaatgacatttgtgtagactattctgatacattgtcaagcgacgagttcgataatatgaacatctcaatatatcgaaccatggaagagcagttgtctatgtttaaggatggggaggacagagatttctcttatgtacaggacatgcttgctagcgcgtgcgacttgccagagcacctagaagattggcaagtgagctcagatgtgttcctttgtcttgaaaacaagtacagcaagctggttctgtggtcaaaatccgacaggaaacttctgtttgatcttgtgaactcaattttggctgacatgaccattccagacattggcttgtgttcaaagctcatgatgaagcgctggcctgaaatagatcacggacagttaactgaaatcgtcaggcaaatggtgcagaagcgaagtaactgtgggcactttttcttggaggatgttcagcctttgccattggaccatggttctgaggtagagctggttggaacgaagattgccatgatgatccatgatgacattatgacagattttatcgtcggaatcatgtcctaggagaacctccttgttatcagctaatgtttaagggctgtagttgtttagctagattgtt

SEQ ID NO: 39310 - DNA, 575 bp, Zea mays
  Clone ID: MRT4577_135849C.1
ggccaactagcaatgttcttaattaaatatcctgatgtttgcagccatatcatttaacactatgaccagataagaagtgactcagtaccagcagtggtgaggtcacacgtttctcaatagcgagaacaacaccatccttcgtcttcaacccaattgcagtggatcccaacagcttggtcgtctcgggtagcacgagccactgcgaatacaacacatcagcgatggagttctcacgaagcgcgcccggggcaagctccaccagctgcagcagctccgggtccagcgctgccgcgtccctcctcgtcggtccctgataaataagacagagtcacatgctttaagccgtttcgcacccacaaagagactccatccaattgttagaagatgtcagcttggcttgccacgggcagctgactaggggaggtcgctagcctaatccttgaactcgtcgacgttctggaactcctggagatctgcctcgacaccttcttctttaccttcaccaaacagatgctcagggtcttcaactttataacttgaaaagttcgacctcttggtcgccgaaacttaactgt

SEQ ID NO: 39311 - DNA, 321 bp, Zea mays
  Clone ID: MRT4577_13584C.1
tttgacgtttgaaatggtcgtgggccgttatgcaaatcccggatcctattcacgggctaggaatgagtaaacaatttttctctggtgatgccagaaaaaagcggccccttataatgactgcaaattctatcaaggccgacagcccactaggtaatcgccatggcttgttggtgttggtatccaactggggcccaacgccccaacccagcgcaggagtggcacggcgtgagaagaggattacccgaaacctggagcggagcggtggtgccgtggcgtctccctcctctccgtcgcccgcaggcgtgcgccaccatctacgcc

SEQ ID NO: 39312 - DNA, 378 bp, Zea mays
  Clone ID: MRT4577_135850C.1
gggtggggtttttttttttttttgttttaaggacacaaaaaaagggggtccctttttttattgggaccttggtgtttaccgggcacacccccaaaaaaaacttgcgaaaatgtcgaaaaaaaaaaaagcagagctgggtgtttacccaaccaggtctggttgctagcctttggattggaggcataccacacctgttcgccagcccacaaagggttgctggtccggggttacattttttttacatgcaatgcaacccaattttgggagaagagcaggacgcttgttcttggcccggcagaacggaaaaacttgggaaggttcaacaaaaacaaagggttcgaatcaaacaaaagaattttgcgcttgggcggcgctttt

SEQ ID NO: 39313 - DNA, 514 bp, Zea mays
  Clone ID: MRT4577_135851C.1
gggtacctcgaggccggccgggacccatattcagcaaccaaggagagtacgtgtaggagcagccttggcttcatcgcgtggccgccgcggcgagtacattcctgggcacccgcctggtggacccggcgccacagaacgggcgcatcgtggcccggttcgaggttcggggtgggtggcaaggcgaagcctgctccgaagaacgtggtgaagacgtcgacctcctctgaccggacgttgtggttggccgtggacgcgaagtctgagtagctgttcgggtcgtctgggaaggactacggatagatgcgtcggtgtcgcgaagaccgagaatgatctgtggtttgagttgaactctgtgtatcttgtattgttcgggactgaggccgtgaggtatcatctcacctctgtatgagtactccaaattcatcaattgccagtggcatgcctactttgaggcgtgctgcctatctggagtccatttgagtaagatcatccgctgtggcctgtgacatgctcg

SEQ ID NO: 39314 - DNA, 307 bp, Zea mays
  Clone ID: MRT4577_135852C.1
cccgatcgttgccggccggggggagggcgttccattaccagcttctatttttgatccaaacaagccgtgctccactagggatcctatccacattccgaggggacacccccgtccagttccagccttccaacttccaaccctatcctctccgcaggctgtaccctcttgttttttcggactgtgttgttccgcttggatagcctgctgggatacaaatctgtgcgggatccatggcgggggccgacgcgacgacaaagaagagggcatcatcgccaccgaccccgcaattgatgaccccgatggccat

SEQ ID NO: 39315 - DNA, 750 bp, Zea mays
  unsure (1)..(750): unsure at all n locations
  Clone ID: MRT4577_135853C.1
ctcgaggccggccgggaaggaattgacgggatacatgttgtttgttcccttgtttcttttccagtactgctcctttgttcacttcctatcctccctccccggctccccgcctcccgagtaccaagtccccgtccctctgcggattcaactcaactcggaccactgagctctgaccactaatcaaccactccagatcacggagacactggtgcaaaataggaacggtccagaaatgagctcacgcggcccgacccggcggtgcccgacgaggagcacgacacctagtaggagctgctgaagcgcgcccgcggcatggtgccgtcgccggcgacgacgacgcggtcggcgtgcgcgatcccgggccggagaaacgggatcgccggaaacatgaacacgctgtcggagtgactgtccgacctgaccagccacccttgcttcgacagtaactcactgtgccggaagctgctgcactaccctggcagccacgtggtccgacaggtcagaggttgcgacgccttaccgctcttcgacaaggccaccaactcncctggtagtcgaatcccaccccgagggtaggctgccgctcttctggcggatcaccgccgagggctgcgtcgccttctccgacgacatcgacatgctcaaaggctcatgcggcaagtcgctcgcgccgttcccgcaaggctgcttctactccaacgccctcggagggctcaagtgctaccagaaccccaagcacaaggtcaccgc

SEQ ID NO: 39316 - DNA, 425 bp, Zea mays
  Clone ID: MRT4577_135854C.1
gggaaataaagggcccgggccacttaaaaacccaaaaaggtcaattaaagggaaaaaagggaaaggcttattacacggaacgaaagaacaacaaaagcttgggacgggcacgggtgcatgtagcgacatttaaaaccaaatgcggttattggacaaaaagcactaaaaaatttatcgggggaaaaaaaaaaaaaaaaaacccacgggaacagcccaacaaaaatttatttatttaaagggggggggaccaaataaaaccaagggtccaggccccactggaccccaaaaaaaaggggggacccggaggggtaaaagcctgcaaacgcttggttgattttggggtaaggcaaggggggccaggggaacaacggatttggggggaaggcaccgcaaagcttcggggaaacccccaagggaaaacaaaa

SEQ ID NO: 39317 - DNA, 410 bp, Zea mays
  Clone ID: MRT4577_135855C.1
ggaacgccgggggcgacccaccccaccgctattcttcagtgcttgccatttacccggccacttacggcatatcttttggaaggatatcattcacaaaattgttctaaaactgaatggtgcttcatgtgtgagttggaaaaggtcttgatagagggcaaacaaggaaaatctccagtatcacctactggaatactatatcatttgaatgagattggggtcagttttggccagggcgaggaagaggatgcccatgaatttatgaggtatgcaattgataatatgcaatctgctagcatggaggaagccaagaaaaatggtatccagcagctagctgaagaaacaactctggtgcagtttatatttgggggttatctgcgatctaagataaaatgtacgaagtgtcaggtcat

SEQ ID NO: 39318 - DNA, 412 bp, Zea mays
  unsure (1)..(412): unsure at all n locations
  Clone ID: MRT4577_135856C.1
tgagccctgcanngggatgcggacgcanncagcgcgaaggggcattaaccgcacnntctgcccggttacccccgaaaaactggtggtgactcactncggcganttccggcgcgtgagggtcaactcatgattcaaagtcagcacgcgcgtgatgnctgcnntggctgnnaccctgatgacgtnntcgtgtccccgtaccaactgnnngcgtaatcaatggccnnncttcggggcccaattggtttcttcttgtggagnnggagtccatngnnacgaaagggatgaaccttgattggcccgccttccgcttcgcnttgggtgaacccaactgannaccgtgatgnntcagcctgaccggggacccgaaaggaaagaactggccgctcctgtgtggcagaagcttgaaagagga

SEQ ID NO: 39319 - DNA, 224 bp, Zea mays
  Clone ID: MRT4577_135857C.1
cggccggagccgggaacaacaacacagatcgggatccccgagaggcgaggcaggaaaggagcaattacgtggtgtggagggggcgaagagcacgaggccgtcgtagaggtactgcccgtagcggtggagcgagagcttgggatcgtcagtgaggcggaagtcgagatcgaacccgcgcgcctggagcgaaccgaagaaggtcgagtgcgacgaccgtacggcca

SEQ ID NO: 39320 - DNA, 353 bp, Zea mays
  unsure (1)..(353): unsure at all n locations
  Clone ID: MRT4577_135858C.1
cgcgctcgncacgggggcggcgcgcgacgagaggaagatggcggagggacgtatactgcggatgaggcactcgagtccatggggcttgggaacagccacgcacccgcgctcgcatactctgggatggctaaaacctctgaagcaatggagatgacgctttcgtcattgggggggcgggcgcttcacgcttcctgggggccctctgcacacgaagaaagcctcacaacaaggggcggctttngccccccccccgtaggagcatatgcttggggcatagtgttagataactatggaggcacgccaaaaaacaactccacaaatactgccacggcaggagcggggctccgtagcgc

SEQ ID NO: 39321 - DNA, 1359 bp, Zea mays
  Clone ID: MRT4577_135859C.1
ctgtgcggcgctccccgtcgattcgacgaactacattgttccctctttcctctcctcgttcccccattgggtacctcgaggccggccgggatccgtccaatcaaccgggctgctctgctgcctctccggcgccattgacgagcaagagagtcctcatcctccgacacctggtccgtcgcgtgccgtgccccacccgctaaggccagggcgccccgactcgagctcaccgcgtcgaactcgaaccgctgctgttcctcggcctgtttgtttgagagagagaaaaaaccacaggcagggggcagggtcgtcgaggatgccggagcactcagagaacgcggcggcggacctgatgggcaacatcatggagaccatcgcggagaacctcccgaggcagaagtccgtgcggttcgacgacggcgacggctcctccatctccgagcaggccaagaagctgttcggcggcggcgagagcaggaagaagtcggtccaccacgtgctgggcggcggcaaatccgccgacgtgctgctgtggcggaacaagaagatctcgtccagcgtgctgggcgtggcgacgctggtgtgggtcttcttcgagtggctggactaccacttcctcaccatcctctgcttcatgctcgcgctcggcatggccgtccagttcgcctggtccatcttcgccgccgtgctcaacagagggtccccttccagcgtgccccgcgtgcagctgccggaggagctgttcgcgagcgccggcgcggccgccggcgcccaggtgaacagggccctgggcttcctccaggacgtggcctgtggacgcgacctcaagcggctggtcatcgtgatcgccgggttcttcgcggcggcggtcgtcggcagcttctgcaacctcctgacggtcatctacatcgggttcgtgtgcgcgcacaccctgccggtgctgtacgagaggtaccaggaccaagtggacgacttcctgtacaacatgctgggcgtggtgcagagccagtaccagaagctggacaccaagggcatcctcaagggtggcgtctccaagttcaggaagaacgagtagctgatttcctcccatctacgactacgatttgattcatcctgggagtcttgatcgatcgacacttgttctgttctgtacagcgagtaacaaccgctgctgctagctacattctttactgtactgtacttgtgtgatgacatcatatcttcgcgtcgcgtgtactgaagaactacacattgcactaaggttgctttcgtacgtgtacgtgctcatctttcttccttggaaatcactcggatgtgccgccctttgcaaaatgaagcgatcccttgtttttcttctaaaaa

SEQ ID NO: 39322 - DNA, 252 bp, Zea mays
  Clone ID: MRT4577_13585C.1
cgttgctgtcggcagcatcatgaaccgccctctgctcgacgaagggcgacaggatatttctgcacgacttgccacctccttgctcctggcgtgtcgttgcagagagtaagaagaacttgaacctcagcggtaaagaagaatatggcagacacggtcacgggcagttcaaggaggtcacaagatgacactgcaacattaatcccacacagtggcaatttgggagaatcaagccggaagggcgcgacagcaacg

SEQ ID NO: 39323 - DNA, 361 bp, Zea mays
  Clone ID: MRT4577_135860C.1
gggaaaaaaaaaaagcgaccgcccgaatttgctttaacaggtcctttccatccccgattcctcctttggtttccaaagttttccaggggccataccccttcccaagacccatggcgggggggggccccctagcagttagaccctcgaatcactcgggcggggggtcccaaccccccgggatcttgacatcctggggccccttggccccaggtcggggtcggacggttgcccccttttgaagaccccgatgacctcgccggctccgggttgcttttggggcccctcaacggggtgttcccggggggggggcggggtcttgatgttctctttgggggctcccctggcacctttgcccgggggg

SEQ ID NO: 39324 - DNA, 313 bp, Zea mays
  unsure (1)..(313): unsure at all n locations
  Clone ID: MRT4577_135861C.1
aattcccgtgtcgacgagttctcnagtcggcggccgcccttatgtttttggtctggtttttaaccatggagcttaaaaacgagcggaacgggaattaccaaccaaattgcagctcgtaaggacggtagatggccaggactagtgtcgtgagcaaatagatgagaccctgcggcgctgatagcaagatactaaccaccgatctagatctgaatccactgaagaacaacggcatccaagagggctgcgattagggtggaacccagaggctctaaccttactgctctgcactgagtcccagagcgctgaaaatagg

SEQ ID NO: 39325 - DNA, 836 bp, Zea mays
  unsure (1)..(836): unsure at all n locations
  Clone ID: MRT4577_135862C.1
ctctcaggcagcggatagagatcctctgttccattaaatcccctctctatcggtccccggctgacgcgcgcgggcgcccgccaggtgtcggccatgcggattccacgtggaggccgccgcccgccgccgagtctccaccacctcctcctcctcctcgccgccctctgtttcgctgccctgaaaaccgccgccgccgctcccagaacagcaggaggcaccgaagaaggaggaggcggcatcgccagcgtcaccggcggcatcatgacatgggccacgtggccaccaaaatgcgcatggttacccttgcgaacgagtgggaagagtcactcatataatcttgtttccaaataccacaagatttggaagggcacgaaggatgctatttctgcaaaagatatttcgagaaaagaaccagtaggcggtgtgattgccttgaaggagtccatgaagtacttcgatgctgattttttcaacgattcaaaactacgtgagatggaaaacggcgcaaaagaatttaatgtgcctgcatttagagaaaaccgaaggttggtggctataaaggatggtgggttgcatgacccttctgttctagtcttcaaatcatcatggagttggagtagcaaaagcaaagtcaaggagagtgaaatgttcgactatcctcaaacctctatgccacagcgtcctagtaatgatgaagatattgcctttatgtcgataattgagcttgnggagcttattaggacaaagaaataacatcacgtgaacttactgatgtatttttaaggagattaaaaaggtatggtaccggttcttgaatctgttattacataccctga

SEQ ID NO: 39326 - DNA, 307 bp, Zea mays
  Clone ID: MRT4577_135863C.1
gaatctcctcagtgctccaaataatgcaatgcatgcatgagccatgaatgaataatcaagatatatgtgtgggtaggcatcaacaaccattgtagtctctcaaggagaaccggccgctgccgtccggcccctggttgccggcgccggcgtgctgcaggcccagcgtaagcgacacgttgccggagaccgagccggtcgtggcgggcccgtacctcatcctcaccccgggctcgaacctcccgtacaggtcgtccgcggcacccacgtgcgcgtcgccgccaaggagctccgccggatcaaggccgac

SEQ ID NO: 39327 - DNA, 778 bp, Zea mays
  unsure (1)..(778): unsure at all n locations
  Clone ID: MRT4577_135864C.1
gccggccgggtcgggtgctgagggccaccaggtcgcatctcacacctggtcgcaccaagatcttagcgtcatcactgaggagcagcgctatgatcagatggtcaagaacgaaatggccatcaggaacatcantcggaaagtacccaacgtacatgcgtcccccttactcatcctgcaatgccgcatgccagggtgtgatgaagaagctcggatacgtcgtcagctactttgacttggataccgatgattacaaccaactcaagaacatccaagtcgccaaggataacttcaagcgcatcctcgactccactgccggtggcccagccactggtgaccgtctggccattgcccacgacatccacgagcagacggcactcaacctcactggctacatgctcgagtacctcaagtccaagggctaccgcggcgtcaccatgggcgagtgcatgggcgagcccgaagcaaactggtaccgcaagaccggcgaagtcgtaacccccccttccaacggcggcggcaacaccggcacccccatctctaccgacggccaatgtggctctggcaagggaacctgtgtcggctctccctttggcaactgctgctcctccttcggatggtgcggtagcaccgacggccactgcaagactggctgcaactctgcttttggcacttgcaccggcggcagcacctcgccctccaagcctgtctctaccgacggccagtgcggagcaaaggctgccggtgctacctgcctaagctcgccgtttggtactgctgc

SEQ ID NO: 39328 - DNA, 409 bp, Zea mays
  Clone ID: MRT4577_135865C.1
gctgaccctgcgcgctcctggagccatgaggacagggcgacaaaggagagggacagatgagacagaccagatgcctcaagccctcctcccttccgcgcaccagcttacaaaaggaagctgtgcgctttatgtacaagaacgggtgcctgacccccgcccaactgatgaatcacccacggggagagttaactcctgaagacttccactcgctgctgcttgcagacgtccaccccgaggtaggacaagggatcacaaagataatgactctagaataaggactgagaggacacactcaccccatgggacgttttcaactgacacaaatatcaggtgacggacatctccggaaaacacacaaagagcaagaaccaaagatagctgatctactactgcaagactccctatcagg

SEQ ID NO: 39329 - DNA, 436 bp, Zea mays
  Clone ID: MRT4577_135866C.1
cgtcgtaagctcggaattcggctcgagaaaagatgctccagctcatcctaagttaaactcaatgaagctgatcgaaggatatttcatgagagctggttttgtatcagcatttaaagatatacatgagagacttggggaagtatggccaaaaaagttttccaggttagctctgttgtcagaagaatgtagggatgaggttatcaaggctgatatacaaggaaggaaagaaaaactggagagaatgaagaagaagggtattgtcacagcaagaaaatctaaaacaagagcacgacgaggaaaatttgttaggcagcagaaataaaacacgaaagtagtgttggagtagtcgtggcctgttattttttgcttcaacacatgacattttctcaaacagcacctggcatctacatgaaaattttctgataggggtggggat

SEQ ID NO: 39330 - DNA, 425 bp, Zea mays
  Clone ID: MRT4577_135867C.1
atttctaaaaaaaaaaaaaaaaaaaaaaaaaaaaaaaaattaaaaaaaaaaaaaaaaaacttaaaccaaacccgaacaacacactaaaaaagacaaaattaagaaaatttccataaaaaaaaaaaaaaaaataaaaaatgctttttccttggccccggggggcccctataaaggggccaatttttcaaaatttttcctcccccctggtgaccccctcggaccctccttttaaagggccccattccccccttaatgggcttgtataaaattccattggccccagttttcaaactagggaaggggaaaaccccgggcgcccccaaataaatcccccaaacaaattccctttttacaagccctgtaaagcccattaagcccccccatgcccctttccacgcatgggcacccctaaaggggaaagggcc

SEQ ID NO: 39331 - DNA, 300 bp, Zea mays
  Clone ID: MRT4577_135868C.1
cctggccaaaacaaatcaaatgctctaagcattctgccgtacaggatccactacgcatagccatctggcactcaaagataatgtaccaagcaatgggagatcaaaacacacctgctggtccagggaccaatgcaacacactaggggcacggccttgaaagctaaatcaaccaaaccttgcgaatgaagcaatcgactgttttgaagttgctgggacattcaatatggacgaaccagcctcggcgaactcattgatccaataattccatgccgtcaacactgaacggaccagaatgagcac

SEQ ID NO: 39332 - DNA, 379 bp, Zea mays
  Clone ID: MRT4577_135869C.1
atcgcgagcggcgccctttttttttttttttttttttgtttttttttttttttttttgcgggggaaatataacctaatttgtggactactgccaccagatgagttcataggcggttataccataagggcttgcaaaaaaacaaaagcgaactcgaaacaaagaacatgaatggattgtgaatataacatttggagtgattagatcggaaattttaactgtccggtcaaaataaccccagcaaagtggggaaccaacaactggaatggccgagcagatcatgtattataatcccggactctcaaatagccttgaggatgtctaccgacccctggtactcggcaagggtgaggatattaggggagtccatggagacgatgt

SEQ ID NO: 39333 - DNA, 603 bp, Zea mays
  unsure (1)..(603): unsure at all n locations
  Clone ID: MRT4577_13586C.1
natttcgcccctccgctccgctcgtctcctctcctcctcgctaanccccctcccctcccctccccacccccgaaatcaagaaaccagagcgacctccactcccccgcgccactccgatccgcctccgccacgagctgccaccaagcccccgcccgatccgccgtctcattccccctccgctgcgccccggggatcgcagtggcacccgcggctccagcaagcaaagatggagtagagaccgccagcacgagcgatcgctctttgattgatggcgcctgatctactgctccatggatcggaggtcccatcaccatcagctgcttccgctttttgtgggctgctcccccgagctcggcagaggggcgcgagaactcgagattatcgctacaagatctcccgaaatggatttgaggtggatgactctgagttactggattcagaccactgacccgtgcacgcgaagtaacatgcgatacaaggatccccccaatctagataagcttggatgtgggttgggtcgtatcaatgtcagcagctccttcatatttcatggacatgtctctagtacaacgacgagcagccgcatagcagatatctgttgtg

SEQ ID NO: 39334 - DNA, 321 bp, Zea mays
  Clone ID: MRT4577_135870C.1
ggtcgaccccgcgtcggcgcgccatcaaggcgtcggtcgacatcgccatggcggcttctgcccgcggcggtggggcgcggtggccacaggccgtcttggctccaagttcgtcgtcgtcgtcgtcgtcgccgtctgctagaacgccgtcgccgtcgtcgccggggaagaagaagaagaacacgcgcggcgtgtgcaagaagaaggtcgtgaggcggtcgtgtctccaccacacgaggacgcggagacggagggatggcagcattgctggtaccacgtcctcgtcgcttgcaaggacgacggcagcggcggcgacgacgctcg

SEQ ID NO: 39335 - DNA, 1011 bp, Zea mays
  Clone ID: MRT4577_135871C.1
agcacgtctcgctaatcgtggtcccgttccacaagcagcagacggtggacggcggcatggagccgatcaacccgcacgtccgcggcttcaacgagagcctcctctccacgtccccgtgctccgtcgccatcctcgtcgaccgcgggctcagcgccgcggcggcgcggatggccaccgagcaccacgtagcgctcttcttcttcggcgggcccgacgaccgcgaggcgctcgcgtacgcgtggaggatggtcgagcaccccggcgtcaccctcagcatcgtgcggttcgtcccgccggactaccgggcgcggaccgtctcttgctcggcttaccgcccgccggccgactcggactcgcgcgccatcaccatcaacacggagggcaagagcgagctggagatggacgaggactacctcagcgagttccgggcgcgcaaccacggcaacatcgccatcacctacgccaccaggacggtggccaacagcgaggaaacggtggcggccatacgggccatggacaacaacctgcaagagctgtacatcgtgggccggcgccccggcgaggtcaggtcgccgatgacggcggcgctggaggagtggatggagaacccggagctggggcccatcggcgacatgctcgtgtcgtccgacttctccatgtcagtgtcggtgctggtggtgcagcagtacgtggtggccgcagcgcccgcccccgtccccgcgccggcagcgagcagcgaccccgtgcgccagtacgtgagcaacgctaaccaacgggcggcggcggcggcgtccggggcataccggacgagtgcggcgtcagcagccaatagcaggtggtctggctctggtggcaccgtaggcttctgaggatcgtgtacttcctagcttgttaaggcatgtaggtacttcatcgttttgattcaggaggttgtttttcattgtttctgtagtctatgtatactgctgtattcgattttcgatctggcaggcttatatgaccagtgccacc

SEQ ID NO: 39336 - DNA, 656 bp, Zea mays
  unsure (1)..(656): unsure at all n locations
  Clone ID: MRT4577_135872C.1
ccggccgggagcaaaagcttccagtcttgttggccacgcgtccgctccatgaaccagtagcctctctccaatccccatctcctcttcctggggttttcggtcagtgtcttggcttgtgtcggggtcgcaatggtgaaggacggcggcgtgaagaaggtggcggtggcggcgccggcgccggaggaagcgacgccaaccggcctgaccgcgacgccgaccctcaccgtgaagctaccggcaccagaggcgcgggagaagtgctataagaagacggtgggggaggatgcgacgttcctggagatcgctaaggactacttcaaccagttcaaggaggtacccgcgcaaaagcactggatctgcttcaagagctacttcgtccagaagcgcggctcggtgttcggcaaccgcaagcagaagatcgaccctgcggtcaaggatgagactccggaggtggtgaagcccgcagcagcagcagttgtcccttaggctatgttcggtttcaagattttaattccccaagtggatctaatntatgtgagggagatccctccctttcactcaatccacttggggtttaatccccctttggtctaacccctgtccaaaaaagtctattcggttaatcctgaaaaaaaaaaaaaaaaaaaggggcggcc

SEQ ID NO: 39337 - DNA, 277 bp, Zea mays
  unsure (1)..(277): unsure at all n locations
  Clone ID: MRT4577_135873C.1
aggcacgcgnacgnaagcnaggaanacggcacgagcaacaagaagaaccgaacaccgaccgagggggggaaccaaggaggggggggaggagcgcaaggaggaccagacccgagaacacacgaaccgagacaaagaccagcagcggggcgacacgaccgaccaggaggagaacgccgaacaganggcccggaccgacaccgcggcgcggagcgcacaggggcacaacgacaacaccaagcgggagaacgagaaaaacacgcnggccaagaaccacaag

SEQ ID NO: 39338 - DNA, 926 bp, Zea mays
  Clone ID: MRT4577_135874C.1
attcaagaagattcagggtgcaaaacttcatttagccaaaagacaacccacactcagcgcaaatgtcaggcattggaatttgatacacagcatgacctgctttcagaactactagtaacattgaaatttgacgagatgttagaacagtagtagacccacaggttcgatccaacatcgagatgggcgatgagaaacttagaagagagatgtgcccttgcccttcttgtctccaccaatctcaaaatgcttgcacctcttaattgcgtgctgtgagtagggcttgcagctctggcactgcagcttcaatacgattttcttggtggtcttggccttcttgtggaagacaggcttggtctggccaccatatcctgactgcttgcggtcataacggcgctttccctgggcagacaggctatccttacccttcttgtactgagtaaccttgtggagagtgtgcttcttgcactctttgttcttgcagtaggtcttcttggtcttaggaacgttcaccattttggcggcggcgaaggggattgtgcagcgtgctccctgctccggtggtacctatccctcgtcccgttccccacccgaggcgtgaacccgccgccgactcagcagcaggagacgcgccaaggagagcccgcaaggaggcgactatgagggccaagtggaagaagaagcgcatgaggaggctgaagaggaagcgccgaaagatgtcacatcctagttcgtcgtcaccgtttgccatgtgtccaatagctcgtcttggaaacctgcacttgagtatgccatctatcgtggtttctagctatatccagagttttgtgctaagacaaatcagtcagtcgttttgtgaacctactatgatggagctttatttgctgctaatatcgacctacctattaagtaaaaaaaaaaaaaaaaaa

SEQ ID NO: 39339 - DNA, 594 bp, Zea mays
  Clone ID: MRT4577_135875C.1
ctgttccccacccatatcgtgaacccgccgccgactcagcagcaggagacgcgccaaggagagcccgcaaggaggcgactatgagggccaagtggaagaagaagcgcatgaggaggctgaagaggaagcgccgaaagatgaggcagagatccaagtaggctgatggggattgtggatggtggtgacgacatggttgtgttacgattcttcgatgcgtgtgagttcatggagagatgtcacatcctatttcgtcgtcaccgtttgccatgtgtccaatagctcgtcttggaaacctgcacttcagtaggccatctatcgtggtttctagctatatccagagttttgtgctaagacaaaccagtcagtcgttttgtgaacctactatgatggagctttatttgctgctaatatcgacctacctattaagtaattgcaatgttcgtctatgctgtgcttggttcctctttcatggtatttgtgatacagtcttgctaaattatcagagaaacagcggccagcactatcttgtgctgaagagcacactgattggtgtgcttcagtggagtggcccttcccatgctgtttgcttttgcg

SEQ ID NO: 39340 - DNA, 475 bp, Zea mays
  Clone ID: MRT4577_135876C.1
cctcgaggccggccggggttccccacccatatcgtgaacccgccgccgacgcagcagcaggagacgcgccaagaagtgcccgcaaggaggcgactatgagggccaagtggaagaagaagcgcatgaggaggctgaagaggaagcgccgaaagatgaggcagagatccaagtaggctgatggggattgtggatggtggtgtcggcatagttgtgttacgtttcttcgatgcgtgagttcatggagagatgtcacatcctagttcgtcgtcaccgtttgccatgggtccaatggctcgtcttggaaacctgccatctatcgtggtttctagctatatccagagttttgtgctaagacaaatcagtcagtcgttttgtgaacctattatgatggagctttatttgctgctaatatcgacctacctattaagtaaaaaaaaaaaaaaaaaaaagcaaaaaaaaaaaaaaaaaagcggcc

SEQ ID NO: 39341 - DNA, 456 bp, Zea mays
  Clone ID: MRT4577_135877C.1
cccagcgtccgcgtgaacccgccgccgacgcagcagcaggagacgcgccaaggagagcccgcaaggaggcgactatgagggccaagtggaagaagaagcgcatgaggaggctgaagaggaagcgccgaaagatgaggcagagatccaagtaggctgatggggattgtggatggtggtgtcggcatagttgtgttacgtttcttcgatgcgtgagttcatggagagatgtcacatcctagttcgtcgtcaccgtttgccatgggtccaatggctcgtcttggaaacctgcacttcagtaggccatctatcgtggtttctagctatatccagagttttgtgctaagacaaatcagtcagtcgttttgtgaacctattatgatggagctttatttgctgctaatatcgacctacctattaagtaattgcaatgttcgtctatgctgtgcttggttcctc

SEQ ID NO: 39342 - DNA, 295 bp, Zea mays
  Clone ID: MRT4577_135878C.1
gccacgcgtcactccacgcgtacgccatcacttctatcttcattcgctcctattaatgcccagttcttcttaccctttacaattcccacatattttatccagattcatatttacatctagctactctatctatcttgctcactactcatctccatcacttcaaactaattctactatatccatacttatcactttatatcaacatatattaaacctttctttcatcatcatgcacatgtatacatacatttccgaattttatatccgtttgacataagctccttactttgaccac

SEQ ID NO: 39343 - DNA, 283 bp, Zea mays
  Clone ID: MRT4577_135879C.1
tcccactctttcgtccactcgtccttcctccctttttttctttttcttttttttggtgtttcggtttttttttttttcctttttttttttatccttttttttttttctccaaatacataacccttatacatgaaaccttatgccccgtgttcaaaaacttatttttacgcacgctcctttaaacaagctttctgctacatccagccttatccgctagttcttccacttcgaaccctcatatattgcccttcttgaccatttcttttcttttttcaccttccac

SEQ ID NO: 39344 - DNA, 325 bp, Zea mays
  Clone ID: MRT4577_13587C.1
gtcgcttgcgcatgctatggacgtcgcgcgaccgccgccgtcggcgtccctgcagcgagcgatggctccgccgtaacttaaggttgacaccaatgcaccgccttggttagtgtgcacagccggcagacgggcttctactcatcggcgcctccgttcatgacgtcttacgggatatgactgaagacagttaccaccgaggtggaggagatgattaccaaggctgagaagaacggccagatgcatactgagatgggcggtctagctcatgaccagcacgggatgcgagttgtcatgagcgtgactgggagcaagatcctaatgatac

SEQ ID NO: 39345 - DNA, 624 bp, Zea mays
  Clone ID: MRT4577_135880C.1
ccggccggggaccacgactctcggcaacggatatctcggctctcgcatcgatgaagaacgtagcaaaatgcgatacctggtgtgaattgcagaatcccgcgaaccatcgagtttttgaacgcaagttgcgcccgaagccttctggcggagggcacgtctgcctgggcgtcacgcgtgaacccgccgccgacgcagcagcaggagacgcgccaaggagtgcccgcaaggaggcgactatgagggccaagtggaagaagaagcgcatgaggaggctgaagaggaagcgccgaaagatgaggcagagatccaagtaggctgatggggattgtggatggtggtgtcggcatagttgtgttacgtttcttcgatgcgtgagttcatggagagatgtcacatcctagttcgtcgtcaccgtttgccatgggtccaatggctcgtcttggaaacctgcacttcagtaggccatctatcgtggtttctagctatatccagagttttgtgctaagacaaatcagtcagtcgttttgtgaacctattatgatggagctttatttgctgctaatatcgacctacctgttaagtaattgcaacgttcgtcttaaaaaaaaaaaaaaaaaagcggcc

SEQ ID NO: 39346 - DNA, 362 bp, Zea mays
  Clone ID: MRT4577_135881C.1
gccctccttctttttttttttttttttttttttttttcccggggctgggaaaaaaagagatttttgattaccgaaaagattcaaaccattttttttaaagattctatcaggctggcatgccgggatccatctattagctttgaccgaagagagatactctgctgtaccacgaaaatattccatggggcaagcacactccccaatgttaaaaggcgggtgggacaaaaacaggcatgctcaattgtttgtgatccaacaaccgatcctggaacctcccctgaggcaaaacggacgttttcgttcccaatcttcaaccacaaaatttgggatcaacctcatggggtgggaaccaaaaattaatt

SEQ ID NO: 39347 - DNA, 1572 bp, Zea mays
  Clone ID: MRT4577_135882C.1
actgctccgctccccctcttcccccttcggtctgcccaaatcgggagcgctcccctcgccctcgcctagggtttcgcccctcgatccccgcggccccggccggcgccgcccattccttctccaccgccgcaccgcgtgccgattgcattctcctcctcgcggtgaggctgccaccgcgagggagcgagcgcggggggagatcggccgctccctccttccccgccggcccgaactcgatctcttccccggaccggcgcttgggcgcgcgggcaggggaaggccagcgctgtggtcgccgccctgcgcagcatcggcagtagtaggatgaccacactgtttgcacagggctgaatctttggaacaagaaaacttctaagtgaagctgcacacagagaacctttagagttgtctgctgttattgcttccatggcaacaaatgagaacctcccaccaaatgtcatcaggcaattggctaaagaactgaagaatcttgatgaatcacctccggaagggattaaagttattgttaatgatgatgacttcagcaccatttttgctgatattgagggccctgctggtactccatatgagaatggagtattccggatgaagctattgttgtcccgtgacttccctcactctcccccgaaaggattcttctcgacaaaaatattccatccaaacatagctactagtggtgagatatgtgtaaacacactgaaaaaggattggaatcctagccttggattaagacatgttcttctggtagtgagatgccttctggtcgaaccatttcctgaatctgcacttaatgaacaagctgggaagatgctactcgaaaattatgaggaatatgcacggcatgcaaggttatacactggcatccatgccctcaagaataagtccaagactggagctatatctgagtcgaccacagctctgaatgtcgacaagtcaagcactgctcccaacgagaacgcaccatcgatgccaccggcaatacctacctccgctgcatccagagcacttggcacaaatttgcaggatcagagccctactgtatctgatcctactgtaggagcggcggcggcggcggcggcacgaaggaaggatggcccaatgccttccaaagtacctgttgataggaaaaagatggatgcacggaagaagagcttgaagagattataggcggaaccttcatagtccagcatttaaatctgtcggaaatttagcagatgcctagcgaagctgggagagagacaattagttgggaggcatctgatgacctggcttccgggaggtaggggtcctgggctgggacaaaagtgaataatgtggcctgggtgagtccttcgggacaactgtatgtgcaatgtccaatcatttggaagaacacctgcctatttccttctgtcctctgtattttgttagcttagcggtagtgttagctagctcataggggcaattccctgtctagccatgggctgctgctccgtactctgcttgaataataatttgtccgtgcaattacagctattgttttgtttggaggaatagttgcctttttctgtt

SEQ ID NO: 39348 - DNA, 561 bp, Zea mays
  Clone ID: MRT4577_135883C.1
ccggccgggacaacactaactattctccgttcctttctgtttagcgatagagctacagttacatctcactacatctagtgagtgttcaatcggatctcggcgggtgtcttgttgctcactagttcataactgagagacagtatgtaccgccctgctgctgaggtagttggcgtcgtgttcctcctgtacctgccgcccggcaatatgcagaaggtacagctccttttaatttcgaaaacagaccccaatcctataaccgcgcgctaggagatgacgacggccagctgctgttctacctcaacgactacatggacctgcactagctgttgctgccgctctactccgctaatgccttccactacctgcagctttaactgtaattgctgcatcatcaccatgaccataacgacgacgacggcatcctaggagcctggaaccaaccgaccgaccgctcgcggaatctgctccactatgataaaaggtgatcgatcatcattctccaaccgctagtccgagctcatgcacgagcgagagcaaatgttagcaactctaccagatctg

SEQ ID NO: 39349 - DNA, 501 bp, Zea mays
  Clone ID: MRT4577_135884C.1
cattgggtacctcgatgccggccggggttcccctcccatatcgtgaacccgccgccgacgcagcagcaggagacgcgccaagaagtgcccgcagggaggcgactatgagggccaagtggaagaagaagcgcatgaggaggctgaagaggaagcgccgaaagatgaggcagagatccaagtaggctgatggggattgtggatggtggtgtcggcatagttgtgttacgtttcttcgatgcgtgagttcatggagagatgtcacatcctagttcgtcgtcaccgtttgccatgggtccaatggctcgtcttggaaacctgccatctatcgtggtttctagctatatccagagtttcgtgctaagacaaatcagtcagtcgttttgtgaacctattatgatggagctttatttgctgctaatatcgacctacctattaagtaattgcaatgttcgtctatgctgtgcttggttcctctgtaaaaaaaaaaaaaaaaaagcggcc

SEQ ID NO: 39350 - DNA, 2336 bp, Zea mays
  Clone ID: MRT4577_135885C.1
tttttttttttttttttttttttttgattcaagtacaaaactttcatttagccaaaagtcgaccaacaccccagaacaaatgccaggcattggaatttggatacatagcatggtctgctttcattgctacattaacattgaaaattggcgacaggtttttataacagtagtagtagacccacagcttcaactcaacaaccagacaggtggaccagaagcttagaatagagatgtgcccttgcccttcttgtccccaccaatctcaaaatgcttgcatctctgtgacacagggagtcagcaaagagtgagctataaccaatggacaaatgttttgttcagcagcaagtttagcacgggagaatcaagacagtaccttgatggcgtgctgtgagtagtgcttgcagctctggcactgcagcttcagaacaatcttcttggtggtcttggcctgaaaggtataaatacaatcacatttgtcatatcccaaagtattatctcaacaggcatttagaatttgccaatatttacagacattcatgctagcatcaaaacagacgaaggtacaagtacagtcaaatagatatgaatgcattaccttcttgtggaagacaggcttggtctgacctccatatcctgactgcttgcggtcataacggcgctttccctgggcagacaggctatcctttaccgtcttatactgagtcaccttgtggagtgtgtgcttcttgcactctttgttcttgcagtacgtcttcttggtcttaggaacgttcaccatcttggcggcggcgaaggggattgtgcagcgttctacctgctccggtgctacctatccctcgtgccgaattcggcacgaggcgtgaacccgccgccgactcagcagcaggagacgcgccaaggagagcccgcaaggaggcgactatgagggccaagtggaagaagaagcgcatgaggaggctgaagaggaagcgccgaaagatgaggcagagatccaagtaggctgatggggattgtggatggtggtgacgacatggttgtgttacgattcttcgatgcgtgtgagttcatggagagatgtcacatcctagttcgtcgtcaccgtttgccatgtgtccaatagctcgtcttggaaacctgcacttcagtaggccatctatcgtggtttctagctatatccagagttttgtgctaagacaaatcagtcagtcgttttgtgaacctactatgatggagctttatttgctgctaatatcgacctacctattaaggaaaaaaaaaaaaaaaaaaaaaaaaaaaacacacacactgaccaacacagcagctccgctcgtcgatcagctctcggctgaccactcatcgccagtgggtgcctgccgaccaggtctcgccaccgccgccgccgccgcggtagagaggggagggagagggagaaaaaactggcccagatcgagaggtacagcacgaaaaagagaggcaagagagataggggaccggagggcggcgggccggggcccccagaccgagggggctcgggcgcaggaagctgatgaggctcctgtcgctcgtccccttcggctgccgtgctggacccatcgacgacgcgccgccgcccgtggaccacgctgccgccgtcgtcgcgaggtggcgccgatatgagtggcccaaaccagtgcgacctactggttgctgttgcataccaagggccgcttccgccttcaccctatcagggatgatgatgctaagttcaagctttgcaaggttaggtctgttcagcttgcgcagaagggcatcccgtacctgaacacgtatgacttacgcaccatccgctaccctgacccgctcacctgatcagaaccttcaatatattccctgtatctggagaccaacaacttttgggcttcatcatctttgatcttacgagaaggaaggatatcccagtcagtgtacatgctcccgaattctctctcccggttatcgataaggatgctataagtggcatcaggtctgtaaggagtgtcgccaccaaatttcttctggttgagataaccagacataagtttgatgtaagcaccaccgcattcaatatcttgctcaatctttagagagtactggatcaccaatgtccggtccttgttactaaattgtgggaattttgctgatatagcaaaatgtttggcatccccagttgtttgtatacctttatcgtcagggtctccagagtaggttcccgctgtgtgtcggaaggttccagcttgtccttggctcttcttccaatcagatttcacccagcggctatcccacccatcatcgaaccgttcctcgaacccacgagtcaa

SEQ ID NO: 39351 - DNA, 396 bp, Zea mays
  Clone ID: MRT4577_135886C.1
ccgtccgacggtagccctcatgtagatacacagaaggagccaacgcataagaccctttctaatagcacagtgtccatagactgtcttcctgaaatctcaatcacctccctgtataaaaatcgtgatgcatgttggatggaacttgtatcttgctttggcaaaaataattgcattgctgctctgtcaatgcccctacaaaaaaaaaaaaaaataagaaatgcatatgacagagagatgttctaggacactgaacccaaatgatccattttctggagaggcctttgacaacttggcgcaccagtgcacaatttgagttctactggggttgacagaaaattcaatctccttctggttctggcacgctgcttttgttaaacccctgggttttcacaactt

SEQ ID NO: 39352 - DNA, 2182 bp, Zea mays
  Clone ID: MRT4577_135887C.1
ctccctaacttctacgcgcgtgctatctcgtcacgtagattcctgtggcgtagcaactccttgacactccctgcctcgagtagctgtctactcggttcgtccatgtcccgaggctgcgattgcaaagagagcggttcgtccatgtaggggctctgcgattacaaagagagttgttcgtccatgtaccggggctgtgattacaaagagagaggctcgagtggcgcaattcttctgggacggcggatctcgccgtgcgtgcgttgcgcccctcgtcgcagcggacgggtctggatcgttggcatgggaggctgatctatgagctgaggcgaacagtgactgatcgtgtcgtgtgagcttggtatctcttgtcccgtggcctggctccgcatggtcatgccgctgcggtcggtggaggtgtcgcgcttgtggcgccgccgcctgctagcagtggaagaagaagcgcatgaggaggctgaagaggaagcgccgaaagatgaggcagagatccaagtaggctgatggggattgtggatggtggtgtcggcatagttgtgttacgtttcttcgatgcgtgagttcatggagagatgtcacatcctagttcgtcgtcaccgtttgccatgggtccaatggctcgtcttggaaacctgcacttcagtaggccatctatcgtggtttctagctatatccagagttttgtgctaagacaaatcagtcagtcgttttgtgaacctattatgatggagctttatttgctgctaatatcgacctacctgttaagtaaaaaaaaaaaaaaaaaaagcggccgcttttttttttttttttttcctttttttttaaaagaaataggcaagtgttcttccaaatgattggacattgcacataaagttgtcccgaaggacccgacccacccaggccacattattcacttttgtcccagcccaggacccctactcccggaagccaggtcatcagatgcctcccaactaattgtctctctcccagcttcgctaggcaactgctaaatttccgacagatttaaatgctggactatgaaccctcctcttcttcccaggaaggttccgcctataatctcttcaagctcttcttccgtgcatccatctttttcctatcaacaggtactttggaaggcattgggccatccttccttcgcgctggtgccgccgctcctacagtaggatcagatacagtagggctctgatcctgcaaattcgtgccaagtgctctggatgcagcggaggtaggtattgccggtggcatctgatggtgcgctctcgttgggagcagtacttgacttgtcgacattcagagctgtggtcgactcagatatagctccagtcttggacttattcttgagggcatggatgccagtgtataaccttgcatgccgtgcatattcctcataattttcgagtagcatcttcccagcttgttcattaagtgcagattcaggaaatggttcgaccagaaggcatctcactaccagaagaacatgtcttaatccaaggctaggattccaatccttcttcagtgtgtttacacatatctcaccactagtagctatgtttggatggaaaatttttgtcaagaagaatccttttgggggagattgagggaaatcatgagacaataatagcttcatcctgaacactccattctcatatggagttccagcagggccttcaatatcagcaaaaatagtagtgaagtcatcatcattgacagtcacattaattccttctgcaggtgactcattaagattcttcagttctttagccaattgcctgatgacatttggtgggaggttctcattggttgccatggaagcaatgtagcagacagtttaaaaaatgtcttattacttcaactagaactgttgttgtaacacaatagcaccctttgtgaccacaaaaggcctttgtgcagttgcaactccgtggcaccgtaagaacctcaggcgataggcgggtcggcagcggagcggctgaacaagcaactgagttgtgcggcggtggccgacgagaagggacagttgccgccgcttgggtggttctcggacggtgcggaatcggaaccctaggcggggaggaggaggattcaatttgggaaattagaggtgagaggagaagaggcggccggtagggatgaaaacgaacctcgg

SEQ ID NO: 39353 - DNA, 436 bp, Zea mays
  Clone ID: MRT4577_135888C.1
aaattatatcttgttttttcttttttttgcttcggggaaacatagaaagaatctcccttattatgagaacagcttctcctggacctaaacggcggagttcaacagtcattgacccattacggtaggctgaatttgcctccaggaaccacaagccccaagccagctatgtggacattgccggccccaaagcaaggttgcatatgcctacaaaagacccccatcagaccagggcggggtgggccacatgggaggtgccgctcaagctggacatgtggcaacctcaccctaagggacaccgtatgatcggagcccgattgccctacggaccaccaaggctaaaaaagttacattcctgccctaccatggaataaggcttcacctgcttcaaaaggcggacattacacctagctatgcatgggcatgcctggtatctcct

SEQ ID NO: 39354 - DNA, 102 bp, Zea mays
  Clone ID: MRT4577_135889C.1
cacaaacggcatgacgggacagatggacacaacacacgagcctgacagcatgctgagtataaccagcaagggctgaacgagatacctaacatcacatataat

SEQ ID NO: 39355 - DNA, 319 bp, Zea mays
  Clone ID: MRT4577_13588C.1
attaagttgatctaacttatatagggggggggggggggggatatgggtgtgggaagggggggggggaagggggggtgaagaggggagaagaagaaaaaaaaagaaagaaaggggagaaaagggtttatgaaagaaaagagaaaaaaaataaggcacggggggaaaaaaccccagcaaatcccaggctaagctggccaaacaacccattacattagtggcagaaggcagcaaaatcatttttaaagacaaccaaaaaaaaaaactaaagtgggacacaaaaaaaacaattgatttttttcagacccggaagactgtttta

SEQ ID NO: 39356 - DNA, 255 bp, Zea mays
  unsure (1)..(255): unsure at all n locations
  Clone ID: MRT4577_135890C.1
acagggcagcctgtggtgtcgcgtaccaagcatgtccctcgtcctacctctgatggcgacgctgcccggctgactattggcttcgacccagctggggcctctcgggacccggagggcacacggggggcttcatcggagcccaagtggctggncctatgtgcgaaggtgatcaaccggccgctacgccatgctggggcgcggtggggcgccattcgccccggaagatcttaggtctagatggggcataataccccc

SEQ ID NO: 39357 - DNA, 2328 bp, Zea mays
  Clone ID: MRT4577_135891C.1
ccggccgggccgggaaataaaaaaagcccgtttatccatcggattcgatccttccgttcgcagtatggatccccaccgccgctcaccggaatacaactccctcctcctcgccggcccgcgcctgggtcctctgaagcaagcccacgcgcgcctcgtcgtctccggccacggcgattccttgccgctcatcaccaagctagccacgctcgcggttgcggccggcgccgcctcctacgcccgcctcctcgccgcctcccacccggcacccgactcctttctcttctgctccctcacgcgcgccaccgcgcgccgcgggctccccgccgccgccctcgccttctaccgctgcctactcgccgccgccctccccttctccagcttcgcattcacctccgtcgccaaggcctgcgcggacctgtccgcgatccgcgctggtatgggcatccacgcccacgccgtcctcctcgggctcggctccaaccggttcgtgcagacgtcgctcgtcgtgctgtattccaagtgcggccagctggatgttgcgcgcaagctgttcgacgcgattcgtgacaagagcgtagtcgcttggaacgcgatgatttcagggtacgagcagaacgggctcgctggaagggcgatcgaggtgtatagggagatgcaaatggccggggaagctccagattccgcgacgtttgtggccacgctctctgcctgtgcgcaggctggcgctttggacttgggacgtcaggtggacaagctcattgtttctgagaggatggagatgaatgtggttcttggtgctgcacttgtgaacatgtatgccaggtgtgggcttgtgaacaaggctcgtgagtggttcaatatgctccaggaacgcaatgtggttacgtggacctccatgattgcaggatatggcatgcacggacatggcggcgaggcagtcaagctattcaatttgatgagacagcaagggccaccacccaatgatgtcacttttgttgcggtgctgtctgcgtgcgcacatgctggattggtaagcgagggccgggatgcttttgcttcaatgaagagtgtctacggattggtccctcgtgttgagcactattgctctatggttgatatgtatggaagggcaggacttcttgatgatgcgatgcgatttatacatgattcgatacccggagagcctggacctgaagtttggacagctatgcttggtgcatgcaagatgcacaaggatttcaatcttggagtggaggttgctgagcgattgatcgccctcgagcctgagagtccatctcaccgtgtgctgctttctaatctatatgctttgtctggtaaaatgaaccatgttgagaaggtgagggatacaatgattaagagaagattgaagaagccaataggatatagcttgattgagattgctggtgttgctcatttgtttcgcatgggtgagaagtctcaccccaaaacttcagagatttaccaatatttggagaaactgatcgaaaagattactgatgttggttatgtgcctaaaactgactcagtgttgcatgagttggaagaagaggaaagggagtttgcattaagataccatggtgaaaaactggctgtagcctttggactcatgatgacttctgggtgcaccactccaatcaggataattaaaaacctgcggatatgtgaggattgtcatctagctatcaaatatatgtcagccgtggagaatcgagagataattgttagagatatgcaccggtttcaccatttcaaagctggaaagtgttcctgtcaggaatattggtgacgaggcctctctcgcaagctaaaaatctgaggaacaagagctgcaactcagcaacattgggagtgggacaccagcaacaacacctttactacccatcaaaattcacaagagcaagaggacgatgtcgaaaacatttcatttccaaaaagtttggtggagagcaactagattatccttttagttggagacttggagtaggactgatgatttttgtaatggattgttggatggagtctacatggctgaacctgaatggcctggacctgaatggacatcatggtcaattggtcatggctgaacctgaatggacatcatggattcatggtcatggttctcttatttgtatttgtttatgttctatttttggtggacaacaagcatggatgaactgttctgtaatctactttttagtttttggatgaagaaatgcaactatgcaaatgcaagtatctgtattaggtgcaatgaactatgcaaatgcaagtatctgttctgtttagacaaaaaaaaaaaaaaaaaaa

SEQ ID NO: 39358 - DNA, 216 bp, Zea mays
  Clone ID: MRT4577_135892C.1
cttctccacactctcctcgcagtactggcctctcgcccgctggtgccgtgtccatccagcttgcaagcggctcacctagccatgttgctcacctcctccgagggcactaacaccagcggggcgtccgagtgtgagtcagtcagcgacaaggctcccagccctgccaccctgccagccacctcctcctctctgcccagcccagccatcccatcccat

SEQ ID NO: 39359 - DNA, 302 bp, Zea mays
  Clone ID: MRT4577_135893C.1
aaacttgagtggtcccaaaaactgactaaggctgatgatgttataccaattagtgctaaatccgggcatgaagtggatgatatcaatgagcagatattgtcaaagctacctctagggcctgcttacttccgccaggatgtagctagggtgcaccgtgagagacgttatgatggtgaaaaagtgagggaaaagatttaagttcatctcaggcacgatatgcctgatccatgccaggttgaccgttctcagtaacaaacgtacagtcaggtgccgaggactacagtcaagctgagatagttgtt

SEQ ID NO: 39360 - DNA, 243 bp, Zea mays
  Clone ID: MRT4577_135895C.1
gaaatattaaacgcaacttgaatacaacgccaaacacatttagcaatatggcagtcgaagaatagatgttgatggattcatttaacgtacatgctacacatcgtatggaatgttgtttgtagaggcattatagaatcccaatttcacataattttattagtgtacaccatggagattgatgcataagtgaagtatcaattcgacagacaacttattgcatattgatctttggagtttggacca

SEQ ID NO: 39361 - DNA, 379 bp, Zea mays
  Clone ID: MRT4577_135896C.1
caatgatagaagaggaagtgtgtccaagcagcgaaaccttaactgctgttgtttctgtattcgccaggcacaaatttcttccccatggcaagaagctgcactcctttgctattaggagtgggctcatggacacaatcttggtagcatcatttgttgacctctatgcgaaatgcggtgagttagtgtcatcgattcagctgtttgaggaattcaatgggggaagcaagtacttatggtcagccatgatatgggcttttatctatcatggaatgttcttggatgcaatccatctatttgagagaatgatgggctccttttactttccaaatgctgacattctacgaggtcttctaatcaattacactgaaataaatgcttt

SEQ ID NO: 39362 - DNA, 662 bp, Zea mays
  unsure (1)..(662): unsure at all n locations
  Clone ID: MRT4577_135897C.1
gcaccgggnnggctcatccgcaagcctgtggnacgcgnagtgagttgaacaccagtccgttattggtcccgtaccccgtaccgtatcccctcgcctgggctgcagtccatggcgatcctccgcggtcgcttctccactctgccgccaattcccaacccagtctcttaccggnttcccgcgcctttnngctgggcaatgccggtgtaagggggcttnnggcctgagcatgnnggccgcgagtcgcgcccatgcggagcattgtgttgccatggcggcgaagcagcatttctccgccgaccgcgtnccccgacatgngagaatgcggaatgctgatgaaaacctcctnncctcctcggcgccattcttcgttgcccatccgtcggcatggttcgtccccctaacggcgccttcttcgtcccttgccggcttccggngaacgnnccggcggcgggaacccctatcgcgaaggaacatatgctgggcaatcgacccatcacggtggnaggggcgtggctcaaacatcgcatcgtgtcccaatcgatccgtcacgctcgcgcccaggggcttcaagtgtgtgaccccacnngtacctgnngtggtggnatgcaggaacaagnacngtctggccatcctacgggtatcatactgtccgtgttgcactc

SEQ ID NO: 39363 - DNA, 630 bp, Zea mays
  Clone ID: MRT4577_135898C.1
ttgggtacctcgaggccggccggggtgaatacttatctagcctaccttacagcgtgagcttagtatatagagaacaggtggaagtgcaacgtattgagcccctgctgcaaataacgtgcaccatcagattgtgaacagacgcgccttgcccctccatctatatccatgaaacccctctgcggttgtctcacagtccccctgtactacttgctcctctcggtactctgccgcagttgatggcacattgacagtgattctactacaggatttactcctacacatgctcctcacacataatatatctcatctctgagaccatgtcaggctgcccctgaatttacttattcaaaggcgcctcctccaggcgcttccatttacactactgttccccaaactggcgccacatcttttccgttgtatggacggcgacctcaatctatgaacacccaataatgatgccactctccaacatactctccctgcgatcgatcaaggtcgtctactatagtaaggatgcgttggaggactactgacaatgaatgatcatctgagattacatcataaaaatgtcagcacactgctccgtcaaactgaccagcatcgcataactgctacctcccactaactagc

SEQ ID NO: 39364 - DNA, 681 bp, Zea mays
  unsure (1)..(681): unsure at all n locations
  Clone ID: MRT4577_135899C.1
ggccgcctcttttttttttttttttttgttttaaaattttgaattaanaatatattttaataagatttttcttaccttttgaagttacatctctaaaaaagaaaataactagtgcatttcggcctacacgccctgcagatgcccaccacaaggccatctcaaaacttctaaccgcatcaatcttcccacttcccaggaccccaaacgaaccctggcgcttcactcattgcccgacccgaaccaaaccatgcaaacccaagcggaaagccaaggcaatcggaggaacgaatccggatccggaggtcggactcagaggcgatgaagaacaagggaaactctgcgtctccgcgcactcggcgccgcctctcaataggccacgggggaagcgcaaggccctggccgagctcgccacgtccagcggagcgaacatgaaccacgactcggcgccgcggccatcgaagccgagaacgcggtcggcggcgcggattgagggcgaggcggaggaggcgaggaaacggcgggagtccggactccggagactccgcgcgctggctgttggacacgaagccgccttaccctgaagcggcggttgcgccgtacgtcggagacatcgaccggtacctccggtccctggaggtgaggacctcttgagattcccaccctttccactgtcccggccgg

SEQ ID NO: 39365 - DNA, 261 bp, Zea mays
  Clone ID: MRT4577_13589C.1
atacataacaaataggttaattattgaatgaatttgtttaaaagcttattcatttagggggacactgattattacatactgcaaaaagggccggtccagacccaaattcattggacaagacagctagccacaatgtacaagccctcgtcacaagttttgtttattgtcttgggaaaatagttaaagatctaatcaacaacatagtcgtccggatttttcctcacaaaaaaacttctatattttaacaattatgccatttct

SEQ ID NO: 39366 - DNA, 254 bp, Zea mays
  Clone ID: MRT4577_135900C.1
caccactccactcgccgcaagccgtttttctcttttgaggggatcggaacagggggtgcttacacatcttgctggagcggaacatgcacctgcacccactacacttaagtcctcaccttcgagacaagctcgtttacaagctcataaaggacgttgagggcacctgcaaccggcggcacgagttccttgaggcgatcacggctgttgaggaccattgcaagggactcatccaggaaggcacgggatacgtcacc

SEQ ID NO: 39367 - DNA, 148 bp, Zea mays
  Clone ID: MRT4577_135901C.1
ggggcggggaaccttcgaactgccgacggccaccagtttataccagttgcacggacccggagttgatgttcacagcatccgcccgacggcgcaatgttcagcagcagtgcaaatggccgtctctctgactgtatactgtgggcactgg

SEQ ID NO: 39368 - DNA, 406 bp, Zea mays
  Clone ID: MRT4577_135902C.1
aacccccaccaaaagcaaaaaagggccggtgggaaaagctaacaggggggggggggggacatttcgttcaaaccaggaaaaacctgggggcctactggcacaccatttgggccttaaaacggggggcacaagtttactagggagaccctcactcgaaaaaacgaaaatgggggggtcactgggccaaaaacaaaaaaaatctggggcaaaaaaacatcatgcctgggggggggctaaacaaacttcggtaaaattggacttcgcttttggggaaagaatatttggggggttcgcttggccacccccaaaaaggaaaatttgacttcaaactctggtttgaggcttgggggtcaggggaaaaaaccattcgccttcgccaaattaatggtttttttttggagcgaaa

SEQ ID NO: 39369 - DNA, 135 bp, Zea mays
  Clone ID: MRT4577_135903C.1
gccgccgttaacctacattggatcaggatccggggccaagtatacgaataaattgagccggtcgggacgtagtaggagtaccatgggctgctgtggcgccgccatgtccgccaggccgagaggcatacacgaaga

SEQ ID NO: 39370 - DNA, 589 bp, Zea mays
  Clone ID: MRT4577_135904C.1
tttcattatcattctataggtgcttctgttctgcttgaagcaaaaggagaacaagacccatgggaagcattgtacatagccaaagtaacaatgtctggttgagtgcaaaccctgtagttgcgggtaaatatgctgcactaggactaaaccctagcaggtctgaaggaagttgtgcctttattgaatcaatgttaacagggtccattgagaaaacctcaagtcctgacgaaatatctaaatgcaagaatagcatgatggagactgaacataatgtcaatggaaaaggtggtggtgtgctctttaactttctagtatcacttcaactgtttttcttttcaaagatctcttggttgtttattgtggatataattgttgtttatagcatattatcgaatctatgtttggtaggaactactgctcaatttgaaaccaaaatggatcaagcggagccagcgaggagcggtgtacgcagcaaaatttgcacagtgttgtacctgccaacgagtcagaacaccgttccaccaaacaggaaggcagaatgtctagtaaccgtgaggtcccagagtctttgttgcctacaaaggacgaa

SEQ ID NO: 39371 - DNA, 1569 bp, Zea mays
  Clone ID: MRT4577_135905C.1
ggtcgttatagtttgttggtacctcgctggtggtcgggcccgctagggcaaagaggcgcgtgagaggtcggagcctgcaccgccgccgccatgctccgcctccaaaaacacctctcccttcgcctgcaagaacatctccttcccctgcaccgctccgcctccctcatacagctctccctccagcgctctctcctctccaccggctccgcgacatattcctctccgggtcacttcgccgccgatgactacctcgtctccacatgtggcctcacccgggagcaagccgcgaatgccgccaagtgcatctcccactggaagtcgtcctccaacgccgacgccgtgctgtccttcctaaccggcccggcgctcggcctctccaatgctgagatcgcgctgctcgtggccaaagacccgcgcgtcctcagctgcagcgtcgacaacaccctgcgggcccgcttggcccgcttccgcagtcatggcttctccgccgcgcagatcagcgaattcgtccgcgtggccccctgcttctttcgcaaattcaacatcgacgtgaagctcggcttctggatgcccttcctcggctcgcccgacaggttcctccgcctcgtcaagcgtaacttctacctcctcagctccgacctcgacaaggtggtgaagcccaacatccagctgctccaggagtgcggtctatctatccaggagattgggagcctgtgcgtggctaacccgaggctgctcaccagcaagccggacagaatcagggccgtcctcgtgcgtgccggtgagatgggcgtgccccgcaagacgcttttgttcaggcacgctgtgaccgcggtggcgggcctctgtccggagacctttgcatctaagctcaagatgatggccaatattctcgggtgctcagaggctgaggttgccagaatggtgcaaaagaacccgttggtgctgaggcgctccatggagacgattcagcgcgcctgtgagttcctgatcaatgtggtcggtgtcggtaccaacttcattctggacaagcccacaatcctgatgtacagtctggaacgccggctggtgccccggcattacgtgatgaaggtgctccaggacaaaggattgatgcgaaaagatcatagcttctacactttggccgcgattagtgctagcgtgttctgctccaggtatgtacatcctcataagaatgttcttcctaatcttgccgctgcatacgcatctggttgcaatgggaaaatagccatctgaggtgcgcgattccagcaaactggctatatgggcagcagctgcagttgtatcttgcatgtcattcttaacacattcagataccctgatgtgtactctgcgaggctgcagctccgtacttggctcatagcttcagaattgcagaaattcagcataacaagtttaagaactcatgaatgaccaaagcacgatgttgtcaatttcatataccttgtttaggattctggcgatgaattttatcgtgtttcaactcatgctactggcacgcagaatgatatggttcggtccaaaaaaaaaaaaaaaaattttgcggcc

SEQ ID NO: 39372 - DNA, 674 bp, Zea mays
  Clone ID: MRT4577_135906C.1
aattcggcacgaggctgagattgatggttattgtgaaggtgaactaatcaaggtacctttgggaaggccttctattatattatctgtatttaaactttgtttatccctgccaaacaattgattttttacattattgagaaatactaatggttggccctgtaaaaatgttagcatcattaatgatccatcaatatttttctattcaaaatctagtcatattgtatatatgagattatggttcgtctttcctataaatctagttttcaattgttatctgaagttcttaactacacaaagtcacttcacttttgtgttttgttagctctgggtctggatgaaactgtatagtaaatattttaggtcactcttatgtattgttttgacatatggacagtgtcaaagctgttcgtttcaaggcaaatagttgatgtatcgtgcagatgttacatgaacgatacatgtgaacatctagaatgtggaatctttgtaaatttgtagacaatatatgcgttcctgtttattttttgtgccctacatatttatccttcgccagatcccactcatatgggagcctgtggcagtgggtctgccctaaaaattaacttaagttctttagctcgtttgtctttatgtactttcaatgcttacccaggcccataactgtttttgatcct

SEQ ID NO: 39373 - DNA, 140 bp, Zea mays
  Clone ID: MRT4577_135907C.1
acctacaatacttgtctctttgttgttgctgtcttgtagtgccagcagcgatgcctccttgttcgtgctcggcaagtcggccggtgtgagcaaaatccgtacgtcatcgactccagtggtgccattctccgtggctctgc

SEQ ID NO: 39374 - DNA, 253 bp, Zea mays
  Clone ID: MRT4577_135908C.1
acgcacgcgttagctgttaaatgtaatccatccttttttatgtacatgattatctttagacaccttcgggatcttttaacaaatggggctgcccaaccaaacttcccacctgacaatgtctttcgccccgatctgaccatctaagccttgccttttaaccaaaaataaggtcctgtcccctctttctacccaccgaaataagtaaataaccttaaaagtattggtattttacttgctcccggaagcttccact

SEQ ID NO: 39375 - DNA, 525 bp, Zea mays
  unsure (1)..(525): unsure at all n locations
  Clone ID: MRT4577_135909C.1
cgtccgctgggatgggaatncggtacgcttattaagaangaagcttttccgttttagggacggctcaggcgttagcgcgggggccnggggtgctacactctcccgagaaaggccaaatagaaaccgttcccaccaccaacccaggtcgactcaccccccaacccaacccaaccgcggcatatggtctagctttcccatccccttcggcagcctggtcagagcccaacccgcccggatccacaaagggcgccggctattgctgaacccacgttcgcgccggatatgatcgagtggatgggcacgatccctggtcgggaatcaaaggaggcagcacgagaagagatgtgcccgctgctggcgaacctaatattcctcttcgccaccgatgccggcttgtgtcttatcagaggccttaacgagtgaaccttaccactgagactccgacgccggctactggggatcccccagagcaaccctgccccttcattttaaggttgcatcggccgtgacaccagggttctagga

SEQ ID NO: 39376 - DNA, 360 bp, Zea mays
  Clone ID: MRT4577_13590C.1
agtgttgcaggaactacacgggcgtgcaaaaattcaaaacaccgaggctcactgcagcaggaaagcaaacatgctggtagtccatgataagcacatggggtggaaactggtgagaacttaaacgggccgtcataacaggagtaaacatttagttgcacgatccatataaaaaatgggtcaaccggtggtggaatcgcaaactggtgtgaaaaattagggaagtcatttgactgggcactaatcaaaccttcgggcttaagaattttgcttcacaagagggggggaccaacctgcctcatggaaaaaaaaggggacggcgagcaggaaggttattagggggcatacaccaaccgagggctc

SEQ ID NO: 39377 - DNA, 412 bp, Zea mays
  Clone ID: MRT4577_135910C.1
ccggccgggataccacgcgacgcggtcgcgaactcgcgatcatttgcatgccatgccacgagatcatggcatgccacgagatctccccgcgtgccccgcccgcgagataccgccgagctctgctcctctcctctcctgcgacgacaggaggagcatgtggtggtggcctggtgggtggatgtaaatgtggagctaacaaccaaggatattatgaaggatcacctcaaataattgttggggctatggtgattgtaatatatttctgtcaaataaaacaaatctttccaaactgatccgagcatgccaaggcagatgaagcaacactgcaagccccatgcacccttgaagtgaagcaccaagttcactgaaaataatcactaaatatcaaaaaaaaaaaaaaaaatttgcggcc

SEQ ID NO: 39378 - DNA, 178 bp, Zea mays
  Clone ID: MRT4577_135911C.1
taccggactgtgctgctgtggtaattaatttcaagcagcaatggaatgcgtgttgaacacgacgacaacgaagtagtccttccgtctgttgcccaccgtggggagattcctgaatcgcagctgtcctgacagcggtcccccagtggaattcgctccgtgaccgcaacctacacatcgg

SEQ ID NO: 39379 - DNA, 880 bp, Zea mays
  Clone ID: MRT4577_135912C.1
atcttttgcctcccatctcccctcttccacagtcctactcctacctacccacccatcctccccgtccgagtctccagccgccggaagagcagggcgagatgagctccgggatggggaaggtggtgtgcgtcaccggcgcctcgggctacatcgcctcctggctcgtcaagctcctccttcaccgcggctacaccgtccgcgccaccgtcagggacaccgccgaccccaagaaaacattgcacctgcaggccctggatggagccaaggacaggctccacttgttcaaagcaagcttgttggaagaaggctctttcgatgctgccgttgccggctgcgattgtgtcttccacacggcctctcccttttatcacaatgtcaaggatcccaaggctgagttacttgacccagctgtcaatggaacactcaatgttctccgttcctgcaagaaagcctctatcaagagagtgatcataacgtcgtccatggctgctgttgcctacaatgggaagccaagaactcctgatgtagtggttgatgagacatggttttcaagtgcagaggtctgcgaaaagaatgagcaatggtatgtgctatccaagacccttgctgaggaagctgcatggaagttcgcaaatgataatggatttgaaataattacaataaacccagcaatggtcatcggtcccctgttgcagcctacactgaatactagcgcagaagcaatattgaagtttataaatggatcatcttctacataccccaatttcagctttggctgggtaaatggttaagatggtgccctgtcacatatccttgcatatgaagttccttcggcaaacgaagatactgtatggttgaaagagtgctcacactcggagat

SEQ ID NO: 39380 - DNA, 231 bp, Zea mays
  Clone ID: MRT4577_135913C.1
ggggggtgcggcggggataggcgcggcgcgagggccagtagcgccgtcagcgacgcgaggaggagcagcgacagcaccagcggggaggacgcggccatggagtccaggcgaggggcgctgtttttggtcggtgacggtgacgcccggggggggggggggagagccgcatcgtggcgatcgatcggaggcggcggttacgatcggggaagggagggagggagggagaggcgc

SEQ ID NO: 39381 - DNA, 335 bp, Zea mays
  Clone ID: MRT4577_135915C.1
cttcttgggtttgggtttttttttatttcaaacgcacggccaaaaccccccccagaacccgagtaaggaccggaggctactgggggggggccttagtccccccaacccacccaacatctgcaaagcaggtcaaacaaagggatataacacaaacccaaaagccaacacaaaggaaaagaacccccaacaaaacccaaccccacgctccatttaattttaaatgcacaaagggaggcgaaaagaaaaatacccaggccccccccactgccctgcccagccccgacaagcaaggtaaaaaaaaaagacgagatctccctagcccaatgccaccgccc

SEQ ID NO: 39382 - DNA, 325 bp, Zea mays
  Clone ID: MRT4577_135916C.1
tttcttatttttgtgaagctccatacactcagacaaaagactttattattgaactattactatacgtagatctaaaagagggcaccatcctgatgggttgttggtagaacactgatatgtttgttaaaacaggttgaatgaatggcaggccatgctgtacctgttagaaggtgcccctgctaggcgcagcgttctgatggaacaattacaactgactgtgggtcaataatgtagaaggctcacaccagctagctggttgaatggtaatagttattgctgcttgctataagcaagagagatccatgctgccttccggctgaatgga

SEQ ID NO: 39383 - DNA, 828 bp, Zea mays
  unsure (1)..(828): unsure at all n locations
  Clone ID: MRT4577_135918C.1
accagattcaagacgcgtccgtgatgcttctaatgaggcccataaaaggaattcagcagatggcaaccctatacatacaagtgaatcagattcattcatctacaagagtcttgagggcatccaagatcaagaattctgtaatgcatttcagttgcctcctgaaaaggtgttcaaaccctgccatcttttaatatcgtgcttgagatcacctatatatcttggtggaagatatttgaagctttcaaggaacgtcagtcagtcatgttggataatagatgatgagagaatgggtgaagcttcagttgaggagataattggggagaatgttcgtgccatctgcagaggtgatagctgcaagttccatgctgctgggagagaagacattgatgtacggatgcttggatctggtcgtccatttctagttgaagtactgaatgttcgatccattccatctgaaactgaagttcaacaaattgaagagagaattaacaactctgaaaagaaatatgtcatagttcgaaatctcaagttggtagataatgaaatatggaccatgatgcgtgaaggagaagcagagaaacagaagcagtacactgcccttatatggacttctcgtgatctgacagatgatgatcttcataatatttctattatgaaggaaatggaaattgtacagaagaccccaataagagtacttcatcgtagaagccccttagagcggaagcgcatcatacactggatggagattgagaaaatcacaggcagctcaaactactacttgctgcatctatgcacacagcctcngagccataatagggtgcagagctg

SEQ ID NO: 39384 - DNA, 153 bp, Zea mays
  Clone ID: MRT4577_13591C.1
atgggtggaggaggcggtggtgccgccaactcgacatccatcggcactgttgctgacgattccgcatctcccatcggcaccggcggtgacgggagcgcgatggggaggccacattcaaccaccgacagcgacactactgttgtccatccgtga

SEQ ID NO: 39385 - DNA, 254 bp, Zea mays
  Clone ID: MRT4577_135920C.1
ttttgttctaatgtgtacataccaatgcggacttatcgttacagcataccagcgtgcatataccaatgcgagcttatcattacatgctacagaatcggatcaacgaccatgtgaaacaccgactcttacaaagtttcatttacgacgtacgaggaaagaagctaccagatcacagatacattcatttggcagaagccatcgtctagagtgcgataactacaacctgactctttaggtgtgaaaccactgtactt

SEQ ID NO: 39386 - DNA, 1895 bp, Zea mays
  unsure (1)..(1895): unsure at all n locations
  Clone ID: MRT4577_135921C.1
cccagcgtccgcatnatgtggtacctccacacaggggagtagcctcctgccctcctccatctggatgtggactgcctcctgcattgattgtcttcatgtcatgctcatggcgccatcagctgcctcctgccctcctccatctggatgtggactgcctcctgccattttccctcctgcggccgggactaaccaccaccttccaatcttctctcatgttgcatccacagatgacaacagctatcgccattgaagatgtgagaagagaagtgagaatattgagttctctgacaggccacagtaatttagtgcagttctacgatgctttcgaggatgaagataacgtgtatatagttatggaattatgtaaaggaggtgaactgctggacaggatattggctagaggtggaaagtactctgaagaggatgcagagtgttatggtacaaattttgggtgtcgtatcattttgccatcttcaaggtgttgttcatcgtgatctgaagccggagaatttccttttctcttcaaaggacgaaaactctcccttgaaggtcatagattttggcctgtctgactttgtgaagccagacgaaagactaaatgatattgttggaagtgcatactacgttgctccagaggtgctccaccgatcttacggcaccgaggcagatatgtggagcatcggagtaatcgcctacatcttgctatgcgggagccgacctttctgggcgcgcacggagtcaggaatcttccgggctgtcttgaaggcggaaccgagtttcgatgaggccccatggcccactctcacagctgaagctaaagatttcgtaaaaaggcttcttaacaaggattaccgcaagaggatgacagccgcgcaagctctgagccatccgtggatccgtaatgctcaacaagtgaaagttcctttggatatgatcatctataagctaatgagagcttacatcagctcgtcttcgctgcggaagtccgctttgagggccctagccaagacgctgacgacgaaccaactcttttatgtaagggagcagtttgaactgctgggcccaaacaagaacggctatatctcattgcaaaatctgaaatcggctttagtgaagaactccactgacgcgatgaaggactctagggttgttgactttgttaacacggtgtgcactcttcagtacaggaagctggacttcgaagagttcgccgcttccgccatcagtgtttaccagatggaagccttggagacgtgggagcagcacgcgcggcgtgcgtacgagctgttcgacaaggaaggaaaccggcccatcgtgatcgaagagcttgcatcggaactggggcttggcccgtcggtgcctctccacgttgtcctccaggactggatccggcacgccgacgggaagctgagcttcctggggttcataaagctcttgcacggggtgtcgtcgcgctcgatccccaaggcctagccatgcgccatccattactcatccctgcccatccatatccatcaagaaccaaggagatgatgaccggtggctaagccagtctctggctggtgcgtgcgtgcgtgcgtgccgtgtgtattgtgttctgttcgagagtggctggagggtggtggacggcctgaaactgttgcatgatgaggagagatgcttggtagtcctgtgaggtaaagaggcagttagaaggctggtgcctgtgccttgtaccaaaaaaaaaaaaaaaaaagccacgtggattgatggtggcgtcgtcgtcgtcgttgtactagtaaggtgttgtgtcgtgagatggaggataggagaaaatgagagatggaagggcctttaaaaagagtaaggcagcccagggtctggggcctgtgcacaacttgtacaacatccttggc

SEQ ID NO: 39387 - DNA, 345 bp, Zea mays
  Clone ID: MRT4577_135922C.1
ctgatttgttctgtgatttttaccatatcaataaatgctattcgggggggtgaaatgcatggcaggtgtacttgctcattatgggccatcctaataccatttattgatatgttctttgataagtaccacatcatgaaaggttaaaaaaaaaactagtatttgtaagactgaaaaacagaagatgtaccacaggcgcccaaacagaaagttcttttcttttttcttaccatacgtcatgttatactgtagcccattgctcacaatttttcattcttgagtcagtctcaacttccattaatcttatcctatttaaaactatcttttggatttcgaactgtgaatcta

SEQ ID NO: 39388 - DNA, 706 bp, Zea mays
  Clone ID: MRT4577_135923C.1
ctcgaggccggccggggatcatcagatgagttttcttaggatttcctcttttttaaaaatccaattcttaatctttttaaactaaaaaactatgtactgttaaaacaaatttaaaaaaaaaaaaaaaaaaaaaaaaaaaaaaaaaaaaaaaaaaaaaaaaaaaaaaaaaaaaaaaaaaaaaaaaaaaaaaaaaaaaaaaaaaaaaaaaaaaaaaaaaaaaacccttaaagcctccccccttttgggcctccccccttcttcgcggtttttttcctttgggggccaaaaaccccccggttaaaaaaaaccccccccccccatgggcttcgggggatttccctggacctaacgcgcccttttttttagggaaaaagggtttccctttcccggcgaaaaaaatcccccccttggggaggggggcaaaattaagggggaggttttttggggggggtttttttttaaatttctggaaaaacccaggggtggggaattaacccttccccgtggatttggggggggggttttttcaattggttgtggcccccccattggggggggttgaatttgtttttccccttgttgaaaggaaaaaaaggaaaacccccaggggggattttgagaacaaatgggttttcacctttttaaatgggggggcccctctttccccccctttaacaaatttccttttggttgccaaaaatttttt

SEQ ID NO: 39389 - DNA, 215 bp, Zea mays
  Clone ID: MRT4577_135924C.1
ataacaacaattgactgactgacaaacttaaataacacagtgcatggacaagagaggagcttgcgctaaatgagaagaaaagaagcgacaaaaaagaactgcctaaaggttcccacattctagtagatgcattgcaaccattgcagaaagatgcagcttgatcttcttttgttggggcggcggccgaacatatactctattttctaaactcaata

SEQ ID NO: 39390 - DNA, 323 bp, Zea mays
  Clone ID: MRT4577_135925C.1
gggggggacttggcttggatttaatgctgcccccaactggacattaataggggaaaaaataaactaccctgattgaccctgaccccgaccccgaccccaataatgggggggttaaggttacaaccccccattcacaaaagggtgaaaatgccattgttttgtttggccggtttttccttccttcacctggtgggtgcaacaggggggatgcttccccactggaggtgggggtgaaattcccccctttccaaatttcttagccggaggaaaaagttctggggaaaattggcgtttcttcaaaacaaagggtttttttgggggag

SEQ ID NO: 39391 - DNA, 796 bp, Zea mays
  unsure (1)..(796): unsure at all n locations
  Clone ID: MRT4577_135926C.1
attggtacctcgagccggcgggagatcccttgacgaatacgcatcacaatggcaccaaactgggatagactcatccgcttcattgcaacagacggccgcgagctgcggggtcaaccaattcttccctccgcggactttgatattggaacgacaactgaggaaacaggactaaaagctaaagtcatcgatgtaaaaaacaatgacatctttgacccagcgacaaaagtcacagacgaggaagtgactgtgaagaagcttctcggtcccgtgacacaggatgaagtcccgattatccgatgcataggactgaactttatcaagcacatccaagaaggagggcgcacactcccccccttcccctccaccttcatcaaagcaaacacctgcctaaccgaccacaacgccccaatcatcatccccaaaatcgcccaagacaaccaagccgactacgaaggcgaactctgcttcataatctcccgcgacgcanaagacgtctcagaatccgacgccttcagctacatcggcggctacctttccggcaacgacgtctccagccgcaaactgcagcgcgaccccctcctcgccggcaccgtcccacaatggaacttttcaaaaggcttcgacacgtacgcgcccttaggcccgcaaatcgtcagcacagccgtcattcctgatccgagtgttttgcagctgcagacgcgcgtgaatggcgagttgcgccaggattcgggtattgatgattagtgctttaagattccgacgctggtcgcgtattgtagtcaggggactacgttga

SEQ ID NO: 39392 - DNA, 293 bp, Zea mays
  Clone ID: MRT4577_135927C.1
gcaggtagggtttcgattttgatccgaaccggcgagtgcacacgaccttttgctactccgatcgaatagagggccgccgagggctacaagaagatgatgaccctcaaaagctccgatggctaggagttcgaggcggaagaggcggactggatggagaatgcagaccatgctcacatgatcgacgatgactgctccgacaacgggattacttttcctaacgacgactccaagatcctatccgaggcaagcgagtacgtgaacaagcacgtacatgccgccggcggcgtcggcgt

SEQ ID NO: 39393 - DNA, 675 bp, Zea mays
  Clone ID: MRT4577_135928C.1
aattcggcacgagggctcctcctcccactcccgaccgcctcccgccatgcgctatcgccaacccagacgccacctcttcctccccttctcccctcccgcgcctgtaagttccacctcgcctcggcacgctcgccgtcccgcgccgccgcttcggttttcggcgacgacgaggatgagatggcgcgtgcgtgcagggctgctgctgctgctcgtccctgcgccttctcccccgcgacgacgcgctctcgtccccctccgcctgcgcgcaccgcctcaagccttggtcttgttaaagcctaaggaggttgctggtatcataaaggactttgatgaacctggtactcttgcaccaactggtcttttcgttggaggtacaaagtacatggtcatccaaggtgaacctggagttgtcatccgaggaaagaagcatcagcggcgtggttgtacgtttgttgtgttgctgtatcactctgcgtctctgcaagtgctaaaccagtcactttatggacggtggttcatgtggtctcgagggagcgtcggtagtgacatctactaccagcgctggtattcagcttctgccagagaagcactgcgccgatgaagcttgtggagccatggcgggcagtaatggtcctgaaggagtgccagtagtgacttctgctgatgaccctccga

SEQ ID NO: 39394 - DNA, 143 bp, Zea mays
  Clone ID: MRT4577_135929C.1
ccgagccttacggtcctcgcccgcagctggcagcaggtcgcccgctgccgcgcctgggacatgggaggccatcgaggagctcgacgagctcgcctggctccatacctccttcatcaaactcgacgagcccatcaagaccatcc

SEQ ID NO: 39395 - DNA, 2673 bp, Zea mays
  Clone ID: MRT4577_13592C.1
cgtttggaacctcgagaccggccgggctcttcttgtcattctctcttcttccttgctgtgcactacacaaaccaaccataacttctcttgttctcgttctcttccctgcgtgaaccgcggaccaagaagaagcgggcgttggggactttgggatttgaaagcctacatattattatttctctaattcaggcgtggtctgtgctgggagggaagggatctgtggggctgcagccccatccgggctgagggttgaaggatccggccctttggtgtgctcccccaatcgggttattatttctctaattcgggcgtggtttgtgccgggagggaaggaatccgtggggctacagccccatccgggctgagggttgaaggaaccggccctttggtgcgctccccccaatcgaggaaaagggggcagcggatgctttgttgccttcgaccgtcgcaggctcgcagcatccgttacgcgattgggaatggaccatcagcaggtcgaaatgactgttctgtgacactttccccccaatcccatcaatcccggttttcctccgtcctggatttggaagggaggaactcttggatttctgtctccatggcgcacgaattgtagtttccagaatcttactttgtagatttagtgtaaataatagtgatagcagctggtgacgaatctcgggtttccttagtagctgtcaccctgtgaatatgtcgtcggcaggtgtgatcgtcttggggccagttccagaagaccctgccttcctgcccatctgcttcaatggcagccggtcacagcactgctcatctgggtcacaactgcaggattccattcttattttccttgctgtgccgggtatgccacccatgcccatgagcgtgctgggatctgagtccattgcatctgtcaagctgcgcatccagcagttcaagggctttgtggcgacgaagcagaggcttgtgctggatgggcatgagctggcaagaaacaactccccagtcaaggattatgggctggccgagggaaatgttctgcatcttgttattcgactgtcagatctccgtgtgattaacattgagactgcaactggaaggaagtttcagtttcaggtggaccagagccgcaatgttaagtttctcaagaataagcttgaagcagagggtgatgaggatattggtaatcttgaggatcacaagcttgaatatgatggtgaggagcttgaggaccaccagctgatagctgatattagcaggagggatgatgctgtgattcatttattcatccgcaaaccagcaaaggtatggacacaacaagttgatggagatactttggttacagttgtcaatccacaggggaaaggcaacctgcaaaatgaagctggctcaatgaactccgcaaactcagttggggttaggcctgcccctgttgaaccaatagttaaccgaaaagcaaagctgtcacgtgaagtgatgaagatgataaattcaaccatagctggactggagaaagggcacctgcctgtgatgtcagctgaaggttcaggaggtgtttatttcatgcgagatgcaacaggccagaagaatgttgctgtgtttaagcctattgatgaggaacccatggccaaaaacaacccaaggggtgttcctttgtccacagacggcgaggggatgaagaggggaacaattgtagggggaggtgcattcagggaggttgcagcttatattctcgaccatccagttagtgatagtaaatctggtcacagttttgggttttctggtgtgcctcccaccacattggtccgaacctcacatagggggaagaacttcaagattggttcactgcagatgttcatggacaacaatggaagcactgaagatatgggtcctcgaccttttcctgtcaaggaggttcataaaatagcagtactagatattaggttagctaatgctgatcgtcatgctgggaatattctagtgtgcaaggagggagaaggtggcaactacaagctgattccaattgatcatggttattgcttgccagagaagtttgaagatgttacatttgagtggctctactggccccaagcccgtgagccattcagtgatgaaaccattgaatacatcaaatcacttgatgctgaagaagacatcaagcttctcaagttccatgggtgggagctgcccccacgatgcgctcgtgttctgcgcatcagcaccatgcttttgaagaaaggtgcagctcgtggcttcacaccatatgacatagggcgcatactatgcagggaaactgtgaatagggagtctgagattgaggacatcattcaggaagcagaggatgctgttctcccagggtccagtgaaaacatgttcttagaaactgtatctgaaatcatggaccgtcacctcgacaaggagtgagtttagaaattcagaataactgatctagttgttccagctgtatccggtttgttgtttctattgttgacaagcactgatcaacagactaataatttgatttgtttgtacctctcaaatgtttctttcggttgtaatgctcgagtactttgcttatgcacattttgtgaataatatatttgttcagttagacataaaaaaaaaaaaaaaaaagggcggccaaagactagtgagctcgtcgaccgggaataatcaggacgg

SEQ ID NO: 39396 - DNA, 1151 bp, Zea mays
  Clone ID: MRT4577_135930C.1
ctgcatcgcccccccgcctgctcctcctcccactcccgaccgcctcccgccatgcgctatcgccaacccagacgccacctcttcctccccttctcccctcccgcgcctgtaagttccacctcgcctcggcacgctcgccgtcccgcgccaccgcttcggttttcggcgacgacgaggatgagatggcgcgtgcgtgcagggctgctgctgctgctcgtccctgcgccttctcccccgcgacgacgcgctctcgtccccctccgcctgcgcgcaccgcctcaagccttggtcttggtgtgcccaatcccccacctcgtcctcctaacgcttgtccccgcccgctccccaccctgatctacctgtctctacccttacctcttccatttctacttctccccgttgctgctctgctcctgctgccacaagagtattcgccttcaatcgttgctcgcgcctgtgatttcgtgccgcacgccgacttgtttcccgttttcgctgccgtcttctgttggatcggatttgtatggatcgcttccgagatcggatctacgctgttgcggttaaactgttaaagcttgaggaggttgctggtatcataaaggactttgatgaacctggtactcttgcaccaactggtcttttcgttggaggtacaaagtacatggtgatccaaggtgaacctggagttgtcatccgaggaaagaaggtgatggcctcacgggtgctcctgctttctggcgatttgtgtccttacctgtgagtacctcatgttaaattattttaccatttgtcttaaatgattgctattgtacttaaagttatactgataagtcgtacgctctgtacttgaatgagatcttttggttgcgatcattatgtatgttcaaagtaatagatggactccatcttggttattttagtgttcgctagcagccttaatacctaatcaaatcaggttcatattcgctttccagtttatcatgctcatacaaaattagcaaccaccttttggaatgcaataatactttgaactaattgaaagacatcctggttttgttgtgttgactgagtgttttctggctaaagctgaacacaaactcaccatataagcatttctttctttattgattatcttcaaaaaaacagagctc

SEQ ID NO: 39397 - DNA, 1295 bp, Zea mays
  Clone ID: MRT4577_135931C.1
agggaattagttaatttcttaatgataaccaaattgctgtcagggaaccaacctaatcgtgggctctatagaatccgtttactaatggaattgtgagcacagaccaccatgggttttgggtgctaaactgttaaggcattgttcgtttgtatcggattgcacccggaatcgttccacctaatcaaagtttatataaattagagaagcaatccggttaggaattgttccgacccaccgatccggcagaaacgaacaaggcctaacggaatgtacaaactttctcctattccttccaagaaccaagactagtgtaagttactgctgctttgccttacttctttgctttcgcctttggacgcatgtcctgcgcttgtggcggctgaaatcagagacgaacctgaacgtctgtccgcacccaggttcaaggcaaacgtagggcctgtcgcccgtgtggaccctcatgtgctctatcctagcccatggccacttgaacgccatgctgcagcccttccacgggcatttcgtggacggtcgtcggcgtgaaccttgcgatgctgcagcagatacttgtgcgagaagaacttcctgcagcagcccttctccgggcagatatcattcttatgcagagacagtgcctgtttcgtgccgaaactcatggaacagccctcgatgtcgctcgcatattcttccttgcgttctggagaacttgggggagcccttcccctgtatctggattcctccgtctgctgcttttcttccgttttagcccccttcttacgtagagacagacgttgtttagtgatagaacatccctcagcatcatatgcttgctcttcttcatccttctgagaagctggactaggagcccttcgcttttctgctctagtttcctttgttttcttcttagtgtctgctttagtcttttgccttggtgattttgctcttgaacggccagcaggattatctttgtcgccttcagcctttggctttggagggttagctgagccattatcctcttcttccatctttgatttcctattggcaatcctagagctactgcggactaccatcccagctggtgcggggaaggaagcttctgaaggaccttttagtgcttctgaaaccttttcagtatgtttgagcttcttggtttttgctttttccacgtgttctttctccttcttgattgttttttctagaactgatctgctctttatcttccgtgtggaggcctcagcagtaccctctagtgatttggaattgtcctcttcagtaaattttggcggacgcgtggg

SEQ ID NO: 39398 - DNA, 1892 bp, Zea mays
  Clone ID: MRT4577_135932C.1
ccacgcgtccgggagaaagaggttttcatcagttaagagtgatccactatctgatgtttttgaggacattgacattactaaggagtatggaaattacagcagttcaacaaggcagtcccttgaagcttggtctgctgctgaactagatttgagccttgtggaaaatacaattgaatatatttgtcgctatgaagcagaaggtgcaatccttgtgttccttactggctgggatgaaatttcgaagcttctggacaagattaaagggaataatttccttggcagtcctaatagatttcttgttcttcctttgcatggttctatgccaactgtgaatcaacgcgaaatttttgacagaccaccagctaatatgagaaaaattgttttggcaaccaacattgcggagagtagtatcactatagatgatgttgtctatgtgattgattgtggtaaggccaaggagacaagctatgatgccttgaataagctcgcatgccttcttccgtcatggatatcaaaagcttctgctcatcagaggagaggtcgtgcaggccgcgttcagccaggtttttgctatcggctctatccaaagatcattcacgatgcaatgccacagtttcagttgcctgaaattctcaggactcctttgcaagagctatgccttaccatcaaaagcttacagcttggagcagtatcctcctttttagccaagtcactgcagccaccagatccactttctgttaagaatgctattgagcttcttaaaaccattggcgcactggatgatatggaggagctcacttctcttgggcgacatctctgtactctcccactggacccaaacatcgggaaaatgctgcttatgggatctgtattccagtgcctggatccagtattgacaattgctgctgctctcgcatatcgaaatccatttgtgctcccaatagatagaaaagaagaagctgatgctgtcaaaagatcatttgctggtgactcgtgcagtgatcacattgctcttgttaaggcgtttgtagcatggaaggatgctaaaaggagtggtagagaacgcactttctgttgggaaagttttctgtcccctatgaccctgaagatgatggacgacatgcgaaatcaattttttgatctactatctgatattgggtttgttagcaagacagcaggagtgaaggcatataaccgctatggtaatgatctggagatggtttgcgctgtcttgtgcgctgggctgtacccaaatgttgtgcaatgcaaaaggcgaggcaagaggactgctttctacaccaaagatgtgggaaaagtggacattcatccatcatcagtcaatgcattcgtaaaccaattcccgttacctttcttggtttacagtgagaaggtgaagactgctagcatttatgtaagggactcgacaaatatatcagactatgcccttctactctttggtggttcgcttagtccgagcaaaactggagaaggcattgagatgcttgggggttatcttcatttctcggctccaaagcgtaccatagagttgattcagaaattaagaggtgaattggacaaactccttcagaaaaagattgaggaacctggactcgacatcttttcgcaaggaaagggtgttgtggcggcagctgtagaactgctacacagtcaaaatttcgaccattagatgccaaatattacatgttatcaggacaagtttcacactagacgaaagcaaaatcagcgtattcttttgtaaatctcacctctgcgtgttagcatatttctgttgctttttttagaaaccagaatttgagcccagcaacaaccacaacgatatcgttgcggagaaaggacttatacaaggtgattctctgtcaaaaaaagcggcc

SEQ ID NO: 39399 - DNA, 638 bp, Zea mays
  Clone ID: MRT4577_135933C.1
cacgccacccaaacacttagcttctcgcgcggttttccgcgccgtgcttcgaatagaagccacccccgcagctccctctcctccactcgtcttcgcagggttggcgcacccaccgcggcgccgcagcgcaggcatcctgaaggttcctctcctccccccatcgcatttcgtcgtcttcgtagatatccgcgacaaatcgggttcttcgtgttgggtaccaagatccactgcaaccaagatgtctgagcctaatacagactcatatgatgatgatagggatgcagaattgctaattgcactgtttgctgttgacatatgggggagctcgccaagtggggtatccagaagaaccatggttcaaacaggtatccaatgggtagagcgaacattggagagtagtgacgattgcttcgacatgtttcgcatgcgtcgaacagtgtttcgtcgtttgcatgatacgttggtgcaaaattatggtttggtaccaagtcgtggtgttagtacaacggaagtgttagctattttcttgtgggcatgcgggggtccacaatcatttaggcagataaggaataagtttggtcactcattggaaactataagtcgcaaattttgaagtccttaatgcaatatataggatg

SEQ ID NO: 39400 - DNA, 285 bp, Zea mays
  Clone ID: MRT4577_135934C.1
gaaacacgccaacactacggcgcggtggtgaattgttcaatcctttcagcgacttattatttgtttgtgtaatcaattcgaagcggatctataccattcatttgtatcttcattcccacagcccataggataccccagtttttttttttttctttttgtgaagagcactctgcctcatcatcacatataaacgctcgaactctctcctagtcgccggctgcccgtatcctaccaattggttcgcgaaacactcatcactagtaccatggaaacaacactccccat

SEQ ID NO: 39401 - DNA, 180 bp, Zea mays
  Clone ID: MRT4577_135935C.1
tctgcaattgattgatctgttcggtgtgggctccgcattccttctccaggccttgggccatcatcatggcctgtgaagcactgcgatggctgaccgttcctcctgttgtgacctgattcgtccttttcactgggtgcatggattgtatatgataaatattgctaaacctttgctgcaatt

SEQ ID NO: 39402 - DNA, 486 bp, Zea mays
  Clone ID: MRT4577_135936C.1
atagcttcattcacctgctgtgtgggggcgctgcagatgctacaacaacgcctacttcgcgcgggtgggcggcatcagcctggtggagatgaactacctggaggtggacttcctgttcggcatcgccttctacctcaacgtcaagccctccggcttcacatactactctgcgcagctgcacattgtgaagactgtcatgttcaagcagcttgggggggggtgatgctcactggtactacatcaggcctgcatccattgcaaggaatatctacctaaggcaaggcatcgcgtgtgggtggctttcagaagatctactgtggccgccagaggaatggctcccccccaccacacttatgcaagagcagcggtagctggtgcacgcaacatcctgcagcagctgctgattatgggcatatctcgatgtctatcccaagggctggaccccctcatcaccaaccatggaagtgcgtgatcctggaccaacgt

SEQ ID NO: 39403 - DNA, 407 bp, Zea mays
  Clone ID: MRT4577_135937C.1
agctcctcgacccccgcccaacactcccaggcgtcacgccgtcgccgacgagagtcccacattcaccatgatcatctccaagaagaaccgccgcgagatctgcaggaccatcttccatgacggggttctatatgacaataaggactacaacctgtacaagctccccaagcttgacgtgcccaacctgtaggtgatcaagcttatgcacagcttcaagtccaacgagtatatcaggaagaccttctcctgccagtactactactggtaccttaccaacgatggcattgagcacatgcgcagcttactcaacctgccgtcagaggttgtgcccaacaccctcaagaagtcctccaagcccccggaccagtcctttggatctggcccaccgggtgaccgccccatgggtt

SEQ ID NO: 39404 - DNA, 374 bp, Zea mays
  Clone ID: MRT4577_135938C.1
acaaatccaaatttatgcaattataaattacaataacttatcctttacatatcctgtacaaaattataaattacaattataatattgatactgaggcacatgaacactttacaaaattgtagtttacaagtatgcattagcagtttaccagcgtccattgcagccacccattctgttctcagttctcaaaaaccaaaaacacttgtaaacaaaacaactcagttctcgattcaatttacaaaaacaccaaaaacacccgatcaagtgtgcaatcaaaatacttgtaaacaaaacagctctctgtttagcaaatacttgtaaactaaacagaccaaaaacaacttggttgtttgatggcaaagtaaatgtaaaaa

SEQ ID NO: 39405 - DNA, 469 bp, Zea mays
  Clone ID: MRT4577_135939C.1
aaacacaaaacacaggcccacacgggggccggcatcccgttcctacaagacgacccagggaacgaagccagacagacgaaacccccggggtaacggggggaggaacaaaaaacacagttggggggggggggaaaaggaacccacttaagaaaaaaccaagcccgcgacagcaaaaacgaggggaacagggggcccggcccacattataagggggggcccaccctgcccccgccacaaaaaaaaaggaaaaaacagggggtccctgccccttcccaaaagggaagccttaaccgaggggaccccggggggaccttaaaagtaacggggccttgccctccggtgccacctaaatcctgggggaccccatgccatcgaacaactggggggggctgtatggagctttgctcacaaccctgtaacggggtttctaaaggaaaccctaaaaaaagggcctcccggcaagggggaa

SEQ ID NO: 39406 - DNA, 466 bp, Zea mays
  Clone ID: MRT4577_13593C.1
ggccgttgtgccagaggctttggacacgcaaccaccggagggttatgatgtaaaagctacgtgggaaccgaaccgaccggcctacatgtggtgaacccgcaactgagaacgctacgctggcgcgatattcaaaccggacgcctgtggattatctttacacggcccatgattatacacctctcggaggatcttcttatgagcagcgacaagaccatccattgtcgtagcgcgcatgggcacatagtcaacagcgctcagatcacggatcagctggcgcaaaacgtcaccatgcacaatctgcacgtgcaccactctaagcacactatgggaggccatatgcgcgactccttgacgcagataggctgcccaaccagggcctaaggagacggcatgtcgctattatatgtgaccaacgtgtggatcgaccacatctgcatgctcaactgctaggactgcctcattgacg

SEQ ID NO: 39407 - DNA, 181 bp, Zea mays
  Clone ID: MRT4577_135940C.1
ggaaccaaagggggtttttttccggctaatatttccaaaggcccaaccaaccttatttttggggggaaaatttttgtccaaaaaacaaaggctttttgttttgcataataacccccaaaaaattttggtaacaggacagttgcaaatccccccgggaaattttagtagcccagttttttgt

SEQ ID NO: 39408 - DNA, 745 bp, Zea mays
  unsure (1)..(745): unsure at all n locations
  Clone ID: MRT4577_135941C.1
nacaaaaanagggaaanaggaggatgggttgttgaacgtctcttaaatcagttacttatcgaacttgatggtgctgatcaacgacaaggtgtctatgtgataggagctacgaacaggattgatgtgatagatgatgctgttctacggcctggtagatttggaaagaaacattatgtacctttacctggtgcacacgagcgggtttcaatattaaaagcacatgctcgcagcaagcccatctcgaccgatgttcatttggatgcacttgcacgtcgtgccgagtgcaacaatctcactggtgctgacctagcatcactggtcaatgaagcagccatggcagcattggaagagcgattagagttcattgagaacgggacatcctcaatgggttcatcttgtttgattaagctctcacactttgagcgtgctctatcgaagatcaagccatcagtatctgaacagcaaattaaatattacgaggcgttgtcaaagagatactcgtcaaactgaggtatcaccacgtctccatgactcccatccatggttcgtcagtggttgcagctttgtatttttggtggtggtgaatggtgatgaaattctacagttgtagaaatcattttaggttttgctgcctacaggcaaatttttgtatggccttaagatacattatacaaggatgagtagtaccacaaatatgtcgcagttaatgctatcgaaggcctccagtcgtggagcgcattccccc

SEQ ID NO: 39409 - DNA, 378 bp, Zea mays
  unsure (1)..(378): unsure at all n locations
  Clone ID: MRT4577_135942C.1
cccccccccccccangggtttttttgggggtatgccggttttataatttcaagggttaacattggtacaagttcaacctaggtattgcttaaaaagtttgaccccggcgggagcatgatccatttggaactgggcacgggaactgggaaccaaaaactactgggacgcaacaaaatgggaacagatgcccatcccccaaaaaagactccgccgaatggtaacaaagcagaaattttagttccgacattattgggatttttagcaaaattatgggcagaacagccccaagttgagaacaccaatgattcacgggcatttaccagcgggggggtacctaacttgtagtcatactgggggccagtttttttttggggccca

SEQ ID NO: 39410 - DNA, 479 bp, Zea mays
  Clone ID: MRT4577_135943C.1
tcgaattcgctcgagaataaaggccctcgcttccccagcggaacgaggcggcacgcaggtgatggacgacatcgtgggcgtgggcgccggccggaggaccgtgccttccttcacgggatccataaggagtgtcctgcccatcgagaacgggcacgaccatgccgccctctaggcgctcagccacctccgctaccactccacgtacgtcgttcaactcacccgacttgctcaatgttcgctgctgctctgctcttgtattcgattgtgcagggagaggaaccaagcggcgcgggtggccactccacgagcttctgtttcgcgtgagccgcggcgttctgcacgcgcgacggcggatgaacacggagtccggtaaaccattgtatttggtgaagaaaagaaagcgaccccctttgaattctcatttgctgaggatctcttggttgttctttcatccgtggtgtttaaaatgccgctttctt

SEQ ID NO: 39411 - DNA, 271 bp, Zea mays
  Clone ID: MRT4577_135944C.1
acccctcctcccaccatggtaccctgtaggagccctgtatgacatctgagcgtggtggaggtaggagggttgccagttgcagtgaccctgccacagaggcagggtcagtgcaggggtcgctttggttccgcttccctgggccacagaacggaacacagcataggttctgcagcacgagccgcagtggcaggatggagggtgcgaagggcaaggagtgcactgctgggcattcctggccagccccggccctctggtgcctgcttcctgtgat

SEQ ID NO: 39412 - DNA, 347 bp, Zea mays
  Clone ID: MRT4577_135945C.1
atgcctatgttctcatgagggaggacggcaacccgtccataatccaccgctcgttcagatgatggcgacgctcgagaatatgatcaagcatgttgtacagcgcctttaggtagaactcgcgcgcgaacaggactcacgggcgctatatgccgatccacacacactgcctctgctgtgcgacatgatttgtgttgttcgctacgtggacgctctcgtcgatggacaccatgtccttgagctgatcgaagcttgcgtccgcagccttgtagacatggggatgccactttccttcggaccaagcgacagtgcgcactttatcagattcagagttcgtgaggatcaaccat

SEQ ID NO: 39413 - DNA, 394 bp, Zea mays
  unsure (1)..(394): unsure at all n locations
  Clone ID: MRT4577_135946C.1
tctacgacccgtcgccgccgaatgctgatgcgaaacaacanacaacaccaggcgcggacggcgataacatttaactagcgaggaacacaatccatggaggatatggagccaaacattgagaaccatatggccaaagaccaaccgactacggccgtcttcactgttgatgaggccgttatggatgcacatacaagcggagagcggcaaaacgctaccgcaatgaagggcatgctccgaaggtattctagacgtgcaacagcaacggtccaaggcctactacacgctacgaagggagttttttgaatataaggcttatagaggtgaataggactatcaacaactgtatgacaatattacagcggagaacaataattgctcaaaacaagtccttgaa

SEQ ID NO: 39414 - DNA, 275 bp, Zea mays
  Clone ID: MRT4577_135947C.1
agtcaaacctctatagtcttaatgcaggatctcggacaatgagtgacaagcgggaatttcctacagtgcccttggttaaattaggcagttcttttacgaaggttcaagattatctacgaagatttgaaagtataccagatatgcttgaattggatcacctcacagtctcaggagatgtgacatttggaaaaaatgtttcattacagggaacggttatcatcattgcatatcatggtgacacttttgatatccctcctggagcagtattagagcac

SEQ ID NO: 39415 - DNA, 426 bp, Zea mays
  unsure (1)..(426): unsure at all n locations
  Clone ID: MRT4577_135948C.1
accggnccggaanacccggggcggccgacgcgnccganaaacccaagccccaccgccgccgccaaggcgggcccgaccggcgcaacacccaccgggggcggcgccggcgggggggggggccgcnaccacagcccgccccacgagcgccgccagcagcaggaggagcagcggcagcggcacaagggcccggcccaggggcagcgcccgacgaccccagcggcggggacgcccacgcccaggggggccaagcagaagacgccaccggccgagaagcccgacccggacaaggagcccgagaggcgggccgacgcgaccaccaagccgcccgcgacagcgccggcccacaccggcaaggcggccgcgacagcagacggggagacgaccccgccgccgacgcccgcgggacagggagaggcggggaaacac

SEQ ID NO: 39416 - DNA, 318 bp, Zea mays
  Clone ID: MRT4577_135949C.1
attcggctcgagaaccatagcaaaatatatactctctgttgaactatgaagcaccagctcctcgatgcgttccgaaccgaacaagaactgctcacagttctgctcaagggcgagctgcttggaagcatgagatctatctggatctgctcaaggtaaaaagtatccatctcaagagccatcggcaatctgatgctggcaggggcaccatttatcctgtgaatgcaattgctttgcatccaatatatggaacatttgtcacccaacggtgtgatggattcgcgaatgacagggatgtcattaacaagaaaagactctttc

SEQ ID NO: 39417 - DNA, 891 bp, Zea mays
  Clone ID: MRT4577_13594C.1
ggggaagaacttcaagattggttcactgcagatgttcatggacaacaatggaagcactgaagatatgggtcctcgaccttttcctgtcaaggaggttcataaaatagcagtactagatattaggttagctaatgctgatcgtcatgctgggaatattctagtgtgcaaggagagagaaggtggcaactacaagctgattccaattgatcatggttactgcttgccagagaaggtggttaatatctgttacaatacgtatttggttcatctgcttgcaccttatttgtttcatatggctgattagaaacttacgtcgccatatgctgtgcagtttgaagattgtacatttgagtggctctactggccccaagcccgtgagccattcaatgatgaaaccattgaatacatcaaatcactcgatgctgaagaagacatcaagcttctcaagatccatgggtgggagctgcctccacggtgtgctcgtgtcctgcgcatcagcacaatgcttttgaagaaaggtgcatctcgtggcttcacgccctatgacatagggcgcatactatgcagggaaactgtgaatagggactctgagattgaggtcatcattcaggaagcagaggatgctgttctcccatggtccagtgaaaacatgttcttagaaactttatctgaaatcatggaccgtcacctccacaaggaatgagtttagaaattcagaataacttatctagttgctccagctgtatccggtttgttgtaagtattgtagacaaggggtgtcaagggactaatgatttcatttgtttgtatcctctcaaatgatttcacttggttgtaattgctcgagtactttgcttatgcacattttgtgaataatatatttgtttggtt

SEQ ID NO: 39418 - DNA, 498 bp, Zea mays
  Clone ID: MRT4577_135950C.1
tcaggggcggggcgggggggcaaggtttttttgttttttttttttaggggttgtttttttttatatattttttttgtttgttgttttttgttgtttagtatgggtggtctatccttctgtgatgagcttggttggatgaatgctttttgtaggaggtcttgggggggaggggtcagtggtggtaatttatgtaggaggcgtacggtacgattgtgtgggatgtggtgagccgtaccgggcgtttaactcaattgcaaactctacatccttgtgaggtggcaatccggacaaatgctcgggaaagacatgaggagggtgggatactagcggaaaatcgggggattctcggggggtaacttcataaaatgtgggattaatgttgtttggaatagggttgggcgaaagaattggttggtgattatgactaaacgtgggggttactttggggaggaggggagtgttgctttatgggtgggtcttaccaatttatacgccaaa

SEQ ID NO: 39419 - DNA, 156 bp, Zea mays
  Clone ID: MRT4577_135951C.1
ataaaactctacgtgtgaacccccatatcgggaacccaaaaatacacagggtcatcaatgcagaaaggaataacgcacagcccaaacgccattggaccggggaaaacgaactagggcaacaggccaagcacccggtacagaaaccgttaaaaacaa

SEQ ID NO: 39420 - DNA, 398 bp, Zea mays
  Clone ID: MRT4577_135952C.1
acaagaaggaacaaaaaagcaggctgatacccctccgcaattcccccgatgcgattattttttttttaaccccttttcttacacctgggaggtgcaaaaatataccagtgtgccccaacaataatacaactttcacccatacacctattataagtccgttgacccctttaaaacatcctctaagacccccatctcaccttctaaatccctaatctcctttgatatcccacccacttctatctaatccaattcattttactgttatttcctaaacaattcctccatgaagaagaatacacccctaaatacggtcaaaaattcaccaaaactgtcttctctcttttatccacctttccatgaccccacctcaactgctacaccaaaaacactacctttta

SEQ ID NO: 39421 - DNA, 403 bp, Zea mays
  Clone ID: MRT4577_135953C.1
ggggaaaaaaaaaaaaaaatttttttttaaaaaaaaaaaacaaaaaatgttcagcaacaaattatttttgaaccccctacaacctaaaaaagaactggcgttttcttttccgtcccggtaaaaatggggaaaaaaaaaatcttttctttgaccccattcccatgggaaaatttccctttcgggaaaaggggttacattattttgaccggtcccccttggcttaaaaaatattcccccggaaaaattccttttatgaaagggggcttgcattaaatgaaccttggggatttggactggacccaaataattttaccctgggcaagggggggacaccactttatttttttttttcaagaaaaaaaccaaaaatttttttttctttaaaaaaaaacctcccctgggg

SEQ ID NO: 39422 - DNA, 1484 bp, Zea mays
  unsure (1)..(1484): unsure at all n locations
  Clone ID: MRT4577_135954C.1
gctctctccctcgctccttggcgcgagctctctctcccgctccttcgccctcgcacgtcgtctctttcctcgcgagcgacgcgcgcttctcacccgcatcgccgatggagacgccgctgtccaccaggaggatcacccgctcgctggccgccgcatccgcccagaagagcgccgccgcagggatggactccgccgccctcttctccctgtccaagaacgccgtcgcgggggagacacacgcacagacgcgcgcggcccttcacgacatcaccaacgactcccccgtcgtcggcctcgccgcgggcagcctccacgccaccgacaccacccccgccaagacccgccgcagggccccgcgctgcacgccaggctccggggaggcgctcctgcgcggccaggtcaaggcgctcctgcacaaggtcgacgaggagcagggctgcgccgccgccggcgccctcgtcaggcccaagcgcatccaggcgctgctcggggtctccaggtccccggcccagcttcttgcgcccacgccggccaacacgccgcagatcggccccgtctccgcgcccagggaaggcgtcgggctgcatgacggcgccaccgtcgtgccctgcgtcatcgacgaagaggaactgctgattcctaagcttcaggtcattgcaggttccctccctccacctcagccagaggagaagttgggcgagtgccagctgaaccgtgcgctggtgttcgacgactccccggacaattccgacgagtccagcggatcagccgtcccatcatccgtctccctccaggagggcagcgccgggaagacatcgtcacctgaggagggtgacagctcctcagcctggtccactcaggtccatgccagctccgagaagggcgatcaagaagagctggacgtggaggagctggcggcagattacactgaagaagaggaggagttcgaggaggaggatgactgggaagaagacagcgatgacggctgctacgatgatctgtgcgatgagatgagccggatgaccgtgttggatgaaggggagaagaagaccgggctgccgcagttcgaggggaagcacaccaggttcatctacaacagtgacgacgagatcgagcgggaggaggtggccgatgcggctgaagctagggcggagctcggcgcactgatgctcagggggctgccggtgccggaggggaggcacctacgcttccacgacgacgaggatgacgaggaataagaatgttcagattgggtatcggcagtggttgtctttccctgacaccagccagccaaaattcttcttttgagggggctttgtttctacaatcgggttcagagagcaaatagctcttttgcccattcacaactcaactctttacgaaacatagtactatttcctggttactcagttaggttatttcattctccgttcttaaagaaataanccaacttttctgaaaataaaaattttggggcattcgat

SEQ ID NO: 39423 - DNA, 511 bp, Zea mays
  unsure (1)..(511): unsure at all n locations
  Clone ID: MRT4577_135955C.1
ctttactatattacgaatacgaaggaaataacgattcggccgcaacacgctgtgctgtactatattacgaatacgaaggataatacagcacagcgtgttgcggccgaatcgttacttgcacgcgggtggcggatcctggcgctggcgcgcgtggcttggcccggcaggtccggcggggggtcggcgggcctccgcgcggtgggtatccggtgccggaccatcgcgctgtccgggagcgagagccggtacggcgggggtgggctcgcgatgctgtaggactgtcccgctgcgctccaccgcgtcgtccgacgggcagagcttccggtcctctgncggcgggcttagccnggtcaatatgcttcatctcttattggtcgcttgccagcaggcgaanagggggccccttctgctactggcttggggaccacctggcccgagaggacgtctccatctatctcaccttgggcccgtcggttcccgagggcggcgccgtggtgtccagcaggtcctt

SEQ ID NO: 39424 - DNA, 302 bp, Zea mays
  Clone ID: MRT4577_135956C.1
atggtggataaggtgaataaggcactgttggtgggggtagggggactcaatttgagagtgtaaagtggtccattggtatcacatgcgctgcgcatgtgacacacacactatcacatctcgcgcgttgatctctaaagtgatggtgacacccatcatatatattatgtgagctcgtagtatatgacacacaagagtgttgtgtatgttggtgatagaaacacatgtgacaacgaaggtgctcatatatagatgtaggacgaaatagggtggtaaaatgaggcagtgaaccacactgattggtg

SEQ ID NO: 39425 - DNA, 624 bp, Zea mays
  Clone ID: MRT4577_135957C.1
acctctctctcttttcccttctcctcaccgcaaagaaaccctcctctccccgccgactagtcaatagtaagtagatctgcgatccgatccgatccgaggccggcgatcccgcgcggcgcggcggagggcgggatcgatctcagccatggactcttcttcctcgtcgacggcgtcgtcctctcaggcgcaggcgcagcccgacttcgactacctgttcaagctcctcctcatcggcgactccggcgtggggaagagcagcctcctcctccgattcacatcggactccttcgaggacctctccccgaccatcggcgtcgacttcaaggtgaagatggtcaacattgccggcaagaagctcaagctcgccgtctgggacaccgctggacaggaacgatttaggaccttgaccagctcttactacagaggggcgcaagggatcatcatggtgtacgatgttactcgccgagaaacattcacgaatctctctgacatatgggccaaggaaattgacctgtattcgacaaaccaggactgtataaagatgcttgtcggaaacaaagtggacaaggaaagtgagagggctgtcaccaagaaggaaggcattgactttgccagggagtatgg

SEQ ID NO: 39426 - DNA, 395 bp, Zea mays
  Clone ID: MRT4577_135958C.1
tgctgctggtggagccggccgactacaacgcctgcaacacctcctcctacgacaagcagttcgacgacggcagcacgtccgtggcgctggaccgcgccggcgccttcttcttcatcagcggcgtcgaggccaactgccgcgccaacgagaagctcatcgtcatggtcgccggcgcgggcgcgccggcgccggccccggaccggcagggctccggctcttcctcctccccgtcgacgtccgcgccggtaccctccaagggtggcggcgccccggtgccgccgtcctcgcctaaggcccccgccgccaagaactccacggccaagggcgcgcctccagccgccggcaccgacaggaacggcgctggcgcttgtgctggactcgccgtggcaggcctc

SEQ ID NO: 39427 - DNA, 548 bp, Zea mays
  unsure (1)..(548): unsure at all n locations
  Clone ID: MRT4577_135959C.1
atgcagaattaccagcagcangaattatcaccagaaacacgtgcaatagacttagatttcgatggttctctcaataccaccagccaaaataatagagactggaaatgaagtgtgattttgtagtgttggtaatactccagcatttgttgtaagaactggaaagtcctggctccatcggctagtatgcattgcatgtttgaagatcctagagcaaccattgtctcacaaacacatgatgcaaactcatattcgctctcatcaatagaactgggttgcatgccagatctggtcaaaaattgttgtgaaatgttcatcaacacctggaatatgttgcacattgcagcatcatactcagcaactgccacatccacaggtcttttcctctgacatatcactttaaaaaactcacaagcgtggaggcgaaaatcgctgtaagaaagcaaggacccacatccgtgaattaaaccatatttggctagatctgtcacaggaacccattcagcatatgcattgacagcatttagaactgcagtcaccgtccctgcatg

SEQ ID NO: 39428 - DNA, 243 bp, Zea mays
  Clone ID: MRT4577_13595C.1
cttagataagtagtaaggctctaaaatgtcacaaaaatccacaaggccctcaagtagtagtagtaggtggtgtactctagctagcacgaagtggatagatcatgcaagggcgcagtcgactacgggtctcctgacatcagtgtcctacgggtatctcaaggaccatgaaaacatcgtatactgctgcaatcatgttgtcgtacttcggaaggacttccatggtgtcaagaatgccaaggcctt

SEQ ID NO: 39429 - DNA, 819 bp, Zea mays
  unsure (1)..(819): unsure at all n locations
  Clone ID: MRT4577_135960C.1
agccggccgggacctattgccacatcgtttcctccgttctggaactccacgcggccgggtgaagttatcttggacaacagcagcacaagcgagctgtggaggaggtggaggtgcagccatggcgcacctgctgctgcacggcactctggatgcgaccatcctggaggccgaccacctcaccaaccccacccgggccaccggcggcgcccccgggatcttccgcaagttcgtggaggggttcgaggactcactcgggctcggccagggctccacgcggctgtacgcgacggtggacctcggccgtgcgcgcgtgggccggacgcgggtcatcaccggcgaccccgtgaacccgcgctggtacgaggtgttccacatctactgcgcccacttcgcctccgacgtcgtgttctccgtcaaggccgcgcagcccatcggcgccacgctcatcggccgcgcctacctccccgtccgggacctcatcgctggccaggagatcgagcggtcgctcgacatcctcgacgccagcaagaagcggctcccgcacgggcccaagatacgcgtgcgcctgcggttccaggacgtgtccgccgacccccgcgggtggggcccggggcgtcggcggcgcgcggaaccctggcgtgccgtacaccttcttctcgcagcgggccgggtgcagggtcacgctataccaggacgcgcacacgcccgacgcgttcgcgcccaggatcccngctcgccggaggccgcctctaccagccgggcaggtgccttggaaggacgtgttcgacgccatcagcaacgcgcgccacctcatctaca

SEQ ID NO: 39430 - DNA, 357 bp, Zea mays
  Clone ID: MRT4577_135961C.1
atgcggggtcttaaaaccaacagctttatctactgaattacgcacacgaacccgcgcgaccccaggagggtgtttcttatagcgctacctaacctgactctagctgccagcgccatctacacgcatgcaagcggaagctgtggctgtcagccacctaatcccgttgatgtacatacccctgtgcatatgtcacctactatccaacaggcacctaccgagcgtccttcaccaccggtgcacatgccgcatggggaaagggacgcgccctcgttcatggcattaaccgcggtgattgtgctgggtacccacaccattaccctactaaatcgccgcggcctaaggctcattcctagccat

SEQ ID NO: 39431 - DNA, 392 bp, Zea mays
  Clone ID: MRT4577_135962C.1
tagaataacccggattcaatcccttcccaagggaatcctgcccccatagttgtatcaaaaagggcaaataccaatgatttttgcaaggctgttcttgttcaaaaataaccaagggcaagacttgaatccaggacattggggaccaatggggttggaatggggtactgtaattccgctgcaacaaccgaaccttaacgactccttgttgctgttgaaggccattctggattccgcttcagtgcaatggaagttgaaaccttggttaagtaccaactgcctgttgttgtaatcgttttcaacaacaaccgttttcaacgccgggacccgagaagccctgaccagattaccggaccctacaaagattacccagccccaaactcctttgttcccgc

SEQ ID NO: 39432 - DNA, 898 bp, Zea mays
  Clone ID: MRT4577_135963C.1
agacgattcaaccgttcgccaaatccaaacgcaccgatccagaccagcgcacccgcaccggcccgccgacgaagaccatggcgaccaaggaccccgcggccaccggcggcgagcccgccatcggcatcccctaccacccggcgccgggggcccaggggcactactactacgcgccgccgccgaacccctacgcggcggggatgccgccgcccaacgcgatctacgccggcgcgcccaagggggtgccgctccagcagaccatgttccgcgacacgcccgcgcccttccactgccaggcctgcggtgaggccgccgtctcctccgtccggtcaaagccaagccttgcatccgtcgtggcttgcatgatgcccttcatgctgggggtctgcttcctatgcccttcgatggactgcctctggcacaagtaccattactgccccagctgtggggaaaaggtgggtgagttcaggaagtccgacccgtgcctcgtcgtcgatgcggcccggtggtccgagccgagcttcgctgtgcctgcgtagcgcacatatattgcaccgtttgatatccaaccattgccttcaaaatgagagtttccgttgcagttgtgtagtctgtatgtatatataaaggatgctactggcttcttgttgcatgctgtatatcccgtagctgaactgccgttgcgctctagtctcttactctccacgttagaattcaaactttttttttcttttgggtcagaataaatgtgctgctgttaacagtacgtaattgaacatacatgtgtaaatgtgtaataggagttcttatcaacaagggaagaaaagaggtgtgttatagaattgcaggaccatcactgtagtaactttggtttaataacgttcctactttgtgttgc

SEQ ID NO: 39433 - DNA, 851 bp, Zea mays
  Clone ID: MRT4577_135964C.1
cctcgaggccggccgggagaaaacgagttgaagacttttcgatacacgcacagatcgcctttcaagttgaacgggttgccggcctaccgctgacagacgattcaaccgtccgccaaatccaaacgcaccgatccattccagaccatggcgacgaccaaggaccccgcgaccaccggcggcgagcccgccatcggcattccctaccacccggcggcggaggcccaggggcactattactacgcgccgccgccgaacccctacgcggcggggatgccgccgcccaacgcgatctacgccggcgcgcccaagggggtgccgctccagcagaccatgttccgcgacacgcccgcgcccttccactgccaggcctgcggtgaagccgccgtctcctccgtccggtcaaagccaagccttgcatccgtcgtggcttgcatgatgccattcatgctgggggtctgcttcctatgcccttcgatggactgcctctggcacaagtaccattactgccccagctgtggggaaaaggtgggtgagttcaggaagtcggacccgtgcctcgtcgtggatgcgacccggtggtccgagccgagcttcgccgtgcctgcgtagcgcacatatgtacatgtaccacttgctatactgccttaaaaaaatgagagtgttcgtttctctcgtctagtctgtatataaaagatgctactggcttgttgcatgctgtatattactgaacctgaagaactgccgttgcgctctagtctctcctcccaacgttagaattgaatatttttttgttttctttggaacagaataaatttgctgctcttacaagtgcataatcgaatctagtacac

SEQ ID NO: 39434 - DNA, 275 bp, Zea mays
  Clone ID: MRT4577_135965C.1
aaagacccaccgcaaagaaaaagagacaagacccggaaaaaaaaaaccgagcaaaaagggacaccgggaaagaaggaacaaggcccccccaaaagaaaaaacagggacgccggacgctagccacaacggatcacaaaggaccggcgggcgacagaaaccagggggggacgcaaacaaaagggccccgaaagaaagaaaaatggacaccatgcggaacaagaacagggacacacaaaaagcccagccgcgggaaaaaaaccatccgaggccgaaaa

SEQ ID NO: 39435 - DNA, 354 bp, Zea mays
  Clone ID: MRT4577_135966C.1
catcggatggcatgctatcgacacccatgccgcgcgtggcgagcagaacacccccaaggggggaggactgagactgaccatgggagacgcctgcagcgacgctgcagctgcgggccagcagctgacgcaggacgaagatggcggacgacgagggcgtcacgcggagaaggagctcgtacgtgacccaataacccacgactacggatgatcgagcaagctgtactaggacctgccagcgacgccgatgatggcgctcaaccacatctctcgcctgtgcgaatccgtagacgcgtccgtccggttctacgtgaaggcgctcggctctgcgctcatccaggcgccgcaagcgctcga

SEQ ID NO: 39436 - DNA, 420 bp, Zea mays
  Clone ID: MRT4577_135967C.1
atggctcgtgtggtccgctgcgctgacctactccctgaacctctagcgcatgaagaggtcctcaccggtcgccagctgagccctatggcatgctcagtctccaccataccggtggagcccagcaaacaagccactaagagctacgccttagtcatcctcatcaagatagaagttgcctaccgatcgtgggccccctataggcccaccacacacacctatggtgttttcaaggacagggcagcgctaaggcctgcgtggtctaccacgtcggcctacaactgggctccacggtgccaaggctcaactcatcggccatggcacaagcccatggtatttggggttggctgcgtcatccagcgactcaagactcatggcgttctagagggggtgaataggtggtcctgtaaaaatcaactctaa

SEQ ID NO: 39437 - DNA, 120 bp, Zea mays
  Clone ID: MRT4577_135968C.1
tttaaacacacaatctaatgctgactagtgatggtgagttgcaaattaagggcctgattttggccttgccttgacccgtaggggatattggattggaaagggttctttcggtattggttt

SEQ ID NO: 39438 - DNA, 258 bp, Zea mays
  Clone ID: MRT4577_135969C.1
cttccctgagctccctcccaccgcgcgctctcctgctgccgctctttcccggcgtgtccctgctccagcgccgcggagctaccgcgacacaagtgcatctggtgggcgtccgcctggctgcataccctccggtctcctccctcaagcgccgcttcttcgagcccgtgattggagatcctcgcccatggctctgggctgccagctccgagctcctacctgcttctctgctccagcccgaccgccctcacctcatcccct

SEQ ID NO: 39439 - DNA, 238 bp, Zea mays
  Clone ID: MRT4577_13596C.1
ttgtaatagtctagagcaaggagctatcaacggggggttatgtagagattttcgcgcatggaccaactgcaaccggctgcagggatcgagccgacctcaaccggggttccttggccacgcattcttgcaagcgtagttaagccggaacatagcacgcggaccggatggaggggaatgctgggtcgccgcatgtgcaacaggcgctggccggggcgctagcggagatgaacggtaggcc

SEQ ID NO: 39440 - DNA, 362 bp, Zea mays
  Clone ID: MRT4577_135970C.1
ccagagttaactcttggtgctaaaatcattgcttacctttggcagatatgggttaaaactccagaagttttagctcgtgatcggcttctaggctcattttctgtaagttgtacttactgacttctgtaaacgcaacattcttttatgatcaggtagctctttgttttccatcgagtatcagctcgctgccataaagcttattgagtgaacactgaactttacatgcacatggcatgagctgtgatatccctgaggccttgtgtggattaagagggatcgtagcggattggagtgcatgatcctgatcatcatgtgtcaggtctgatggccatcggcaagcatgaatgtatttactagccatt

SEQ ID NO: 39441 - DNA, 106 bp, Zea mays
  Clone ID: MRT4577_135971C.1
tttcccgttcagcccaagccccaagctgcgaattgcgatgagttcgtctccctcgtgggcacgactggccgctggccccgccttcggcacctcgcagattcgcaga

SEQ ID NO: 39442 - DNA, 365 bp, Zea mays
  Clone ID: MRT4577_135972C.1
caatactgttttttttttttgtgggagagagcataggttttttttatgattgctagggaaccaatacacatacaacaagtggtaaaatatagttaaacacaggtaaaaattaaacaaagctacatattcacagaataagtattattttttacccaagctcttaaatatttctggttccaccactgcatggacgacacatgaaattcctcgcgctactgcattgctagctgaacaagcgtactccacttggggacaaggacaagcggaatccgccgcggcgtagtcatccccggagcactacccacgtggaggtcccgctttcccacgcccgcgaggagctcccattcgaagaggcagcaaaaggc

SEQ ID NO: 39443 - DNA, 209 bp, Zea mays
  Clone ID: MRT4577_135973C.1
ggggaatcaaagcacgtataatgatttatctgtaaacatacacaagcgtaactgtacaaaaagctcacgtatttacagagttacagttacactcatgcatcttcatttttcgacgactgctaatcaacaagtaaacagcatgcatatgcttaactactaattagtagattggagtctggactctggagctagacgatctcgagccgaat

SEQ ID NO: 39444 - DNA, 475 bp, Zea mays
  Clone ID: MRT4577_135974C.1
gacccacaaacgacctcaaaaattgattgctaagcaacccattgaaagccatccttagatcttaatgctaaaaagtgtgtggtttgcatgttacgaaaatcagggttccaacaggaaagcgcgctagagtataacgcgacacaaacgcaaacaaaacactcgcgtaattgcgttcaactttcgagattcatcatactgggggcgaggcgcgtcagaacctgacagtggtgctgacagcatcatcaaaatgcctagtcatccggacaccaattctctgatgcccaaggcaaccgaccggctgggccacatatgtcgctagggcgcctttttactggcgatgaggatctccttcaactgtgacaaccgatttgtcttgatagtgaagccttccaccatgtcagcccacttgccgaaacaattggggaacttcaacaaactgctaaagttctgcatctggaggaatggggtgtcacat

SEQ ID NO: 39445 - DNA, 317 bp, Zea mays
  Clone ID: MRT4577_135975C.1
gcgagaaatccttgttgtttatctatctacttatctcatttgcttctaccaacctatctatctattatgatacacatttttcttcactcaagtttttgttcaatctggtcatttgtgcttaaaggaaagcctctaacgaagtactgaattgcagcgatacgtttgcagtcttcaatatcttaactgtagtgtactgtaaacttatcatatctactgatccacataaactgttataacaatgtctattcatgctgtccgcagtttactatgtcagtcagttgaatgctctatgattgtgtgatcacagaaatgattct

SEQ ID NO: 39446 - DNA, 682 bp, Zea mays
  Clone ID: MRT4577_135976C.1
atatcgacctcggtcacctacatctccatctgccagcttgatccaggctgacccggagaggacaagaggaagagatcatctaaggtgatctgtagtgatggctccactgaacatacatgaacctggatccccgcgtgaccgctcgggaggtgcaggacgagttccggacgttcggcattcttcccacggcctgcaatactcagaaaccacctgtgttggcgtgcatcgtgttcgatgacaagacggacgcgtacgatgaaatccgtgacctagatcacctcaacgactgccacaccagaccatatctctcctcgcccccagggcgtctcggaccaagggaccggtgttctgcctgtgacgacaagtgctggacaagctggatactgtgaaccatgatcacgagctgccaagtaaggattgccaactgggtggctactcatcatcaaggcctacaagacgctgccgcgaccgcgagccctaccccagatatttcatgatcgcccagctcaccagatcctactacttcgctgtcttacactagtccaccaactccctggtatcaccatctgacccccacagctatatgacgctcctctggacgatcaccgcacgacgaatgtctcgccatcatcgaggacatcgacatgctcaaaggctcatgcagatacttgctcgcgacgat

SEQ ID NO: 39447 - DNA, 381 bp, Zea mays
  Clone ID: MRT4577_135977C.1
atgcaatcgaaaaaaaagttagtatacagtaaacatcattaggaaccaatactggcctgggatctatcttgtacctgatggcccttgtcacagctgctatgatctgtgtcatgtacacaacctcgatacatgcatgaaagattcactacaactcgtactaacctgatcgaaagagtcatatacaactctgttaccatcaacaacagtgcgcagtccttacctatgccgacgatcgcaacctgtatcagaaatctaaatactataacactgtcatcaacgaatcacactgccgatccaccacactaaatttggtgcctacactgcacactctagccaatcaactattcatgctaacacacgctatactccgacttgcccaat

SEQ ID NO: 39448 - DNA, 218 bp, Zea mays
  Clone ID: MRT4577_135978C.1
ggccgcttttttttttttttttttctgaacccgctctggatctgatattattactgggcttgacacgagtcgtgcatcaaggcattttatcataatcagagttttttgaacaccccagggtcgtggtcaaccgcctgaaacatcctcagttataacaacacgggtataaccatcaacacagtggcgtaaaatcacaaccccgccaggagcgcacaaac

SEQ ID NO: 39449 - DNA, 190 bp, Zea mays
  Clone ID: MRT4577_135979C.1
gtagactgtcacatgagctcctagccgagcgattgcatatagcacaacgaaggctattactgactcattgaacactattctcaatgggactgacagacacttctctgaacagaatactactattatgaattcagttcctgcaaaattggaccgtgaaagaaatgcactatttaataacgaactgacaagg

SEQ ID NO: 39450 - DNA, 1226 bp, Zea mays
  Clone ID: MRT4577_13597C.1
aattcggcacgaggatttctctcttcttccttgctgtgcactacacaaaccaaccataacttctcttgttctcgttctcttccctgcgtgaaccgcggaccaagaagaagcgggcgttggggactttgggatttgaaagcctacatattattatttctctaattcaggcgtggtgagtcgcttctcgtcctcggctgagcgcgcgagttcatcatgcgattttcgctgtaacttctgttgaatttagttttgccgggcgttggggtttgaatcggtcggggtgatctgatccgagatgtgatgttgcaggtctgtgctgggagggaagggatctgtggggctgcagccccatccgggctgagggttgaaggatccggccctttggtgtgctcccccaatcgggttattatttctctaattcgggcgtggtttgtgccgggagggaaggaatccgtggggctacagccccatccgggctgagggttgaaggaaccggccctttggtgcgctccccccaatcgaggaaaagggggcaacggatgctttgttgccttcgaccgtcgcaggctcgcagcatccgttacgcgattgggattggaccatcagcaggtcgaaatgactgttctgtaacacttttcccccaatcccatcaatcctgacttgatttttatttgaacacaagatgggactgtaatctcggttgctgttctgtgcctcttaggttttcctccgtcctggatttggaagggaggaactcttggatttctgtctccatggcgcacaaattgtagtttccagaatcttactttgtagatttagtgtaaataatagtgatagcagctggtgacgaatctcgggtttccttagtagctgtcaccctgtgaatatgtcgtcggcaggtgtgatcgtcttggggccaattccagaagaccctgccttcctgcccatctgcttcaatggcagccggtcacagcactgctcatctgggtcacaactgcaggattccattcttattttccttgctgtgccgggtatgccacccatgcccatgagcgtgctgggatctgagtccattgcatctgtcaagctgcgcatccagcagttcaagggctttgtggcgacgaagcagaggcttgtgctggatgggcatgagctggcaagaaacaactccccagtcaaggattatgggctggccgagggaaatggtctgcatcttgttattcgac

SEQ ID NO: 39451 - DNA, 1166 bp, Zea mays
  Clone ID: MRT4577_135980C.1
ccggccgggaacgacccgatacactcgctcggcgccgctcgagccttcctcctcggacgccagcgccgcgccgcgccgccacccagcctccctcctcctcggacgctagcagccggcgccaaggacgccagcgccgcgccgccacccagcctccctcctcctcggacgctagcagccggcgccaagtattcgccgccgtccagaatggacattttggagggctctattgctgttcgtggtagggggaaaaacaaaaggaagtggattcctgttgaagatgatgaactgatcaaagcattggttgatgtttctttggatccgaggtggaggagtgatgggagtttcaagaatggttacacttcagtacttgaagctcgcctcgctgaaaagctacctgattcaaaaatttctgcaactcctcatatcgagtcaaggttaagatacttcaagacaaagtattctgctttggagcagatgttgaacaagagtgggttcacatgggatccgaccaagaagatgattcagtgcgagaaacaacaatatgagacacattgcaagtttatttctgttgactcaacatcatctagctccaagaagcggaagaaagagtggaaaggaaagaagacttcatcaagtgacccgcttcttgatgtgttcaatgaagtgagtggtgatctcaaggttgccaccatgtcaattggaaaaatggcgcaagctatggatcgtgaggcatccaatcaagagaaggaaagagatgaggatccacaacaaaagctaagagagaaggcgatcaatgaggtccggagacttgaatttactggctcagaagttatcaaagcagctggtgtgtttgttaggatgccagatcaaatggggatgttgtttgcacttccagaaccactgaggagggaatacattgtcgacatgctacgtgatgaagcagcaaggagagagagagaggtcaaagtgaaggggctggtctagatgttgaatgatggagctttggaagttgatgttggtttagttggtctcaatctgtttatctttagtgttcttcatatgttgttgttgaatgacggtgaatgatgataaaaactgaatttttatgatgttgaacgttgttgaatgttcacaaatggtgttgaattaaaaaaccccaacaaccc

SEQ ID NO: 39452 - DNA, 690 bp, Zea mays
  Clone ID: MRT4577_135981C.1
ccggccggaggttgccgagtctggcatgaagcccgtcgaccgagagaacctgctaaggactgcattcagggtctcatcaacaccgagatgatcaagtccgacgacgagattgtctcgacctaccaccgcgcctttgaccacggataccccactccttcgcttgagcgtgaaggcgtcctcaccaagcttctccctgcccttcaggcaaaggacatcttgtcgcgtggccgcttcggttcatggcgctacgaggttggtaaccaggaccactcatttatgttgggtgtcgaggctgtagaccacgttgtcaacggagctgttgagcttaccctcaactaccccgactttgtcaatggtcgcaagaacgaggagcgtcgtctcgtcgacggtgcccaaatcttcaccaagccttctcttgcgctgaggaacaagggtgttgactagacgcatacacaaggaatgctgggcatgttatggattttgagagatgtttacaggataccacgcttatttacgaaacggacggcatggaatagggagtcggcgcatgtgtgcatgtttggactctaggtagatagatggttgttgcatctgcacagcatctagtcgatgttggcagtgataatggatagacattacctttttgccaagtcacgctttttcttgaaaaaaaaaaaaaaaaaagcggcc

SEQ ID NO: 39453 - DNA, 199 bp, Zea mays
  Clone ID: MRT4577_135982C.1
tcaattggatttcttattttttgtctgatcttgtttatttggatcaggagatcaaaaaacaaagggaaaggaaaacaggatggccatccctccataatgacttcggatactatcaaactctgggagggtgagaagacaggcactttttttgcggtgttttccttttcacaaataagaaatggcacagacaatttttcaa

SEQ ID NO: 39454 - DNA, 762 bp, Zea mays
  Clone ID: MRT4577_135983C.1
cccgatgatacctccagcggccgggatagatcggtatacttggaattagatacctccgtatagaaacctcaatccctcctaccccagccggaatcaacgcgagtcatcccgatccaccctcctcagtcgtcaccgatgaggcatcctggacgccggcacccgccgcgccgccagtgagccgaacggctcctccctccccgacgcctccctcctcctccacgcctacctcatccccgacgacgcctgccagcgccgacgaccagatctgctagcgccgacgtcgtctcgagatccgctgttctcgagtatctagccatcgagaataatccagatgcaaaagggttgtatggagtgtcctttccttactatgatgaactttcaaaggtatattccaaggacatggccacaggtgaaggtgcggaagacatgatagatgctgttcaaaacttggaagaacagttagttcgtgtaaatgctaatgatgcagaggatgcagagcatatgacatctgtagagacaccaaggcgttctgttgactcaacatcatctagctccaagaagcggaagaaagagtggaaaggaatgaagacttcatcaagtgaccccgcttcttgatgtgttcaatgaagcgaggggtgatcttcaagggggccaccctgtcaattggaaaaatggcacaagctattggatcgtgaggcatccaacccagagaaaggcagaaatgaggatccacaacacaaggtaaggagagacagcgatcaa

SEQ ID NO: 39455 - DNA, 1438 bp, Zea mays
  Clone ID: MRT4577_135984C.1
cgggggaataacacgagtcatcccgatccaccctcctcagtcctcaccgatgcggcatcatggacgccgccacccgccgcgccgccagtgagcccaacggctcctccctccccgacgcctccctcctcctccacacgtaccgacgacacctgccagcgccgacgacgagatctgctagcgccgacgtcgtcttcagatccaccgttctgagtatctagccatcgagaatggacatttcggagggctctattgctgttcgtggtaggggggaaaacaaaaggaagtggatccctgttgaagatgatgaactgatcaaagcattggttgatgtttctttggatccgaggtggaggagtgatgggagtttcaagaacggttacacttcagtacttgaagctcgcctcgctgaaaagctacccgattcaagaatttctgcaactcctcatatcgattcaaggttaagatacttcaagacaaagtattctgctttggagcagatgttgaacaagagtgggttcacatgggatccgaccaagaagatgattcagtgcgagaaacaacaatatgagacacattgcaagaataatccagatgcaaaagggttgtatggagtctcctttccttactatgatgaactctcaatggtatattccaaggacatggccacaggtgaaggtgcggaagacatgacagatgctgttcaaaacttggaagaagagttagttcgtgtaaatgctaatgatgaagaggatggagaggatatgacatctgtagagacaccaaggcgttctgttgactcaacatcatctagctccaagaagcggaagaaagagtggaaaggaaagaagacttcatcaagtgacccgcttcttgatgtgttcaatgaagtgagtggtgatctcaaggttgccaccatgtcaattggaaaaatggcgcaagctatggatcgtgaggcatccaaccaagagaaggcaagagatgaggatccacaacaaaagctaagagagaaggcgatcaatgaggtccggagacttgaatttactggctcagaagttatcaaagcagctggtgtgtttgtcaggatgccagatcaaatggggatgttgtttgcacttccagaaccactgaggagggaatacattgtcgacatgctacgtggtaactagaattttgtttgtagaaatgtacatggctagttttgatcttggtttaattcgctaattatttcatttattctagatgaagcagcaaggagagagagagagaggtcaaagtgaaggtgctggtctagatgttgaatgatggagctttggaagttgctgttggtttggttggtctcaatctgtttacctttagtgttcttcatatgttgctgttgaatgacggtgaatgatgataaaaactgaatttttatgatgttgaatgttgttgaatgttc

SEQ ID NO: 39456 - DNA, 292 bp, Zea mays
  Clone ID: MRT4577_135985C.1
attaccgtaccaaatgtacgtttcatcattcaaaaaaatccatgcctcactagtaatggtttgggcccaaacggtggttacacgtaccaaagaaagaggcaaccactcgaaggggatcaccgtacttatttaagtgcgtttgccctgacagaccacaaggcctttacacctataacagaaattctcctgacatgttatatgcacttaactggctgcatcgaatagcgctcctatgcgccacttatttacagacttacactgattgcactccgcaccgaggtcctttataatt

SEQ ID NO: 39457 - DNA, 374 bp, Zea mays
  Clone ID: MRT4577_135986C.1
tagaaaactcaaaccctccaaccctagccggaatcaacgacccgattcactcgctcggcgccgctcgagccttcctcctcggacgccagtgccacgccgcgccgccacccagcctccctcctcctcggacgctagccgccggcgccaagtattcgccgccgtccagaatggacattttggagggctctattgctgttcgtggtagggggaaaaacaaaaggaagtggattcctgttgaagatgatgaactgatcaaagcattggttgatgtttctttggatccgaggtggaggagtgatgggagtttcaagaatggttacacttcagtacttgaagctcgcctcgctgaaaagctacctgattcaaaaatttct

SEQ ID NO: 39458 - DNA, 257 bp, Zea mays
  Clone ID: MRT4577_135987C.1
gggaacctcaactaccctccttttgctggaaacgcacatacagcccagcaccccgaccggcgagcccgtggtcgatccaagctgcagctccttcgtcaagactctgactgaacagactatcaccctcgagggggagttcttagacaccattgacaacgtcaagggcaacatccaggacaaggaacgcatgtcccccggaccagcaggggacacatacttcggtgggaagcagcctagagtacgggcgcacacttgcc

SEQ ID NO: 39459 - DNA, 451 bp, Zea mays
  Clone ID: MRT4577_135988C.1
ggaaaccaaacaacggggcacattttcatatatccaatcgggaaagggggaacattctgatacattttattcatgcataccggcgaggccattttttttactagcaatttatgggaacgaagcacacacatccatttttcggggacggacatgcccccatgacatggccgagttattcattttatagatttgattctcagccgagggggggggcctccgcgacggggtcgacaaaaatgcaaacgcgggtgggggggaaatccatgggcaccggggggccgacgggcaaaacgacaatgtcggggtcgggcttgtcccacaggatcacccttttgggtttttccagggtgagcccgaccacttccggccaaaactttttggggccatcgtcgccgcctggggagctaatggggctcggctgccgatggcgaactgaaagggcaataattaa

SEQ ID NO: 39460 - DNA, 224 bp, Zea mays
  Clone ID: MRT4577_135989C.1
gcacgcgtacgtaatctggggacctatataaaaaacgcacttggttttttttttgttggttttttttttgcgcatgaacacgagagctttattgacacagaggaccagagcaccaggcaacgacaacggggcgggtgcaccatggccccaggtctttatatcttttttttagacaaggacacgggccgtggtacgtggcgggggagcaagcaaaataaggaaaa

SEQ ID NO: 39461 - DNA, 660 bp, Zea mays
  Clone ID: MRT4577_13598C.1
ccacgcgtccgtgatgcctccggggtggggctacatgcggggggagcgagactcaggttcagacagggcctacactctgggtggggatcgctgcctgagcgagttcacatgttggaccttatgtggaacagcttgtgtaatgagtgctagcgtgaccaaccactaggaccgggttaatgttattgaggctgattggacaacacctgctgcaccaacgtcagcacttctggatgatcagatgcagtccttgctgcctggagtgtctcatgactgcccaatcgcttatatgaaaccccatagattgcgggaacgaaaacacaaaacctttaccatgcagcgaaatgagcctgtatattgagaagcactgtgccgttaacctaacctggtaccgactagaggtaactatctttacatgccaggcgttgaaccacattgtgctcgagcttacatcaggacatccactagctgaacgaggacctgtgagagagctgctggggcacacctccacagctcgatcttttgctcctactgaatcgagctgaggggaacaaggactgacttgattaaatgatggtagaccaaccgggtcgtcctcataatattactactgggagatctatggtgcgcagatatagggtgttcttactctcacatgccgca

SEQ ID NO: 39462 - DNA, 372 bp, Zea mays
  Clone ID: MRT4577_135991C.1
atgaaggcgctgagcgtgggcatcgggagggtcccacgtgtcgtgcacagagcgaggtggtacatcgggaggggtgttgtcccacctttaggcaagagtgccagaggtggaggcgtggagccaggagcgggtggtggagcgctggcatccgaagtaggaccaaacgacctcgaccttaaagacctcaacatcgtggtctctatagtgacccatacgccgaaggggatgggacattacgtcgtaccagacgtgcgcctacgcatgatgaaaggtgacgctaagggcatgatggaaggcgaagacatccctaagccatgtcatgagctgactcaacagaactcaccaagcactaccacgtctaaatcaaagtag

SEQ ID NO: 39463 - DNA, 264 bp, Zea mays
  Clone ID: MRT4577_135992C.1
aaaagagcatgacggatgcacctctagctggaattggtcggaggaattgcttgagagggcatgtattgtcttggaagactgcttgtttaccattgggggtcctggtatggtatttacaaacaaagttttctgggcccacgaatgcatagagagtaggaaattttatttatgtgccaactttgaactgacacttaagtagcatatgaatctcgtaggtattcactcaagcctgagaccttgatattttatttatgcccatagatt

SEQ ID NO: 39464 - DNA, 158 bp, Zea mays
  unsure (1)..(158): unsure at all n locations
  Clone ID: MRT4577_135993C.1
tatatttttttgttgaaactcacatgcatttggcaagtatcggcgncccgatgggcattcccacacctgaacatataaaacactgctcacagaaccccctctaccaagcaccttcaaatggtccagccaacacctttttgatgcattaacaatacaac

SEQ ID NO: 39465 - DNA, 165 bp, Zea mays
  Clone ID: MRT4577_135994C.1
ggtagctagcttgctactactgtagtaggtaaagcctgcggcgcttgagcgagcaggaagacaaaggcaagcatggtcgggggtggcttagtcgtggccgatggcccgtccgttgacttctgcgtcctgattaccttttttgtcagttttaccttgccttatggt

SEQ ID NO: 39466 - DNA, 354 bp, Zea mays
  unsure (1)..(354): unsure at all n locations
  Clone ID: MRT4577_135995C.1
cccaaacgncgcagctgtcttctgcaccttccttttcggctatggcccttgcagtggaggcggggctgcaaccatgtctaacagagaggtgcccactgacctttgtaggtatgcggccctgctctacttctggaagaaccgtccacctcaagatacctgatctacacgcttggagacagttgaccagcctgccctcgttaggtttgataaggggggggcgaggggaacaagtgttccttcggtgcccatgggtgctctgcttgctgagggctgggcgggggacaggtgtcgccgttgctgtgcgtctggggcagtggtggtgccaacgactgcttctgctcgggcgttggtgcc

SEQ ID NO: 39467 - DNA, 639 bp, Zea mays
  Clone ID: MRT4577_135996C.1
cgctccgaaaaaaaaaaaaaaaaaaaaaaaaaaaaaaaaaaaaaaaaaaaaaaaaaaaaaaaaaaaaaaaaaaaaaaaaaaaaaaaaaaattaaaaaaaaaaaaaatgggaaagatttagtgttttttatagtgttacccattttctggtcccctgtgccgacgttttttctagggcgtgctggggggcaacccctggggctggccccgcctcgggggcctccccggcgtttccccctttttgccacctgggtgtttttgcctcgttggcccgcccccgttcgcccctccccaacggtctgggccagctttgacctggcccctgggcctttgccctttttttttgccccctttttgctcgggcctttgttttggccccctggccgcggggccggttcccctggccccgcgcccgtgtcgcccggctcctttccccttcctcccctcccctttcctcttcccccctcgccgtggtttccctttttgggctcttttttcgggggtttttcctttggggttccccctttcggggctctcccttggcgttttcccttttaggtgtttttttggggtctttggtttcccgctttttgggcccctggcccttgtttttacggttttgggcccctttgcccgtttt

SEQ ID NO: 39468 - DNA, 540 bp, Zea mays
  Clone ID: MRT4577_135997C.1
gtactattaactaggttggtacttgtacactctagaatgggtcacgggcaccggagcacaaataaccgaagaggttaatgacccctgcgagccattggtccaccgcatcattgttacatgactcctgcgctataatgatgatactgtgtgaactgaggccatgtctaaaacgcttgcaaatgacatatatctatacgtgcccggatcaccacattggtcaaacatgcctgataaatgcacatgactgcgctaactcatgattagtgaagaagttgtgcatatacgagctgaatgtggaatatcaactcataacacatagatacttagcatcaatcaatgcttataagacatgcgttataaataagattgaccaagatctgaacaatcaaaggaattgagagaactgaaactaactacgaattggtcttttctattaaggagaagactcaaaataaccacaaactaactgactcagtacaccaggtgatggcttgctaaataaaagcatctggggttctttaattgaacttgggtatatgt

SEQ ID NO: 39469 - DNA, 2945 bp, Zea mays
  Clone ID: MRT4577_135998C.1
aattcggcacgaggaaaaagttcaaaaaaaccaatctcactccctccctccaccgccactgccccaccctcccctaccccaatcccctcttccccattcaccagatcgagcgccgcgtgcctagggtttgcgcccccgccggtagcgatgcccccgtcctccgtctcggggggcagcggccccggaggcgtctccccggacgccatcatcgagtggctgcaggacgagatggggtacccctcggcccctcctgcaccggagcagctccgcaagatctgccggggcaacatgatccccgtctggtccttcctgctccgacgcgtccgctccgagcgaaccgtcgccaccgcgcgccgcaatatcctcgtccacggcgtcgcggcccggcgggcgcgggagggcggagcgatgggggcgggcgcgggtgacgctgcggccagggaggccgaggcgagggagcgggacctcgccgctgaggaggccgagcggttgcgtgggatcgtgaggaggcagcgcaaggagcttcgcgcgcgcatcgcggaggtcgccagggaggaggcggagcgcaagcgcgtcctcggtgagcgctccaatgccaggcacaagcaagttatgctccaagcatatgaacagcaatgcgatgaagcgcacaaaatatttgctgaataccagcgccggctacatcagttcgttaaccaagcaagggacgtgcgaagatcaagtataggcgtggctggagctacaggtgctcttgtggatatgcaattgcagagtgatagagatgatctttacccatcgactatcaatagcaattgattgccaggggattttttagaaactacaggctaaagggtcacttggatcggatgtgaattccattctgcggatttgaattaggctcaaccaagcacttttggtgttgtgcattggttggatatgggttgtttgtgtgttgtcaatgcacatatgcgtgttattgttttggttaatgaaatacgaacatagttttagcttgtagcattggagtacctgaatgttccatccctgcttctgcagtcaatcattacctacacatcacgcatgaaaacacttatacatagagaaactgacaagattgacatacgcgctgatgcagaactactgaggtataaatatgaaaatgagcaggttattgatgctgcttcaactgatgcaagctcacccttaccatatcaggtgtatggaaatgggaagactggatcacaattgtcaactcgaggaacatatgatcagctactcgaaagacagaaagagcatgtacaacagtttttggcaacagaagatgctttgaacaaagctgcagaagctaaagcactaagtcagaagctattgcaacgcttgtatggcactgctgacatggcagcaaataaaaaaccgcgcactgggatcccgccacagaatgtgaccaactgtaggctgtgagtgttggacgcgtgagccaaggaaagagaagttgcaggactaaaggccagcttgagtacacttacttctgaggtacatcgtttgtataagttatgcgctgagtggaaggaagcagaagattcactgaagaagaaatggaagaaaatcgaagaatttgacgcccgtcgaacagagctggagtgcatttacagtgctcttcagcgggccaatatggatgcatcatcattttgggagcaacagccattatcagctagaggatatgcatcaagtacaattatccctgcgtgccatactgtggtagacatgtctacgaactcaagggacctcatagagcgagagttagctgcatttagccagagcttggataatagcttgtgcaggttgccagcaacccctcaggcccttttggaggctgtgggttctaacggcgtgacaggatcagaagcacttgcagctgcagagaaacatgcagctttgttgactgcaagagctggtgccagagatccatctgctgtgccgtctatatgccgcatctctgctgctcttcagtataactttgttcaccaggtacagaaggcacagattctggcttggcttcagtattaaattcactggagttctgcctaaaaccatgtgggtctgaagctagcatattagaggatttatcaaaatctatcaacttggtgcacacacggagaaatcttgttgagaatgaccgtgttttgctgaaccgtgcacatcgtgctcaacaagaatatgaaaggttgatgagtggtacgagcagccagccgccacaattgtggattgggtaacgatagatggacagagcgttggtgcctggatcaacctcgtgaagcaactccacatggagatctccagacggacgttggccatgtcatcggtatgagacgactgaagcaaccagccgtgacctgcggctttggaagttcggaggctcctttatgggttcggtttggcgcaagatatcttctatctactcgatagccttttcccattgtagtttatacgtctctctctggtttggtctgtaattagttcctaacatgttccttttgtatgttgtcaattgtcatgtgctggttgtcatttggctcaaacgatcagtgttggtgttgtgcctttgctgatttgggttgtttgtatgttgtcaatggtcatgtgcgtgttgtcatttggctcgcgcctcccctttgagtgttcaagcagtccgtgaattatctcagttatataatgacggcacgtaatgctaagggtaactgtgatggtgggttttagcaccattatgggcgctcctatagacactaaaagttttagcagtgtctcaggcgccgccagtaaggttgtcgcttccacccaaaaaatgggaaggagcccattcgctggcacaagtgtcacatctctaacttgctctcctaaagcttgtttttattccgtccagtttatacactaaacacttcgagtgt

SEQ ID NO: 39470 - DNA, 506 bp, Zea mays
  unsure (1)..(506): unsure at all n locations
  Clone ID: MRT4577_135999C.1
cgctgtgtttaaacttctccaaaaaaatctgctgctgatcagcaggactgaagctctatacgagaccgggtgcatgcagtgatactattgttccatgggctgtcactgcagcagtactattgtgcccatatgcttngagtgaacaagtagcattgaaccagggatacagatggggaaaccaccatagaggcagttatattattttaacaatgaaatcacctatcctttatattcattactcttccgatttggggtgtgacataccttgatgtgctcatgataagccgaagggcgtgataaatattggactgatctgatatatgctgactttctttggaaagggagtggacacctctacaatggaaacgatcctaaagggcgacgaagactaggactatttctaccaccacgcaatgctgactggtgataatccttgaaaagggctaacttgtaccttgacaaacgccaaaaagaactggttccaaacactgaatgagtccatgaaa

SEQ ID NO: 39471 - DNA, 1430 bp, Zea mays
  Clone ID: MRT4577_13599C.1
aattcggcttcgtcaagtgagagtgagacccgcgttcttcttcctcggctcttccacgcattcagaacagggaggatcggatcggagctacgatggagcaggtcgtgaacacggtgatggacctggtgatgccgccggcgagcatggtgatgctggcgttcgcgtggccgacgctgtcgttcctgcgcggcgtcgagtgggcgctcaagaccctcacgaaggaggacatgctcggcaaggtcgtcgtcatcaccggcgcatcctccgcaatcggcgagcaaatcgcgtacgagtacgcgcggcggaacgcgaacctggtgctggtggcgcggcgggagcagcggctgttcgcgatccgcgacaacgcgcggctgctgggcgccggccacgtcctcgtcatcgccgccgacgtcgtcaaggaggacgactgccggaggctcgtcgccgacaccgtcagctacttcgggcagctgaaccatctggtgaacaccgtgagcttgggccacgacttcagcttcgaggaggccggcgacaccacggccttccctcacctcatggacatcaacttctggggcaacgtgtacccgacgcacgctgcgctgccctacctccggcggagccacggccgcgtcgtcgtcaacgcgtccgtcgagagctggctgcccatgcccaggatgagcctctactctgcggcgaaggcggcggtggtggacttctacgagacgctccggtacgaggtgaaggaggaggtgggcgtgaccgtggcgacgcacggctgggtcggcggcgacgccggcggcagcaagttcacgctggaccagcaccaggaaggcgcggcggcggatcaggtgcagtggaagcagcagggagagcgcgagccggcggcggcgacgctgctgggagggcacgtggaggcgtacgcgcgggcgctggtggccggcgcctgccgcggcgacgcctacgtgaagcgccccagctggtacgacgtcttcctcgtcttccgcgtcttcgcgcccgacgtcctcgcctggaccttccgcctcctgctgtcgacgtccacgcccgcgcccgccggccccagcgcaatcgccgcgcgtcgcccgcctcccgccgcgctgcctgccccgccgctccgcccgctgctcgagtacccgccggcagcggtgtaccggggccccgcccacgcccagcaggtggtgcagaagctggaatgagacagcgcatgctgcgtgcggtcgagacagagctttcatcatctttacgttactgctgtgatgatcgatgcgacgagtgatctctgatgatgtccttgcatctgcatatatgcatgtcgacgacgccattgtgccgaagtatatatgaactggttttggcgggtgtgtttgaataaatttgatcatctagtatcagtaaattgttttttatttgtt

SEQ ID NO: 39472 - DNA, 385 bp, Zea mays
  Clone ID: MRT4577_1359C.1
taaaaaaaaaaaaaaaaaaaaaaacaaaaaaaaaaaaaaaaataaaaaaaaaaaaaaaaaaaaaaaaaaaaaaaaaaccaaaaaaaaaaaaaaagaaaaaaaaaaaggtttgtccttggggcggaacccccctgctttttaaacctgggccggaacccccctaggggggatttttgcagatttccttcacatggggggccgttcgaccttccttttagggggcccatttggccctttgggggggggtttaaaatttaatgggccggggtttaacaaggtggggaggggaaaaacctggggtttccccaatttaatcgcttgggagcaaatccccttttccccagttgggttattacaaaaagggccccccccatccgcctttcca

SEQ ID NO: 39473 - DNA, 364 bp, Zea mays
  Clone ID: MRT4577_135C.1
cggactcgtgggctgacgcgtgggaaacaatttaaaaattaacataaaacaaaaaaaccatgaataattcgataaaactaatcaaaaatataatataaccgcatcaaaccaattcatgcttaaaatcccattgcatcttgctttaaggtgtcctcctgtctatcaccctctatctttttctagtccttttcttcatttccaactctgtatcttcctccataatccttcttgttgctcatcctttttaatcctttctgctctttctctctccatctcctcctctactgtgatgcatctagcttttaacctctgtttttattagtaacttgcttttgcctcccatccttcatccttttattatatt

SEQ ID NO: 39474 - DNA, 567 bp, Zea mays
  Clone ID: MRT4577_136000C.1
aaattagctggcgaacaagaaaagctggtgagtgaaagatggcttccggagctgagaaatgcagttcaagaagctcggaggtgttttgatgactgccagcgtgttaggggcttggttgatgagtggtacgagcagccagcagccacaattgtcgattgggtaacgatagatggacagagcgtgggtgcctggatcaacctcgtgaagcaactccacatggagatctccagacggacgctggcaatgtcatctgtaggagacgactgaagcaaccagctgtgacccagctgtggctttggatgttcggaggctccgtgtgatgggttcggtttggcaccaagatatcttctatctactcgatagccttttcccattgtagtttatacgcctctctctggtttggtttgtaattagttttttttgtatggtgtcaattgccatgtgttgaatttgtcatttgtcacaaattatcggtgttggtgttgtggctttgctgattgggctgcacgtcccgacgtgccgtcctgctgttagttgtacagggtcgcgcctcacacctgagtgttc

SEQ ID NO: 39475 - DNA, 642 bp, Zea mays
  unsure (1)..(642): unsure at all n locations
  Clone ID: MRT4577_136001C.1
gccggccgggctggggtagtactccgaaccccgggagagccaccacctaccagacagaggttggaagcgacggcgctgccggagatggagacggagacggaggcggcagcggcgaggcgggcgaaggagtctctggagctggctttccagatgtcccagatcctagacaccggcctcgaccgccacaccctgtcgctgctcatggcgctttgcgaccgcggagccaaccccgaggcattggccgccctcgtccgcgagctctcctctgctgctcccccaacctccgccgcggcttcctcccccgtgctgctaaaaagtctgaatggaactggtgtagttttccaagcaagacaagatctcgctgctggaatcgctggatgaaaaggattgcctttacaattccatgtgcgcgctgctgtggtggtgtggttcgaccacaaaacatgtggctgggttcatagagccacagaaatacacgcgcggngcatccgcacccctctcacgacttcttgggtttaaaacagctgtataatcttgtggattgaggagtcattgtctcttgacgcccatgattggacatttggatcagttccacgcctgatccttcgttaaattaaaaaaaaaaaaaaaaaaaggccccta

SEQ ID NO: 39476 - DNA, 504 bp, Zea mays
  Clone ID: MRT4577_136002C.1
gtttagaggcagcgcaaggagcttcgcgcgcgcatcgcggaggtcgccagggaggaggcggagcgcaagcgcgtcctcggtgagcgctccaatgccaggcacaaacaagttatgctccaagcatatgaacagcaatgcgatgaagcacacaaaatatttgctgaataccagcgccggctacatcagttcgttaaccaagcaagggacgtgcgaagatcaagtataggcgtggctggagctacaggtgctcttgtggatatgcaattgcagagtgatagagatgatctttacccatcgactatcaaaagcaatagattgccagaggatcttttagaaactgcaggtgaaaggagcattcggaaggcatgtgaaactcttgctgcggatatgattgaaacaattcgaagttcattcccggcatttgaagggtgtggcattaattcaagttgccaattagatgcaaaaaagctgggtattgacttgggtggtgaaataccaacatat

SEQ ID NO: 39477 - DNA, 839 bp, Zea mays
  Clone ID: MRT4577_136003C.1
agacactaaacgtagccactggcatgtggggccaggcctttccattcctagtactcgaacccggtagagccaccacctaccagacagaggctggaagcgacggcgctgccggagatggagacggagacggaggcggcagcggcgaggcgggcgaaggagtctctggagctggctttccagatgtcccagatcctagacaccggcctcgaccgccacaccctgtcgctgctcatggcgctctgcgaccgcggagccaaccccgaggcattggccgccctcgtccgcgagctctcctctgctgctcccccaacctccgccgcggcttcctcccccgtgagcaacggcgccgcggggccggcctcggcaattgcgcccacgttctcctccggccttcgccgtccctagggtgctgctaaaaagtctgaatggaaccggtgtagttttccaagcaagacaagatctcgctgctggaatcgctggatgaaaaggattgcctttacaattccatgtgcgcgctgctgtggtggtgtggttcgaccacaaaacatgtggctgggttcatagagccacagaaatacacgcgcggcgcatccgcacccctctcacgacttcttgggtttaaaacagctgtatgcctgtataatcttgtggattgaggagtcattgtctcttgacgcccatgattggacatttggacagttgcttgtatcagttccacgcctggtccttcgttaaattattctcgctttgacgccacagccttttgcactggcatgtgcttatcctctgagggaacgtgccatgtctacctttcctgcagtgacttctttattatctct

SEQ ID NO: 39478 - DNA, 107 bp, Zea mays
  Clone ID: MRT4577_136004C.1
atcatttcagtgcagctgacgatcgattgacgctgctacctccaaatgcccatcctgaagatgagcttattgttgcgaactagtctagcctctgtgatgagtgggtg

SEQ ID NO: 39479 - DNA, 1193 bp, Zea mays
  Clone ID: MRT4577_136005C.1
cccagcgtccggcaacagccattatcagctagaggatatgcatcaactacaattatccctgcgtgccatgctgtggtagacatgtctacgaactcaagggacctcatagagcgagagttagctgcatttagccagagcttggataatagcttgtgcaggttgccagcaacccctcaggcccttttggaggctgtgggttctaacggcgtgacaggatcagaagcacttgcagctgctgagaaacatgcagctttgttgactgcaagagctggtgccagagatccatctgctgtgccgtctatatgccgcatctctgctgctcttcagtataactttgttcaccaggtacagaaggcacagattctggcttggcttcagtattaaattcactggagttctgcctaaaaccatgtgggtctgaagctagcatattagaggatttatcaaaatctatcaacttggtgcacacacggagaaatcttgttgagaatgaccgtgttttgctgaaccgtgcacatcgtgctcaacaagaatatgaaagagtggccaactattgtcttaaattagctggcgaacaagaaaaaggccccgggtgaaagatggcttccggaactgagaaatgcagttcaagaagctcgaaggtgttttgatgactgccagcgtgttaggggtctggttgatgagtggtacgagcagccagccgccacaattgtggattgggtaacgatagatggacagagcgttggtgcctggatcaacctcgtgaagcaactccacatggagatctccagacggacgttggccatgtcatcggtaggagacgactgaagcaaccagccgtgacctgcggctttggaagttcggaggctcctttatgggttcggtttggcgccaagatatcttctatctactcgatagccttttcccattgtagtttatacgtctctctctctggtttggtctgtaattagttcctaacatgttccttttgtatgttgtcaattgtcatgtgctggttgtcacttggctcaaacgatcagtgttggtgttgtgcctttgctgatttgggttgtttgtatgttgtcaatggtcatggtgcgtgttgtcatttggctcaaacgatcagggttggtgttgtggctttgatgatttgcgcacatgtgtgttcaatcagtccgggaattgtttcagtt

SEQ ID NO: 39480 - DNA, 1605 bp, Zea mays
  Clone ID: MRT4577_136006C.1
ggtaccggtaccgccattcccggggcggcggcgattgagcggcagctggagcagcagctgcaggagcagcggtcctccctcgccgcggtcgaagaggccctcgccgccgacccctccaacgccgacctcctcgaggttcatgaggagcttcttgctgcgattaaggatgccgaggagggtcttctccatttgaagcgctctaggctactgaagcaagtagatgagatctttccagatagggaatcaatgtcccaatcacccgaagttgctagtgagtcattagatccagatgatgttgagccagaaccactggagtcacatgatttttcagttggatcaaagtgtagattccggcacaacaatgggcgctggtataatggatgcattataggctttgaaggttcaggcgatgcaaggatctcatttctgacacctacatctgaaaatatgtcggtattgtaatgccttctaaagccttgaagcgattcactccaactaggtgggagcagtccttggtaggctccagcatactggcaacttctgggtataactctggcctttggaggagagcagagcttgagtcatgggatgataatctgaagattggccaaattgtttttcaagatgatgggagttctgcgagtctgccaagtgattctctttctgtctcggaatacgctcacatgagtgacgaagatgaaggaagcttaagtgacgaagaatctgagttcagtgacgatgctgatcaagaggacggaagtgttcatcagggtcttggccttttagaattcacaaattttagtggcattcagacagataccatgatcttcgcaaaatgggagcaccacaccaggggtgttgcctccaaaatgatggcaaaaatgggttaccgagaggggatggggcttggtgtgtctggccaaggcatgcttgatccaattccagttaaggtactacccccaaagcaatcacttgatcatgcacttgcttcaagcgaggctgacggaggcagtgggaaaaagcgcagtaggggtgggaaaaggaagcgtgagaagaagtttgcagaactggccagggctgctaaagctgaagaagctgagagatctgtctttaattttatcaacagccatctagtaagccaagaaggttcgaccaccaaggttagaaagggttcatcagttgagaccaatggactcgctaagaaggaggacagaagatccttggttgcatacggtgaggaagtgaaggagctgaggattcgagttgagaaactggaagagatgaagaaccgtaactgcaaagacaaggcattctttgaagcagcttcaaggaaactggaagagactcggaaggcactcgctgatgctgaagctacccacgcttcagcgacgagtgcagttactagaaaggagaaagagaagaaatggttgaaattctgatgtcaatttcatgtgtgccaacgcttctctgtctgtgttctgacaagaacgtggcgtgatgtatgcaacttacaattgttccccatgtcagctcttagcctgctacacttgtatgtctatcaagttttagatctgttgtagaagcagtaacactaataattattcg

SEQ ID NO: 39481 - DNA, 1459 bp, Zea mays
  Clone ID: MRT4577_136007C.1
ctctcacgcaccccaatgtctgacaagaaggacgacgaggccggcacctcaacgccgtgtgttgcggcggcggcggccccggccccgaggccatccacctacgcgcccatgggcgcgctgcgggacgaggagtgcgctaatctcctggccctggtatccaccgtctcgcgcccgctcgaggacgccgtcgcggatttcctcgcacgcgtgccccccgatcgccgcctccggttcggcacctccatcagcttcgtcctcgaggacaagatgatgcttcaacctgctgagcgtttagttgcatttgcaattctacatcaaggctgcatgtgatgaaacttctgaggaagcagaacaagcatttctccaacttctgttaagttcgactaatggggacaacattgaggttctaaagcagtctgctgtcgcttacttgaacggatctgattatgcatctcaggtctttttgccaagagaacagcttgagaaacaatgttcctatgatgctgcacgacctctgcccttctctagtaatttcagagatgccactgtcagaagtactattcctgacccagatgttctccaaagctttggtagttcatcagagctgtcctcaataataccaaatagagatgacatggttgctactttacttcaacaaacatcacttaaaggattgcctcctcaatggatacgaccctctccaccaagacttgaaatttttgaaggggaattacagtggctgaacatagacaataaccatgagctactatgggacagtaccatgtgtgcagacactagccgaggtgctgtgattcgagatctggtcgaacaagcttgtaaagctccacttgcattggcccagcatgaggaaattaccaaatatctgcggaaggactggaagctagtttatcattgtggaatgacaccacagaagctccctgatcttgttgaacataatccacatatagctgttgaagttctttcaaagctaatcaactctccggacatggatgcgtactttgatgctattgttcatatggatatgagcttgcattcaatggaagtagtaaatcggctcactactgcagtagttttaccaccaggatttgttcatgactatatctcaaactgtattcgatcatgtgaagacattaaggacaagtatatgcaaaatagactagtgagactagtatgtgtttttctacagagcctcattcggaacaggataatagatgtgcaagatctcttcgtggaggtgcaagcattttgcatcgccttctcgcgaataagggaggcagtggggttgttcaggctcctgaaatctctagaatgaagagcgctgcaccatcagctgggcgctggattctcagaacagaaattcccaaggtgtacatccatggctctgccttttgcttccaagctgctgaccctgcataggtctggactctgtagggcgtgg

SEQ ID NO: 39482 - DNA, 768 bp, Zea mays
  Clone ID: MRT4577_136008C.1
gccggccgttccgggactacctctcatgaccctgtttctcctacccacaaaaatagccttgtctccaaaaccaagtcggaaaagacaccttcgacgtgcaatgcgcctcatgggccccaaagctcaggcctgcggaggcgcacttccacacgcatctgctgtccgagcaacatccagcagatcaccctcacgacaacccgctggctgacaagaaccagagcccctgaatatcatctgcttcgctcatatacacataaacccgccctgcccctacaagaccgttatcctcaactgcatccaatatatctgcacccactcctatcacatgcatcgcccaagcgcattctacatggagacccgctactcgcacaaggacctattacgcaacatctacggctacaaaggctaggctagactgctctacagattcgtgcactgcgtagggaaaatgtccccctgcaatgctttctgtgctatcatatagatgacactagctgtatcttccatcacttctgcaatgaagcgctttgaaacgtccctaggatcgcgtgccttctagaaatatgtatttccccagtatgcgtgattctacctcaatcttatagatacaagctacctcgcagcaaaaaccaaaacccaaatcgccctatagtcaggcgcattctagaactcagtgtcccccggtttacacgaattcgatgcaaaatcctgataccacccaactcaatgccgttgccgacacccccctttcctcatatgagtaatatt

SEQ ID NO: 39483 - DNA, 1907 bp, Zea mays
  Clone ID: MRT4577_136009C.1
cctcgaggccggccgagctcacctcaccttccatcacggattcacggtcacggtcgaggaggaagaaacggtaccgcgcccgcggcgagagcctgggaggctgggaggaggaagaaccctctcgactcgattcttcgcccatcgcctcgccgccccgatccagttggtggcctatggcgggcgagggcgaggacgaggcggcggccattgagcggcagctggagcagcagctgcaggagcagcggtcctccctcgccgcggtcgacgaggccctcgccgccgacccctccaacgccgacctcctcgaggttcatgaggagcttcttgctgcgattaaggatgccgaggagggtcttctccatttgaagcgctctaggctactgaagcaagtagatgagatctttccagataaggaatcaatatcccaatcacccgaagttgctattgagtcattagatccagatgatgttgagccagaaccactggagtcacatgatttttcagttggatcaaagtgtagattccggcacaacaatgggcgctggtataatggatgcattataggctttgaaggttcaggcgatgcaaggatctcatttctgacacctacatctgaaaatatgtcgatatgcaagttcttcctacagcagcgatgtcgatttggtagtaactgccgcatgtctcatggtattgtaatgccttctaaagccttgaagcgattcactccaactaggtgggagcagtccttggtaggctccagcatactggcaacttctgggtataactctggcctttggaggagagcagagcttgagtcatgggatgataatctgaagattggccaagttgtttttcaagatgatgggagttctgcgagtctgccaagtgattctctttctgtctcggaatacgctgacatgagtgacgaagatgaaggaagcttaagtgacgaagaatctgagttcagtgacgatgctgatcaagaggacggaagtgttcatcagggtcttggccttttagaattcacaaattttagtggcattcagacagataccatgatcttcgcaaaatgggagcaccacaccaggggtgttgcctccaaaatgatggcaaaaatgggttaccgagaggggatggggcttggtgtgtctggccaaggcatgcttgatccaattccagttaaggtactacccccaaagcaatcacttgatcatgcacttgcttcaagcgaggctgacggaggcagtgggaaaaagcgcagtaggggtgggaaaaggaagcgtgagaagaagtttgcagaacaggccagggctgctaaagctgaagaagctgagagatctgtctttaattttatcaacagccatctagtaagccaagaaggttcgaccaccaaagttagaaagggttcatcagttgagaccaatggactcgctaagaaggaagacagaagatccttggttgcatacggtgaggaagtgaaggagctgaggattcgagttgagaaactggaagagatgaagaaccgtaactgcaaagacaaggcattctttgaagcagcttcaaggaaactggaagagactcggaaggcactcgctgatgctgaagctacccacgcttcagcgacgagtgcagttactagaaaggagaaagagaagaaatggttgaaattctgatgtcaatttcatgtgtgccaacgcttctctgtctgtgttctgacaagaacgtggcatgatgtatgcaacttacaattgttccccatgtcagctcttagccttctacacttgtatgtctatcaagttttagatctgttgtagaagcagtaacactaataattattcgaaggatgtggtatttagatgagttttcggctaaaaaaaaaaaaaaaaaagcggccgaaccgccgtatt

SEQ ID NO: 39484 - DNA, 704 bp, Zea mays
  Clone ID: MRT4577_13600C.1
acacagacgatattcacaattatcattaaaaagtgttcattgaaaaacagacgcataccaggtaaaagatgtctcgagtgacacaagtacctaagctagagcagcaggtaccacgtacgcagttgcctgcaagaagtggccaaagcgtgccacctcctagtcctggcccgacgtgcgcatggcggcacggcagccacgcccaccgcacgcagctgcccgccaccgccctctgtgcttatccccggccgttccgttccagagtcgacagaagcacaattcggcttcgtcaagtgagagtgagacccgcgttcttcttcctcggctcttccacgcattcagaacagggaggatcggatcggagctacgatggagcaggtcgtgaacacggtgatggacctggtgatgccgccggcgagcatggtgatgctggcgttcgcgtggccgacgctgtcgttcctgcgcggcgtcgagtgggcgctcaagaccctcacgaaggaggacatgctcggcaaggtcgtcgtcatcaccggcgcatcctccgcaatcggcgaggtacgtatcgtcgtgtcctggtgctggtggcgcggcgggagcagcggctgttcgcgatccgcgacaacgcgcggctgctgggcgccggccacgtcctcgtcatcgccgccgacgtcgtcaaggaggacgactgccggaggctcgtcgccgac

SEQ ID NO: 39485 - DNA, 618 bp, Zea mays
  Clone ID: MRT4577_136010C.1
ctgcgatacgttcccatttacccattgccatctctagctggaagcaacggtgccgccggagatggagacggaaaaggaggcggcagcggcgaggcaggcgaaggagtccctggagctggcgttccagatgtcccagatcctcgaaaccggcctcgaccgccacaccctgtcgctgctcatggcgctctgcgaccgcggcgccaaccccgaggccctggccgccctcgtccgcgagctctcctccgctgctcccccaaccgccgccgaggctccctcccccgtgagcaacgccgccgcggggccggccccggcaacagcgtccatgttctcctccggccttcgccgtccctagggtttgtgatgtcccttttttcgccggtctgatgcccgttcccttccgttacaattccaaactgtgccgctaaaggcctaaagtctggatggaaccggtgtagttttggaagcgacagcagatctcgctgctggaaccgctggatgaaaaggattgcctttacaattccacgtgcgttgctgtgggtgttgtttcgacaggtatccacgtgcgttgccttcgcaggacttgtgccggtcagcagctgtatataatcctgatgatgg

SEQ ID NO: 39486 - DNA, 790 bp, Zea mays
  Clone ID: MRT4577_136011C.1
ggaccctcgaggctgccggacggggggatccagaaaagcccgggtccactgctcctctcgtactcaacaaccctcacaccccccatggatcccatgttcagtagcgagtggagtgtctccgagatcaagatggcaaaatcactcatcgctagccgcaacaccagcagcaacttagctagcgacgacgacgcaagcaacaagaagcacagcgacatcgtggacgagctccaagcaaggttcccatggaagggcaagcacgaggtaattggcttgtatgttgacctcacgatggagatgataaatacaccgcctgaggtgggagatgacggacttgtgttggacgacgacaattttgggatgccagtggaggaacaaccacagatgaaatacactgggaggttttggaccagggaggagcacaggaatttcctccgtggcctgaacatgtatggtcgtggtaactggatgtacatctctagggacttcgtccccactaagacgccaatgcagatctatagccatgcacagaagttcttccgtaggtaggagcgcacctgcagctggaagcaacgccatgatatcaaatgatattggcctctatgatatgctgagccctagacaaataacggctcttagtttatctcaagatattgtccattatactataaagatatccttcctcggcagtggacggacatcaataacatgtactagttgttatttgtcgtttagtttatcctaagatgcatagggacatatatcccattgaaggacatatatatatagttgc

SEQ ID NO: 39487 - DNA, 1048 bp, Zea mays
  Clone ID: MRT4577_136012C.1
gccccgtccgaggtgacatagcctggagaagtcgacgcctcgtaacccctgcctcccacgcaccccaatgtctgacaagaaggacgacgaggccggcacctcaacgccgagtgttgcggcggcggcggccccggccccggccccgaggccatccacctacgcgcccatgggcgcgctgcgggacgaggagtgcgctaatctcctggccctggtatccaccgtctcgcgcccgctcgaggacgccgtcgcggatttcctcgcacgcgtgccccccgatcgccgcctccggttcggcacctccatcagcttcgtcctcgaggacaagatgatgcttcaacctgctgagcgtttagttgcatttgcaattctacatcaaggttattcctcacagttggcaaatccatttcttcctcttttaataaatgctgcatgtgatgaaacttctgaggaagcagaacaagcatttctccaacttctgttaagttcgactaatggggacaacattgaggttctaaagcagtctgctgtcgcttacttgaacggatctgattatgcatctcaggtctttttgccaagagaacagcttgagaaacaatgttcctatgatgctgcacgacctctgcccttctctagtaatttcagagatgccactgtcagaagtactattcctgacccagatgttctccaaagctttggtagttcatcagagctgtcctcaataataccaaatagagatgacatggttgctactttacttcaacaaacatcacttaaaggattgcctcctcaatggatacgaccctctccaccaagacttgaaatttttgaaggggaattacagtggctgaacatagacaataaccatgagctactatgggacagtaccatgtgtgcagacactagccgaggtgctgtgattcgagatctggtcgaacaagcttgtaaagctccacttgcattggcccacatgaggaaatttagtaatgcctcctaaaggactattcgtcagtttatcatacagcaatgacaccacagaagctccctgatc

SEQ ID NO: 39488 - DNA, 466 bp, Zea mays
  Clone ID: MRT4577_136013C.1
ctcgagccggcgggactacatgcagaggctggaagcgacggcgctgcctgacgatggagacggagacggaggcggcagcggcgaggcgggcgaaggagtctctggagctggctttccagatgtcccagatcctcgacaccggcctcgaccgccacaccctgtcgctgctcatggcgctctgcgaccgcggcgccaaccccgaggcattggcagccctcgtccgcgagctctcctctgctgctcccccaacctccgccgcggcttcctctaccgtgagcaacggcgccgcgggaccggcctcggcaattgcgcccacgttctcctccggccttcgccgtccctagggtttgtaatatccctctgttcccacgatgagactacttgtcggttagccaactagatcccgcactatgcacttaactgttgtgaacgcctgagtacgaaaaaaaaaaaaaaaaaagcggcc

SEQ ID NO: 39489 - DNA, 1500 bp, Zea mays
  Clone ID: MRT4577_136014C.1
aggatacttatacgagagcagagccaccacctacgagagctctagctggaagcaacggtgccgccggagatggagacggaaaaggaggcggcagcggcgaggcaggcgaaggagtccctggagctggcgttccagatgtcccagatcctcgaaaccggcctcgaccgccacaccctgtcgctgctcatggcgctctgcgaccgcggcgccaaccccgaggccctggccgccctcgtccgcgagctctcctccgctgctcccccaaccgccgccgaggctccctcccccgtgagcaacgccgccgcggggccggccccggcaacagcgtccatgttctcctccggccttcgccgtccctagggtttgtgatgtcccttttttcgccggtgagactgcttgccagttagtcgactagatcccgcagtatgcactcagccgctgtgagtgcctgaatgtagtatgttcttatgttttgactaaatttgtgcctcacaagaagataatggttcaaccaaatgccatatatcacgttactgcgtagttgtgctgctacctgcatttggcatcaagattcacattataatgtctatgtttgtgttataccaaaaaaaaaaaaaaaaaaaaaaaaaaaaaaacatggatatgagcttgcattcaatggaagtagtaaatcggctcactactgcagtagttttaccaccaggatttgttcatgactatatctcaaactgtattcgatcatgtgaagacattaaggacaagtatatgcaaaatagactagtgagactagtatgtgtttttctacagagcctcattcggaacaggataatagatgtgcaagatctcttcgtggaggtgcaagcattttgcatcgccttctcgcgaataagggaggcagtggggttgttcaggctcctgaaatctctagaatgaagagcgctgcaccatcagttgggcgctggattctcagaacagaaattcccaaggtgtacatccatggctctgccttttgcttccaagctgctgaccctgcataggtctggactctgtagggcgtggattttgctggtatattggttatcatcaagctgcgtcccctgcatcatccccgaaagacattgaggagaaacaaatccataggtctgacaggttgggttcgaggtagagttagttctgttggaagtgtccacggggcttgtcgttcttgtgcagtaggcaacaatggcaagccccgtagttgggttgctcgaaatgagcgaatggtacggtgaactcagaaataaccgggatagagtatccgactgtcagtcatacttgctctacggcatagtatatttattcattagcctcataaacggttgcttgctatttaggctgtcatacctgtatttcgaagttcattgttacatcatgcagatgtgagacagctattgcctggcataccgtatcatgtagtacgaaaaaaaaaaaaaaggcagcagggctgtatccagtggcttc

SEQ ID NO: 39490 - DNA, 333 bp, Zea mays
  Clone ID: MRT4577_136015C.1
cccgttcgacccagcgttctcggtcgcgtgggcaaagaagcccacctcaagctctccgaactggagttcgctgatgcttaaatggcccctatcctggagtgatccaaactgctgcctgtatggaatcatgtgcatctggagttagagtgaaccagcagattgtctcgtgtcttctatgtaataaatttgtcgctggtgagccctcaggctgttcttggaactttggctatggttgaacgggggggaccctttgcctatactctgatgctgtatgcaactgaaactagtagatctatgatcttatggctgcagtatgttcttgttactttgctt

SEQ ID NO: 39491 - DNA, 375 bp, Zea mays
  unsure (1)..(375): unsure at all n locations
  Clone ID: MRT4577_136016C.1
gagctctttatccggcggccggccgnnctttttttttttttttctttttcagattatttttttgcttcttttccgagcaagtttcatttttttatctcgcatcacacatagtttttaaaccccccaccaaaagaaacccctgtgtttaaggacataaaaatcagggggttcaccaaaacatggaaagaaatggcccgcgtggttttatcgcgctattcttaaaaaatacctcaacagcaaagggtctttaaagagggtttttataacaaaaaactaccccccccgggtgcgctccggtatgaaaaatggccagcccctcttagagaaccccccacagtggaatttgccatactggcgggctccggaaggggggga

SEQ ID NO: 39492 - DNA, 470 bp, Zea mays
  Clone ID: MRT4577_136017C.1
ggtgggtaacccgggggggggccggggggggcaggggccgaaggggggggggggggggggggggagcagccccaaaggccccccagggggggacgacaaagggcacgactccaaaacacctggaaagaaagggggggcgaccggcaggacggagaccggaaaacaagggccagcaacagagagctccaccaaagggggcccccaatggggggtcttccggcaggggatgagggggggggcggcaccccaggcgggggggaaatccggaacggggactaagaagacgccggttttggcgggggccagacctccagggggggagtcaacagggccccggggcacaaagcaactgcaaacctccgggggaaaaaaccgggggaacaagcggaggccgacacagtggagcacaaacagccaccccccgggggggttgagggcgcccccgagggggaccccagccgcctccgggg

SEQ ID NO: 39493 - DNA, 386 bp, Zea mays
  Clone ID: MRT4577_136018C.1
atatttttttttttcgagcccttctggagcggtcgggggtgcagatattggaggtagtagcaattattcaaatgagaacttcgaaggccgtttaggagattggtacgatgtgaaccgcacttgctcaatggacacccaaggctaatgcactcattgaaaccccgtagagagcgcgatcactctcgtcacatggacatggaataatttttagaaagacggagccgtttctcggcgaccgacgctttcttttggaagaccttagacgcccgcgcgtgacttgggaagaggtattttttatgatccacggttcaccaactttatacctggttgagcctaacggaaacttgaaccggaaggacaagcccgcacatggctcggttttcaac

SEQ ID NO: 39494 - DNA, 456 bp, Zea mays
  Clone ID: MRT4577_136019C.1
cttggccatggtgcatgtcaatcgccattgtttctttctttccttccccctctctttattctttctttcttgctgtccttttgagcgattgagtctgtgtatattgcatttgcatgatctgcacaccctccccccacccaccccagaaaaaggaaacaactgcagtgagagtgagctactggtgaacagaacagaacagaagcgcatgcatccatggtgtgtccgtctgcaaaataattaagtggtggcctcgcaaccgaaccgacgaaggatttttgccataaccatatatatgatatgttgttgtatgtatagtagtgcagcagtgtacatgaatcaaacaaagttctcaacgtacgtatttccttgtgctcccgtacgtatgtaatgtaaatgatgaatggtactatatatgaatctatgatggatggtccatccatcccgcattgtgcatgc

SEQ ID NO: 39495 - DNA, 1039 bp, Zea mays
  Clone ID: MRT4577_13601C.1
gcagtcaattcctctttaatttgtctgcatctgcatcccaatcctagctagccctgcttattctgacaaagctaacgaaggaaaacacacctgggctgatgggcgcagtgaaccatctggtgaacaccgtgagcttgggccacgacttcagcttcgaggaggccggcgacaccacggccttccctcacctcatggtatgcgcatcgcatgcatgtcatgccgtcgatcgtagaggaccagcgtgcccacgcatacataacgcagcaaatgcaacgcatgcataactatataatgcaggacatcaacttttggggcaacgtgtacccgacgcacgccgcgctgccctacctccggcggagccacggccgcgtcgtcgtcaacgcgtccgtcgagagctggctgcccatgcccaggatgagcctctactctgtacgatgacaagcctacttttttttttttgccccctcttgttgtctcaactctgaagaagaaagctgtttactgatggtgtggcacggcactgcaggcggcgaaggcggcggtggtggacttctacgagacgctccggtacgaggtgaaggaggaggtgggcgtgaccgtggcgacgcacggctgggtcggcggcgacgccggcggcagcaagttcacgctggaccagcagcagcagcaccaggaaggcgcggcggcggatcaggtgcagtggaagcagcagcagggagagcgcgaggcggcggcggcggcgctgcctgccccgccgctccgcccgctgctcgagtacccgccggcggcggtgtcccggggccccgcccacgcccagcaggtggtgcagaagctggaatgagagactgcgcatgctgcgtgcggtcgagacagagctttcatcatctctacgttactgctgtgatgatctctgatgatgtccttgcatctgcatatatgcatgtcgacgacgacgccattgtgcccaagtatatatgaactggttttggcgggtgtgtttgaataaataaatttgatcatctagtaaaaaaaaccaccc

SEQ ID NO: 39496 - DNA, 281 bp, Zea mays
  Clone ID: MRT4577_136020C.1
actcaatcacgatgggtttgctgcatatccctgcacttcatacaagtactttgagtctgacaagtgcttcccgtgtccagatcaaggttgcccacagatgggtcactatgctgataaatttgctggcaggacaagtgaagagcagcagaaattcttcttgaacacaggagaggctagcaatttcgctcgctggagatatggggtttccatcacactgtctggaagaacagccactggtcagatcaaagttgctttgtttggaaataagggaaacactcacc

SEQ ID NO: 39497 - DNA, 204 bp, Zea mays
  Clone ID: MRT4577_136021C.1
cggccacggcttcagacgggggttgtgtattttccgatttctctcactttacccccccccacagaggctcactgatcgctgctgagctcggattttctccctttcttcctgcctggacactttgcagtcgcgcggtcccagatatggatcctggtggcccgatctgtgtgtgacatgggctactatagcttgtgagcactggaa

SEQ ID NO: 39498 - DNA, 800 bp, Zea mays
  unsure (1)..(800): unsure at all n locations
  Clone ID: MRT4577_136022C.1
ctacttactcatccaccatcatcagttcatcacagcacgaacgacatggctgctgctccggtggttgtgccgcgcatgaagctgggctcgcaggggctggaggtctcggcgcagggcctcggctgcatgggcatgtccgcggcctacggcgagcgcaagcccgaccaggacatgatcgcgctcctccgccacgccgtcgccgccggcgtcaccttcctcgacacctccgacatctacggcccccacaccaacgagctcttactcggcaaggcgctgcagggaggggtgagggagcaggtccaattggccacgaaatttggcatcacggccacctgggaggtccacggcgacccggcctacgtgcgggcggcgtgcgagggcagcctcgcccggctcggcgtcgactgcatcgacctctactaccagcaccgcatcgacaagaatgtccccgtggagatcacgatgggtgagatcaagaagttagtccaagaaggaaaagtgaaatacgtcgggttgtcggaggcctcggcgtcgacaataagaagggcacacgcagttcatcccatcaccgccgttcagctggagtggtctttgtggtcaagagatgtcgaagaagatataatcccaacttgcagagaacttggcattggaattgtagcttacagtccactaaagcagaggttttctatccagtggacctanactagtggacacattaccagaagacgatttccgcaagaatctcccaagatttcaacccgagnaacatgaagaagaatgcagagatattcgagcgcgtg

SEQ ID NO: 39499 - DNA, 2730 bp, Zea mays
  Clone ID: MRT4577_136023C.1
agcttgccacttcagactcctctgcgctccatccctctgcactccggtccgcgcgagacgagcagcttctcccagacgctagacacgccaccgcatcgtctgcgccgcgagatcgagaatgtccatctctatgcggctcgcgatccctgctcctgccgtcaccgccgccgcgccgacgcggctgagggtgcgagcggcagcggcggggaaccgcggctctctctccgtcgcgcgcgccgccgtacgggcggagacgggcgcgctcaggggatgcgcctggctgccaccgaagccgctgggagcgggccagccgtaccggagcaggggggccgccgccgtgtgtcactcgtcggcgcacctcagcgcgcgcaccatccagtggatctccgccggagccagcgcagtgctattagttgctaaaggcactgccatacacaaatctttccttgtgccattattttttttttttttttttttttttttttttgagcgtaaaaaataaaaatgtagcaacttagcaagtataaatcgtctacatattttttccacgtcaaatctgcatcccaaagctgtatctgcagctatgtgagacatgaaaaaacaaaacaacacataccaccacgtttagtatgaatcaaccgtgctacaactcacagcatatacatacgagaaaggccggaagggcagcacaagttccggcaacgactaccaatgttgtttctaaggttttcaaactctcgtatgctcagtactcctttcttccttccatcgaagtagcttcagagttcagccgttgctacagtaagaggtcccatgcccttgcccatgtgtgccggggttgtgcgagcagtaaaagttggggcatcagaccctgccacttaaagagaccgtggacaaattaactgcgggtttctggtacactcttacaactgctgttccgtcgccaccatcattgccaaccctccaggaccgatccttcttccgctggggcttcttgtggtgcttgtgggacgcctctttcttctttgctgtagttttggaccctccattacccaagtcaaaagattcaaggtcatctaggacatctctcatgtttgattcagcaggatcaactgcatcatcatcctcttcatcgagatcatcagtaactgattcattagctgctgaagtagttggactttctgatccagcgatttgttcaaagtccacctcagggcctgtcacgccaggagggagctcaaagtgtgggattttaccatcaatgtaatccttcagtatctgtcgagcagccctggtctcatcaggcagcccagcatggctgacatgcccacgagacgcgcagtaggcccgcaacagctcagcagcagttggcggccgggactggggttcatatggctttggctttggcaatgcaattttgtaaatctgctcaaggatgtcccttgggacacgatctgccaccacttgaatagcttcccggtgctttgtcatcctatcaatcggcaacacaccacatgccaccatctcatgccttgagcttgaaaaggaagggaagaccagaccagggcaatcacaaagagtgagctcttcagagattatcagtgtctggaaatgttttgtcttgccaggtgtgtgagtaacaccagtcctcttctcgccaaccaaagcatttatagttgaactcttcccaacatttggatagccaacaaatccaacaactacatgcttagtcactgaagaaacagaatctgaagaactggcttcgtgatcatctacagtaggtgagatcctcctctgagctacaatagattctgcctcagcttgcagcttcatcaagagttcatccctttcatatatcttggtatccaaatcaagtgaagcagattctccttcagagtatccacttaactttttgccttctaatgtggcagtggcagccttagccgaccagaacacatagagaatgtcatgtgccttaaaataatcagcccatctcttcctgatatttaacggcaacagatcagccttgttaacaaggagtattgttctcttgtgttcatcaatttcctttgcatatgcctcaaggtcagggcagcggtagaacaaaggatcccgagcatcaaccaccataaccaacaaatcactgcgttcaagcactctccagagttgtctccaaatgtcaatattcttctcaaagggagtcaggataagcttatcattctcttccaatcttgcaagattcctgcgccacaccagaaaggcccgacgctcgttcacatcaagctcctccacagtcatctgactatgccatggcggtcgcctggggaccctgaggctgctggcgtgcagggcctcctgctccttgcgaagccgccgcctgtcgtcttccgtctcccccgtcgcatccaggtcgatgacgaggtcggagtcggaagagacggacgcggcctcagcgagctggtcggcctccgcggcccgctggagcacggcatcgatgtcgctgacgtcaatgacagactcgagcggcatcgcgcggcggcggccgaaggcgagcgcctccccccgttccttagcggccgcggccgccttgttccgctgccggatcagcgcgcgcccgagcccctcacccttctccttctttccgccgcccgccatcaccttcgagcccgtggccgatgccttggagagatagagataggtcgcggcctcgtgccgaattgcggggggagt

SEQ ID NO: 39500 - DNA, 521 bp, Zea mays
  Clone ID: MRT4577_136024C.1
aagaaaaaaaatttttccttaatccttccttttttaaaacattgggcccaaacaaggtggccggggttattcactatgttaacagaaaaaaaaaaaaaattcggcagtaaaacggggcagaaaaatattggcataaaaaaagttctacggttttgggaggaacaaaactaaattgggggccttaaaaacaaaatttggctttccctttgcccaaaaaaaaaaggattataaacagggtatatgttatctcttcagggaaacaacagttgtaaaagtttctggaaaaaaatataaagcggaaaatttcatcctgaaaattctccgcccataaaaatggggggttcaccttcaaaccccgatttcacaaggagcgaatcattcttttaaagggacaggggctccaattgggggaaaggataaaaatgctgcttgccgcccttgatgtaaccaatcgaaacttcacggggaaaaactgctctttcaaaaagccccaaaaaggaaattttctctccttccttcac

SEQ ID NO: 39501 - DNA, 286 bp, Zea mays
  Clone ID: MRT4577_136025C.1
ggttggggtttggaagcaacaacgtaaacagccataattattctcaataacccggtagcaatgcaggggaattaacaactcttacaacatcaggggttgtaaaccacacaattcttcagaacagacacacataacacgttggcgggggcaactttcggcagatcacgggataagggcagcacactggcctgatgctgcgtgatcagcaaacttctctaatactcggaaccctagtcggcatccttgcccttatggaacttaggaccgaccttctcgtagtcctttt

SEQ ID NO: 39502 - DNA, 180 bp, Zea mays
  unsure (1)..(180): unsure at all n locations
  Clone ID: MRT4577_136026C.1
gagttctatgatcnngcgagcggcnncgctctagtaggttatccaagnncttacgtaccgnnngtgcatgcgagcgtcgatagctttcttctatagtggtnncacctaaattcaaaattcatctggccgnntcgttttaccaacngnntcgtgactagggggaaaacccctgggggcgtt

SEQ ID NO: 39503 - DNA, 496 bp, Zea mays
  Clone ID: MRT4577_136027C.1
ggcacgctccggaagcacgcagctgctgcagattttggatgtgaaactgctgagagcaaagaaagattcaggcagaggctatggtgttttctttttgagaatctgaatagggctgttgatgaactttacctcctctgtgaactagaatgtgacatggaacagattaatgaatccatacttgtccttgaagaagctatttctgattttcaagaacttaaatccagagcagagcattttgataataccaaaaaatctcctggtgtaccaaaggagggcatgccaatggctgtgaaagctgaccataggagacctcatgccttgtcttgggaggtcagaagaatgacaagttctccacacaggcaagaaatactgtcttcatctctagaggccttccagagaatccaattggaactggcatgcaagcaggctggtatttgatcagaaagatttacatccagttttttttgaaaagttttgtggagtttatatataaact

SEQ ID NO: 39504 - DNA, 311 bp, Zea mays
  unsure (1)..(311): unsure at all n locations
  Clone ID: MRT4577_136028C.1
ccagnggcagccaccgggaaccgngcngacaacacnggagccaagaacccnnacancancncngngaagggaaccaaggggcgccnnaacaggcnacccacaaccagcgaaggagagggggggangggggtttttttttttcctaaagccngnaccccagaagaaggggaggccagcggccanngcgaggcagcgcaagccanggcgccgaaaggacggngcccacangnacccngaagacaacgccggagcgancgggaacccaaagggagagaagaaaggcccngccaccaccggacccaccgaaaagg

SEQ ID NO: 39505 - DNA, 821 bp, Zea mays
  unsure (1)..(821): unsure at all n locations
  Clone ID: MRT4577_136029C.1
ggcttgtgtttgcgttaggttgcagcttgtcggagggcggaggccagagctgctgcttgcttgcttcaattaaccaattgactgagccagtgaattgtgaatctgttgctggagctgaggccccggtcgaatctgttgctggttaatgtggcttgcccatcccacagttcaatgctgactcaagattcggctcgagctaatctgttgggaaccttaatttttgctggcctgctgtttatattaactccacaagaccagaccgaatcatggttcagccatcttttcaaaatacccctccttgtggtgtctctaatataccagctctattagggtcttgaactgaaggatgctgccacgagatattgttatttcaaccctgttgatacttaagctattcggttcaatggtgcaaggaatacactctaatacgattttgcatcgtccgatacatatatttatggtagagcgccctagcttccttgttctagtgttttttaagggtcgtgctggttttgccaccagtccattattggctgatgagatagcaaatgtccgagaacggttgctcgactcttcatgaatgaggtgatagacatggtggatcagcaggttgagggtgctcatataactaaactagcatggctgcctagtaaaagaggaagggaactcaaatttgggggtcgcacaagtgtgggagacttgaaatcataatatacttagttagggctcaacgttagtgccaaatagttganggaccaagtttttccattagnaatttagttggtaattagagtacaccttangtanggagttaattggac

SEQ ID NO: 39506 - DNA, 611 bp, Zea mays
  unsure (1)..(611): unsure at all n locations
  Clone ID: MRT4577_13602C.1
gcccccagnagtcgtacgtgatcgctccggacctccgtcgtttccttggatggatcggacgccattgttcatccggccggtctgcctccgttttgctcgctgaccgcccgcgctgagcccgcccgcccgctccctggcacgaggacgatgtagaggagcgcaagaacgggaggcggcgttggggacgacggggacgagatggaggggcgcaatcccgtgcagagattcgttgatagcccaaagccatacaacagaaggaaagcgcgcggtatgcaaacaaggatggattcgagtgatgtcatgtcgagtgatccttacgttatcattaacctaggacaccagacaatgaaaacgaaagtggtaaagagcagtctaaatcctgtatggaatgaaaggctcatgctttcgatacccgacccagtgccgctgcttaaactgcaagtctacgacaaggacacgttcaccactgacgaccggatgggggaggccgagatcaacatccagccactggttgctgcagccaaagcccacgagacctctgctatcgcagataccgcgcagctcaacaaatggctggcgaaagatggcatctggatcccgagggacagcgc

SEQ ID NO: 39507 - DNA, 1055 bp, Zea mays
  Clone ID: MRT4577_136030C.1
gagcagactgcaatgaatcatatcctcaagaggataaaaaaactattacctcctgtgcagggcatcagcgacaggaaaagagagatgaatgaacgaacctaatccatccatcagcagcgtaaccaaatcaggcacaggtttgagtattaaaccagtggaagtgatgagctgggagcaggcctaacccttttccaccaactctacaagagctcccgcgatccagtcaagtgccctataaaatccagccccgcttggcttcacccacccttgggctcgcaatcgcagcaacgatggggagatcgccgtgctgcgagaaggcgcacacgaacaagggcgcgtggaccaaggaggaggacgaccgtctggtggcgtacatcaaggcgcacggcgaggggtgctggcgctcccttcccaaggccgccggacttgtgcgctgcggcaagagctgccgcctccggtggatcaactacctgcggcccgacctcaagcgcggcaacttcacggaggaggaggacgagctcatcatcaagctccacagcctactcggcaacaagtaggcagcccgaccgacctcaagcactaaggcacccactaaggcactaactgtgttgtctgtgtatgatctgtttgttgggtcacagatggtccctgatcgctggaaggctgccgggcaggaccgacaacgagatcaagaactactggaacacgcacatccggcggaagctgctgagcagggggatcgacccggtgacacaccgccccatcaacgagcacacgtccaacataaccatatcgttcgaggactggggccaggggaaggcgctcaagtgccccgacctgaacctggacctctgcatcagcccgccgtgccaggaggaggaggaggccatgctgctgaggccggtgaagcgggaggaggccgggctctgcttcagctgcagcctggggctccccaagagcgcggactgcaagtgcagcaacttcctcgggctcaggaccgccatgctcgacttcagaagactcgagatgaaatgagagcttccatccatctctgc

SEQ ID NO: 39508 - DNA, 419 bp, Zea mays
  Clone ID: MRT4577_136031C.1
cccacgcgtccgcccacgcgtccgaatcactgtctggatgatgagtgaactacattgtacatgtttgagtttgttgagttatattgtccgtggacaagctgtatctggatgtggtcaaccggcttcaggggctcatgcggctggcctgtttttgctctgtgctggacgtctagtaagtctgcaactctacatcatatgttatgtagtgagtgatgttcagttcatgttctgaattcttaatgaaatgtgatctgaatgcctgacaattctagtattcataatttctatgatgctctgaaatctgaatgttcaatggtgttctgaaatctgaatcgtccactctccactgtccagttctagtattcatattcgttttgcttggtaatttggttactttgatattgccttctatatgctat

SEQ ID NO: 39509 - DNA, 1594 bp, Zea mays
  Clone ID: MRT4577_136032C.1
cgcagactcaggggaggcgcgcgcaagcaagtaccacgagggagcagcgggcaggcaggcatgcggcgctcgagccggccgggctgcgacccttgggctcgcaatcgcagcaattgggtacctcgaggccggccgggtgcctatgcctatctataaaatcccgcttcgccacacacccttggccttggcctggcgctcgcacctcacagcagcagcagcaacaacaacctccactgccgcaacccaccgagaggcgagaccggcggcggcaaaaggacgatacaaaagcagccagggttgctggcaacagcgtcggtcgcccgcccgctcgccatggggaggtcgccgtgctgcgagaaggcgcacaccaacaagggcgcgtggaccaaggaggaggacgagcgcctggtcgcgcacatcagggcgcacggcgaggggtgctggcgctcgctgcccaaggccgccggcctcctgcgctgcggcaagagctgccgcctccgctggatcaactacctccgccccgacctcaagcgcggcaacttcacggaggaggaggacgagctcatcgtcaagctgcacagcgtcctcggcaacaagtggtccctgatcgccggaaggctgcccggcaggacggacaacgagatcaagaactactggaacacgcacatccggaggaagctgctgagcagggggatcgacccggtgacgcaccgcccggtcacggagcaccacgcgtccaacatcaccatatcgttcgagacggaggtggccgccgctgcccgtgatgataagaagggcgccgtcttccggctggaggaggaggaggagcgcaacaaggcgacgatggtcgtcggccgcgaccggcagagccagagccacagccacagccaccccgccggcgagtggggccaggggaagaggccgctcaagtgccccgacctcaacctggacctctgcatcagcccgccgtgccaggaggaggaggaggagatggaggaggctgcgatgagagtgagaccggcggtgaagcgggaggccgggctctgcttcggctgcagcctgggactccccaggaccgcggactgcaagtgcagcagcagcagcttcctcgggctcaggaccgccatgctcgacttcagaagcctcgagatgaaatgagcgcgcttctaccctctctgtgtagcttctccccccccgtcgtcctcgtttttgttttgccacacctcacatggatgatgaattgatgatacgtggttggttagttttttcgtaggtgaaaaatacgcgatggtgagcgagtgaaagagagattttgtgccctgggtcctcctccctgctctctcttgctgctccattttgcctccctctgtcctctctctctctctctctctctctctctctctctctctctctgtatctctgtaattaccatcgccaaatgatcatgggggcaatatcatgctaggtctctggaaattgacgctaatcccgtttccaggaaaaaaaaaaaaaaaaaaaaaaaaaaaaaaaaaaaaaaaaaaaaaaaaaaaaaaaaaaaaaaaaaaaaaaaaaaaaaaaaaaaaaaaaaaaaaaa

SEQ ID NO: 39510 - DNA, 334 bp, Zea mays
  Clone ID: MRT4577_136033C.1
aaaacggggcctgctgctactattttttccacgagctctgctctgcaccgtggccgactgccgactacctacagtacacgtgggtatgtgactgtgactgacgatgtcaggtgtcgttcggcagatgtgacgtggtagtcggggaaccggatgaattctgatgctcatacgggcaaccaaccccgacttccgggaggggcgcatttactagataaaaggctgatgcgggctgtgcccgccgatccgacgcttcatgataacttgacggatcgcacgggcttccagcctgcgacggatcattagaatttctgccctatcaacttttgtttttttt

SEQ ID NO: 39511 - DNA, 1245 bp, Zea mays
  unsure (1)..(1245): unsure at all n locations
  Clone ID: MRT4577_136034C.1
ccgggtcgaccccgctttcgcggncgcgtgggtcgccgtgctgcgagaaggcgcacaccaacaagggcgcgtggaccaaggaggaggacgagcgcctggtcgcgcacatcagggcgcacggcgaggggtgctggcgctcgctgcccaaggccgccggcctcctgcgctgcggcaagagctgccgcctccgctggatcaactacctccgccccgacctcaagcgcggcaacttcacggaggaggaggacgagctcatcgtcaagctgcacagcgtcctcggcaacaagtagggccgccgcgcgcctctccctctccctcctacccctcgtcattcgtttcgtttcctaaactggccgggtacgttacgtgcaggtggtccctgatcgccggaaggctgcccggcaggacggacaacgagatcaagaactactggaacacgcacatccggaggaagctgctgagcagggggatcgacccggtgacgcaccgcccggtcacggagcaccacgcgtccaacatcaccatatcgttcgagacggaggtggccgccgctgcccgtgatgataagaagggcgccgtcttccggctggaggaggaggaggagcgcaacaaggcgacgatggtcgtcggccgcgaccggcagagccagagccagagccacagccaccccgccggcgagtggggccaggggaagaggccgctcaagtgccccgacctcaacctggacctctgcatcagcccgccgtgccaggaggaggaggagatggaggaggctgcgatgagagtgagaccggcggtgaagcgggaggccgggctctgcttcggctgcagcctggggctccccaggaccgcggactgcaagtgcagcagcagcagcttcctcgggctcaggaccgccatgctcgacttcagaagcctcgagatgaaatgagcgcgcttctaccctctctgtgtagcttctcccccccgtcgtcctcgtttttgttttgccacacctcacatggatgatgaattgatgatacgtggttggttagttttttcgtaggtgaaaaatacgcgatggtgagcgagtgaaagagagattttgtgccctgggtcctcctccctgctctctcttgctgctccattttgcctccctctgtcctctctctctctctctctctctctctctctctctctctctctgtatctctgtaattaccatcgccaaatgatcatgggggcaatatcatgctaggtctctgg

SEQ ID NO: 39512 - DNA, 511 bp, Zea mays
  Clone ID: MRT4577_136035C.1
gcagtttttgtttgctctggggggaaggaatgcagataagcgtgcagaccatatgacaatatgacaaaaggctcggtgaagccctgtggactacaagctgcattgtgtctacataataaggtggggatttgaatcatacaccctctaaaactcgggcctcggcgtccggggctacaaccgggagcaagcatatgttgctgcacgaggccttggctccctcctcctattaggccacgaaggacccaaaaaatacagccacagtagcacaagtactagcgtgcatgctcatgaactacagccggccattaacgaagctattcagagaggccatacctgatttttattctagctgcagaaaacaacacggctttgtatcaccgacggtctatgcacagagttcctgggctggctgaaggacccccctgcgtatagcatatggtacacgggccggacccttacggtgaggaccgtgttctgcagcatgtcaaggcatgccacgcctgcgaggtct

SEQ ID NO: 39513 - DNA, 1221 bp, Zea mays
  Clone ID: MRT4577_136036C.1
gtgcggacgctcgaggccggccgggttgcgaggcctaacccttttccaccaactctacaagagctcccgcgatccagtcaagtgccctataaaatccagccccgcttggcttcacccacccttgggctcgcaatcgcagcaacgatggggagatcgccgtgctgcgagaaggcgcacacgaacaagggcgcgtggaccaaggaggaggacgaccgtctggtggcgtacatcaaggcgcacggcgaggggtgctggcgctcccttcccaaggccgccggacttgtgcgctgcggcaagagctgccgcctccggtggatcaactacctgcggcccgacctcaagcgcggcaacttcacggaggaggaggacgagctcatcatcaagctccacagcctactcggcaacaaatggtccctgatcgctggaaggctgccgggcaggaccgacaacgagatcaagaactactggaacacgcacatccggcggaagctgctgagcagggggatcgacccggtgacacaccgccccatcaacgagcacacgtccaacataaccatatcgttcgaggactggggccaggggaaggcgctcaagtgccccgacctgaacctggacctctgcatcagcccgccgtgccaggaggaggaggaggccatgctgctgaggccggtgaagcgggaggaggccgggctctgcttcagctgcagcctggggctccccaagagcgcggactgcaagtgcagcaacttcctcgggctcaggaccgccatgctcgacttcagaagactcgagatgaaatgagagcttccatccatctctgtctgtctctctctgtaacttcacccctgataacacgcagtagtagtagtcaccaactgatttgtcgctccattaattctgtctctctctctctctctctcgctatgtaaattagcatcaccaactgattgattgatcatgggcaattaataatacttgttgctgctgcaaattgatgatgactttatgacacatggttggttagttttttcgtaggtaacaaatacgcgatggtgagcgagtgaaagagagattttgtgccctgggtcatcctccctgctctctcttgatgctccatattgcctcctatgtcccccctctctctctctgtatctctgtaattaccatcgccaaatgatcatggggggcaatataatataatacatgctgctaatgctagaa

SEQ ID NO: 39514 - DNA, 556 bp, Zea mays
  Clone ID: MRT4577_136037C.1
ggccgcttttttttttttttttttgggacgccacaaacatcatccaaaaaacttcattattgaactataactcataagcaatctaaaagagggcaccaccaatgttgggtcgttggtcgaacactgtacattttgtgaaagcacgttggtcaaagggcaacaattgttgtatttgtaagaaggatgcggggttagccggaaactgctggtataaaggtgagaactgttgctgtgtcatgaactaatcacggcttgtatgcagatagctggttaaaagtgatgacaatttgctgcgtgaaataagcatcggcgttcagtgcagacaactgcttaaatggaaaaagttgatgttgctgagagtaagcaatatctagctgactgaatggacatagcttgtgttgcaaataatcattacggttcaatgaagacagtttgatgaatggaagaaattggcgttgctgaaagtagggataaaggattgccagagatacttgattgatcacaggtattacgatttactgcacttgctgagccctgatggttagatccaatgact

SEQ ID NO: 39515 - DNA, 266 bp, Zea mays
  Clone ID: MRT4577_136038C.1
atttggattcaggttgggggcttcttactcccgcttcccgatgcggacggtataacactgatcggatgcatgcctgtccggtgtagaggcttatcaagtgcaagaccaccagaggcgcacgccctctggcgctgctttctgttttgacctacgaagcaggcagtgacgtcgaccatagtgtcagaagcccacgtgtacatgtgccagaggcaggatgacctctaaggaccggtagaagcatgaccacgagcaggtctaccgttcta

SEQ ID NO: 39516 - DNA, 370 bp, Zea mays
  Clone ID: MRT4577_136039C.1
ggacggcaaggaaagatctttcgacgcacatgtttggcaaactcaatccattaaaggtctgcgcaccggttatcgtcgaggagtttgccaagctggcacatcgactcaactttatgtatgcttatccgttgattgaaagcaataagcgcatccgattgacccaattcttgtcatcgacgtactccactggaggcgccctccgagactctggtttcgacactcaggaggagagctttcatcaactggacccgtacttcccattcgacccataccagctaccggttagcaaacgctggcttacagaagattatgtgaactggaaatcaatcccgggcttgaacgcggaagacgatgaagacagcgatgactt

SEQ ID NO: 39517 - DNA, 570 bp, Zea mays
  unsure (1)..(570): unsure at all n locations
  Clone ID: MRT4577_13603C.1
cgcgcttgagccgaaccttggcatcagttggagtagcaaagggcattccagtaactattactgccctcccagcacgatcagcaaaatcaagaccctcactaactttgccacggcaaactgcaaaaaatattgccccagaagaagaatcgtgtaatttggctctataatcctcaattgcactctgaaagtttgatgactgcctaggctctataactggctgcttgtgcttacagatccgctgccaaattgtgttctcagacgctgaatttgaatggttcctatttttccagaagtcaacacacatgtccatcatagaatatgaagggaagaaaacaaggagtccgtctggcacaatgcgtgcgaaatttactattgcagtgcccaactcttgtttatattgtatagtattacgcgtacgataagaagaattaagagcatgtcccgaagggccgacaggcacaactccaacccagacttggtctgaagaaatgacatgcggattttnctagtctaactgggaattcaaggtttagttnccatggctagtgaanccaacggagacaaggtgcc

SEQ ID NO: 39518 - DNA, 228 bp, Zea mays
  Clone ID: MRT4577_136040C.1
gttcatgaacgataaaatctactcaagacaacttattttcacatcctcatacatcggggttcggtttttttttttattttcatccaactttaatttatttgcccttttttcatagcacactactgttcatataatctctttacccaactcaaaatgctatagggtcatttctctttcaccagctagaataccatagattacgtgtacacttgaatactctacccaaca

SEQ ID NO: 39519 - DNA, 158 bp, Zea mays
  Clone ID: MRT4577_136041C.1
cgaagatggcaatagaattggcatctcccaaatgggttccaaccgcagccgcatgtttggcagccttggacgccctcctcctcttcctcctccgcggtctcagccgccgtaaatacaatctccccccaggccccaagccctggcccatcataggcaac

SEQ ID NO: 39520 - DNA, 298 bp, Zea mays
  Clone ID: MRT4577_136042C.1
tttttgtttaaattgaacatgaatgcacaaactaaatcaagtacaacataactaacatgcaaataaattccaagtaagtttcacaccgtaggtgctgcacgatcatgtctattggaattggaaataactttagaacagacgaggtataacttacaacgcaggatctagctcccatgtgctggacaactggactggtgactcaatatataggccgactatgaggcccacatttatcctttatttatgaagacacgcctgctcagaaggttagcacggtgcttgctagtgccttattgcg

SEQ ID NO: 39521 - DNA, 171 bp, Zea mays
  Clone ID: MRT4577_136043C.1
ggtcgacgacgcgtcaaggcctaagcggttgtaggctgtgcccatgattccaggcgaacatgtacttatatcgccgtgggtaatcaggtgagcgcctgctccgtatcatcctgactgctgtccgatttaggaggaacggccatgcatagagcagagccacacttcgaatgt

SEQ ID NO: 39522 - DNA, 224 bp, Zea mays
  Clone ID: MRT4577_136044C.1
gattctgaagaccctgtggtggacacaaaattcagacctatgactgtcactcacatgagtcctgggccccaacgctgttggggccactttttccaaaacatatgtagggatcataacctcattataacccaagaccaactctcaacaggtttcttgcgcactggtcctcttgcacagttaattgcatgctttgcgaaaactccacctggacaaatgctattttg

SEQ ID NO: 39523 - DNA, 1242 bp, Zea mays
  Clone ID: MRT4577_136045C.1
atcttctcgaccctaccaccgctctgctttcagccagatcgatcgccacatgcacattccctagcggcactagctatatctctgcagctagctagctatctagctgggtaataactaacgtgtacgtcgtacccagctataggacggcaatgaggaaaccggagtgcccagcggcgaacagcagcaatgcgggggcggcggccgcgaagctgcggaaggggctgtggtcgccggaggaggacgagaggctggtggcgtacatgctgcggagtggacagggttcttggagcgatgtggcccggaacgccgggttgcagcggtgcggcaagagctgccgcctccggtggatcaactacctccggccggacctcaagcgcggcgccttctcgccgcaggaggaggagctcatcgtcagcctccacgccatcctgggaaacaggtggtctcagatcgctgcccggttgccggggcgcaccgacaacgagatcaagaacttctggaactccaccatcaagaagcggctcaagaacagctcggcagcttcgtcaccagcagctacggactgcgcgtcgccggagcctaataacaaggtcgccgccgccggtagctgcccggatctttccgtcctagatcatcaggacggtggccaccaccacgcaatgacgacgacgactgcaggtttgtggatggtggactcatcctcctcttgtacctcgtcgacctcgccaatgcatcagtttcagaggccgacgacgacgatggcagcggccgtggccagcgggagctatggaggtctcgtccccttccctgaccaggtccgtggtgttgtggccgacacgggagggttctttcatggccacgcggcgccagcgttcaagcaccaagttgccgcattgcacggtggtggttattactacggcagcgctcctcgtcaccatggaatgacgacgacgacgacgacggtggcattggaaggaagcggtggatgcttcatatctggcgaaggcatgcttggtgtgccccctctgctgttagagcccatgtcagcagtgcttgagcaagaccaaggccagaccttgatggcatcaagtggtagcaacaacccttaaaacaccagcagcagcaacactactgatactacgactaccacgacactgagcaacaatgagagcaacgtcacagacaccaccaccaaggacaacacccaccaacacattagccaagggaacagtggcagcaata

SEQ ID NO: 39524 - DNA, 201 bp, Zea mays
  Clone ID: MRT4577_136046C.1
ctttattattcttctctcggcgttgccattgacgaagaagagatgcgcaagatcttcagcaaggtcgactagtacggcgacgactagatctcgtgctctgagttgaaggagatgatgacggcgctgagatccaaaacgacgtcggacgaggtgaagcgcatgatgtcggagctggaccggaacgtggacgtctacattgac

SEQ ID NO: 39525 - DNA, 506 bp, Zea mays
  Clone ID: MRT4577_136047C.1
atcactaccccggaaacttgatgcaaggaaattacttgcaagcacgagcactcgcagtccttcatagtaaaaagaagatgaatgcacactttttcgaactgcgcgcttgaaagcaaaaacactaggactgtttgtttctgttctgacgagtgacacattgtttagtgaaaaccccagctgtgattaagccatatgtagggaactgagacccgggcttaaatcgatgaaacaatgcttgatgcaaacaccccgctagtgtgaccacgacggaatcctggaacttccctgacaccatcagggggacgagggcgatgactccttgaatcatcttctgcatggacaaactggttgtgctgaaataacaggaccggcaaccggtacgcgcaccagctatacgtaccttgagtgggattagagcatggaaacctctagtgtctagctagtctctgcgtgaaattgcaacacgtggacaattacacacattagagcatccgcaagcatatgac

SEQ ID NO: 39526 - DNA, 1229 bp, Zea mays
  Clone ID: MRT4577_136048C.1
taattcggcccgaggtacgcccgcctagggcgagggcgagtcagcacttcagacttcagtccacccagccagcccacccaagacacgcagcgcaggcgcatcccagccagattcgacccgagttcgcgacgagagcacgagatggcgatgcggaccgcgctgacctccctccccgcgcgcctgcgcgcccctgcgccccccgcggcgacgggcggccggcgcctcctcagcgacgggaaggggcgcgtgctcagcgaggaggagcgcgccaaggagagcgtctacatccagaagatggagagggagcggcaggagaagctcaagaagaggctcgagcaggagaaggccgactccgacaaggccaagcccgccgacgccgacaagaaggccgagggatctacctagctaggattggcatggcgctgttggaaggcaatcacgtttcgcatgtatccgaatccgatggtcagctttgtgaatgaataaattctgtaaaacgtcaacagcactggatatgctgttgcttcggttgcttgcatgttgaagttgaagacgacattcatattttgatactgctgctctttgtggactcgcggtagattggtctttgtggtgttacctgaaaaaaaaaaaaaaaaaaaaaaaaaaaaaaaaaaaaaaaaaaaaaaaaaaaaaaaaaaaaaaatctcgttgtccgttgtactctctctctctattcgttccccgcctcaccccgagccagccgtctcgctagggtttcgccgccgccgccgccatgcctcgccgcagctcaggaaggtctgccccacgcccagctccccgtgctgctccagtgaggaacccgccacagccagcacgccaggctcctcctccagctcctgttcgagatggtggtggctccatgtttggaggaattgggtccaccattgctcaaggtatggcgtttggcacgggtagtgccatggcacacagggctgttgatgctgtattaggtccccggaccattcagcatgagactgttgcctcagaagctgctgctgctgcccctgcccctccagtgatgaatgctgatgcttgcagcatccattctaaggctttccaagattgtctcaacaactatggcagcgagatcagcaagtgccagttctacctagacatgctgaacgagtgccgccgtggtggtgtgtctgcctaagctgcctctggggttattcatggattttcttttc

SEQ ID NO: 39527 - DNA, 207 bp, Zea mays
  Clone ID: MRT4577_136049C.1
ggaagacagaatttcggaaccctagcatctacgagaagctgatccagttctgtgccattgacgagcttggcaccaactacccaaaggatatgtttgatccccatggctggtctgaggactcctactatgaggcattagccaaggcccagaaaattgagatggacaaattggagaaggccaaaaaggagcgaacaaaaattgagtttg

SEQ ID NO: 39528 - DNA, 254 bp, Zea mays
  Clone ID: MRT4577_13604C.1
gtcacgcgtcctgatgcgttcatcctggtggttttgtgaggtcgatagcggctatcgaattagaagattctggacaagctgtgtgacgacttggtgtccgggcctctcccggagacgggccgcgagaagctccgcaaggtcaccaccgctcggtctctcgtcatcaacaaagacgcggacggcggcgactacaatctggcgcagtcgacgccttcgagcccgaggactccggtgacgccgttgtcttcgacgac

SEQ ID NO: 39529 - DNA, 399 bp, Zea mays
  Clone ID: MRT4577_136050C.1
agggggcaaattaccacttttataaaatattgatggggcaaaaaattcgaacaattaattccccaaaggtgaaaaaacgatgctgggggggaggaggaaaaagcctgagcagcaaaaacagggagtaagcaaaaacttgaaatgccttggcttgggaggttctgcaccggaacagtataaaacagggaccggcgggggcttgattattttataaaaaaggggcttgccgtcgccgtttacccaaacgcacttgaagctgtaacttttcggggaaaaaattaaaattgtccttaaggaggggggcgaaaaaacggacgggcttgggctggcccttgaaggggagcttgaacttcaccttaaaggggaagttggccttgacacgcttggcctttcacacgc

SEQ ID NO: 39530 - DNA, 694 bp, Zea mays
  Clone ID: MRT4577_136051C.1
cattgggtacctcgaggccggccgggctccttgcccgttgtgctctctctcttcattcgttcccggcctcaccccgagccagtcgtctcgctagggtttcgccgccgccgccatgcctcgccgcagctcaggaaggtctgccccacgcccagctccccgtgctgcttcactgaggaacccgccacagccagcacgccaggctcctccagctcctgttcgagatggtggtggctccatgtttggaggaattgggtccaccattgctcaaggtatggcgtttggcacgggtagtgccatggcacacagggctgttgactctgtattaggtccccggaccatccagcatgagactcttgccacagaagctcctgctgctgcccctgctgctccagcgatgaatgctgatgcttgcagcttccattctaaggctttccaagattgtctcaacaactatggcagcgagatcagcaagtgccagttctacctagacatgctgaacgagtgccgccgtggtggtgtgtctgtctaagctgcctctgggattattcatggattttcttttcggatgggtatctcattaataagacaccgtgaaacttcgaccatctccacagcttgaaaccaaacttcctgggattaattttattttgttatcctatggtgttggaataaaaaaaaaaaaaaaaaagcggcc

SEQ ID NO: 39531 - DNA, 802 bp, Zea mays
  Clone ID: MRT4577_136052C.1
gcacgaggagacttcgagttccctctccgttataaaaccgaacgcccagggcgctccgtgttcaatctccttgcccgttgtgctctctctcttcattcgttcccggcctcaccccgagccagtcgtctcgctagggtttctccgccgccgccgccatgcctcgccgcagctcaggaaggtctgccccacgcccagctccccgtgctgcttcactgaggaacccgccacagccagcacgccaggctcctcctccagctcctgttcgagatggtggtggctccatgtttggaggaattgggtccaccattgctcaaggtatggcgtttggcacgggtagtgccatggcacacagggctgttgactctgtattaggtccccggaccatccagcatgagactcttgccacagaagctcctgctgctgcccctgctgctccagcgatgaatgctgatgcttgcagcttccattctaaggctttccaagattgtctcaacaactatggcagcgagatcagcaagtgccagttctacctagacatgctgaacgagtgccgccgtggtggtgtgtctgcctaagctgcctctggggttattcgtggattttctttcggtgatgctatctcattaataagataccgtgaaacttttgtctccacagcttgaagctaaacttcctgggattaatacattttgttatcctatgctgttggagcagacttttgtctcttgatcataaatatttaaacgaacctgttatgttggaaaaaaaaaaaaaaaaaaaaaaaaaaaaaaaaaaaaaaaaa

SEQ ID NO: 39532 - DNA, 424 bp, Zea mays
  Clone ID: MRT4577_136053C.1
cggaaaaaaattttttattccaattataggattccaaaccctcaaaatgaaaggaaacaaacggggacttatcgaaaaaaaaaacatgcgggtttcctaaaacctgaggggctggggcagttatacgcctatccacatgccccattggacgaactgaactccctaacgaattcgatttaatatccacatttcacacgtgaaagttcttcggggctagctgcaatcatggccaaaatgttatgcacagaaggggagcacttggattaggccaacggccggatgagagggcggggaaaaaaccgcctttgttgtcggccgtgttgggcggccggaagcctgtccacggaggtgctgctcgtggccccagtggccccgccccttggtatattgtccccggtgccgggcggggtcccctctatgtccc

SEQ ID NO: 39533 - DNA, 807 bp, Zea mays
  unsure (1)..(807): unsure at all n locations
  Clone ID: MRT4577_136054C.1
ttttcaaagactgcagacttgagtccaccctgccagccaagacacgcagcgcaggcgcatcccagccagattcaacccgagttcgcgacgagagcacgagatggcgatgcggaccgcgctgacctccctccccgcgcgcctgcgcgcccctgcgccccccgcggcgacgggcggccggcgcctcctcagcgacgggaaggggcgcgtgctcagcgaggaggtgcgcgccaaggagagcggctacatccagaagatggagagggagcggcaggagaagctcaagaagaggctcgagcaggagaaggccgactctgacaaggccaagcccgccgacaccgacaagaaggccgagggatctacctagctaggattggcatggcgctgttggaaggcaatcacgtttcgcatgtatccgaatccgatggtcagctttcggcgtgtttggttctcgtgctcgccccgcccaagctcatcaggtgcgttgaccgcatgcaaaccggtgattggttgcctgaacgcttggatgtcggcctgtatctgtggatgcaactcaggtgttttctcatgtgtctgcctgcgcgcgtggagacgtggggagagagcatctctagccgcccaggccgctacgagcccggcgcccgtgaacgcggcaaccaaacatgccgtttgtgaatgaataaattctgtaaaacgtcaacagcactggatatgctgtggcttcggttgcttgcatgttgactcgtgcagntgaaaacgacattgaatattttggcaaaaaaaaaaaaaaaaaaagcccctaagggcccc

SEQ ID NO: 39534 - DNA, 825 bp, Zea mays
  Clone ID: MRT4577_136055C.1
ctggccgggttgcggagagttgaaataatgagtttgatcttgaacttgaaatgtgcagaacggtattggtgatgaaaaaaaaaaaaaaaaaaaaaaaaaaaaaaaaaaaaaaaaaaaagcaagagactgaacaaaaggtaagttcaatctccttgcccgttgtgctctctctcttcattcgttcccggcctcaccccgagccagtcgtctcgctagggtttcgccgccgccgccgccatgcctcgccgcagctcaggaaggtctgccccacgcccagctccccgtgctgcttcactgaggaacccgccacagccagcacgccaggctcctcctccagctcctgttcgagatggtggtggctccatgtttggaggaattgggtccaccattgctcaaggtatggcgtttggcacgggtagtgccatggcacacagggctgttgactctgtattaggtccccggaccatccagcatgagactcttgccacagaagctcctgctgctgcccctgctgctccagcgatgaatgctgatgcttgcagcttccattctaaggctttccaagattgtctgaacaactatggcagcgagatcagcaagtgccagttctacctagacatgctgaacgagtgccgccgtggtggtgtgtctgtctaagctgcctctgggattattcatggattttcttttcggatgagggtatctcattaataagacaccgtgaaacttcgaccatctccacagcttgaaaccatacttcctgggattaatttattttgttatcctatggtgttggaaaaaaaaaaaaaaaaaaaaaaagcggcc

SEQ ID NO: 39535 - DNA, 708 bp, Zea mays
  Clone ID: MRT4577_136056C.1
cattgggaccctcgaggccggccgggatcctctcgctcctttgctctcctcgggtcaagcctatacatcgagcttgtttatctgctgcggccatgagtaggttgccctctgagcttgtcaaggattggcatctcccacagtggtgccgatgccaatgagagcaataggaaattcactgagactgtgccacttcctattgggctgaataattatgatccattgaaggacatatcgtttcagagggtctgctacgctgtcccctatccctcgtcccaaaatgactgcgtggatgcttggtgatgtccattctgtctcgtataccaagaacacgagacttgactacatgtatggtgcggctctcgacacattgaacatgaacttgaatcttgttatgaggattgccaagaagtaccatgctttcttgacatcagaggctatcatatgcatgattccccgactcacttgggcctgggctcaacaagagcaagcaagctcccgaccctgtttactcaccactgatccctcctctgcaatgtgaactagactaaagtgaccgactatgtccaggtcaagaatgttcttctgcactgcgtgttgccggtggcaacttgattacggaatataaacctatccagcatagactgcagatgatcgtcagattccttgttacccttctgaagaagaactggcagaatgtgacatgcctct

SEQ ID NO: 39536 - DNA, 928 bp, Zea mays
  Clone ID: MRT4577_136057C.1
ccgggatacctttctcggccttttggctaagatcaagtgtagtatctgttcttatcagtttaatatctgatatgtggactatgtgtccacttcgatattaaatttattttttgtgggggagggaccacaacagtggcttgccactgggttcctcgagcgtcgctcggccgttgcactacaggctgagccaggcgcgccccaactcgttgcccgttgtgctctctctctttattcgttccccgcctcaccccgagccagccgtctcgctagggtttctccgccgccgccgccgccgccatgcctcgccgcagctcaggaaggtctgccccacgcccagctccccgtgctgctccagtgaggaacccgccacagccagcacgccaggctcctcctccagctcctgttcgagatggtggtggctccatgtttggaggaattgggtccaccattgctcaaggtatggcgtttggcacgggtagtgccatggcacacagggctgttgatgctgtattaggtccccggaccattcagcatgagactgttgcctcagaagctgctgctgctgcccctgcccctccagtgatgaatgctgatgcttgcagcatccattctaaggctttccaagattgtctcaacaactatggcagcgagatcagcaattgccagttctacctagacatgctgaacgagtgccgccgtggtggtgtgtctgcctaagctgcctctgggattattcatggattttctttcggtgatgttatctcattaaataagataccgtgaaacttttgtctccacagcttgaagctgaacttcctgggattaatacattttgttatcctatgctgttggagcagacttttgtctcttgatcataaatatttaaacgaacctgttatgctaaaaaaaaaaaaaaaaaaggccccta

SEQ ID NO: 39537 - DNA, 864 bp, Zea mays
  Clone ID: MRT4577_136058C.1
gaggtctccggcccgggaaaaaaaaaaaaaaaaaaaaaaaaaaaaaaaaaaaaaaaaaaaaaaaaaaaaatctcgttgtccgttgtactctctctctctattcgttccccgcctcaccccgagccagccgtctcgctagggtttcgccgccgccgccgccatgcctcgccgcagctcaggaaggtctgccccacgcccagctccccgtgctgctccagtgaggaacccgccacagccagcacgccaggctcctcctccagctcctgttcgagatggtggtggctccatgtttggaggaattgggtccaccattgctcaaggtatggcgtttggcacgggtagtgccatggcacacagggctgttgatgctgtattaggtccccggaccattcagcatgagactgttgcctcagaagctgctgctgctgcccctgcccctccagtgatgaatgctgatgcttgcagcatccattctaaggctttccaagattgtctcaacaactatggcagcgagatcagcaagtgccagttctacctagacatgctgaacgagtgccgccgtggtggtgtgtctgcctaagctgcctctggggttattcatggattttctttcggtgatgctatctcattaataagataccgtgaaacttttgtctccacagcttgaagctaaacttcctgggattaatacattttgttatcctatgctgttggagcagacttttgtctcttgatcataaatatttaaacgaacctgttatgttggaatatgttgtacatgcgtacgaccatcggctccacagccattgggatgcgatgggttcatctatcagtttacaaagccgggaaataaaaaaaaaaaaa

SEQ ID NO: 39538 - DNA, 897 bp, Zea mays
  unsure (1)..(897): unsure at all n locations
  Clone ID: MRT4577_136059C.1
gacgtcagatcttcttgtgcgaagacaggcccaaactgggactaatggttcgagagtcgagacttcgagtgccttctcccttataaaaccgaacgcccagggccctccgtgttcaatctcgttgcccgttgtgctctctctctctattcgttccccgcctcaccccgagccagccgtctcgctagggtttcgccgccgccgccgccgccgccgccgctatgcctcgccgcagctcaggaaggtctgccccacgcccagctacccgtgctgctccagtgaggaacccgccacagccagcacgccaggctcctcctccagctcctgttcgagatggtggtggctccatgtttggaggaattgggtccaccattgctcaaggtatggcgtttggcacgggtagtgccatggcacacagggctgttgatgctgtattaggtccccggaccattcagcatgagactgttgcctcagaagctgctgctgctgcccctgcccctccagtgatgaatgctgacgcttgcagcatccattctaaggctttccaagattgtctcaacaactatggcagcgagatcagcaagtgccagttctacctagacatgctgaacgagtgccgccgtggtggtgtgtctgcctaagctgcctctggggttattcgtggattttctttcggtgatgctatctcattaataagataccgtgaaacttttgtctccacagcttgaagctaaacttcctgggattaatacattttgttatcctatgctgttggagcagacttttgtctcttgatcataaatatttaaacgaacctgttatgttggaatatgttgtacatgcgtacgaccatcggctccacagccattggggatgcgatgggntcatctatcagtttac

SEQ ID NO: 39539 - DNA, 2263 bp, Zea mays
  Clone ID: MRT4577_13605C.1
cactcgagcccagctccgatccgaacgaccaccgctccttcctcgccccagcctagcagcgcaggcgcggcgcagcgcaggccctgcgccgccctccgcgcacgtccaggtatccttcgaccgcaaccgcgcgcgcctctctccctcctcctgccgcaacacgtcctcctcgacgtcgtcgccttcgcccccaaggagtcgtacgtgatcgctccggacctccgtcgtttccttggatggatcggacgccattgttcatccggccggtctgcctccgttttgctcgctgaccgcccgcgctgagcccgcccgcccgcccgctgcctggcacgaggacgatgtagaggagcgcaagaacgggaggcggcgttggggacgacggggacgagatggaggggcgcaatcccgtgcagagattcgttgatagcccaaagccatacaacagaaggaaagcgcgcggtatgcaaacaaggatggattcgagtgaccacggcgaccgccaaggtccgagagcctgtgaagaattgccaggcaagatggataacgaccgtgccgatcgtcaacgcttgaaagcctgcgaattcccagccaagatggacaacaaccatgccgatcgtcaagtttcgaaagcctgcgaatcgaaaggcaatgcctgtgaattgccaggcaagatggataatgaccaccccgtccgtcaaggtttgaaagcccgtggactactgcaacctaagtcggatgctagtggaggtggcgtatgcgaaggtttgaaagcttgtggattgacagccaacaagatggatgctactgaccaatgcgaccacaaaggctccaaagtatgtggggtggtgacaaccaagatggatactagtgaccaaggcgattgtcaaaccttcaaagtatgtgggatagcagccaagatggatgttaacgaccatgccgatcaccaaggctccaaagccagtggaatgccaaccaagacagatgctaatgatcaatgcagcaaccattttgttacatgtccctttaagacagctgagaggttagatcatcttctgaaccaaccagcaaacagatactgtgctgattgtggtgctccagatccaaaatgggtgtcaatgacttttggtgttttcatttgcatcaagtgttcaggagctcatagaagtcttggagtacacatatccaaggtggtttcggtgaagctagacgagtgggcagatgaacaggttgatattttagctgattcaggtgggaatgctgcagtaaacatgatatatgaagcatttgtgcccgaaaactacgcgaagccaaggcaagattgttcagcggaggagcgcaatgattttattaggagaaaatacgaggctcaacaatttttgactaacccccagctttcatgtcctccacgacgcaacgagaaacataatcaccaacagcatagtactagttcaagtcgacatggtttaggccattcattcaggaacagctggaggagaaaagagcacgaggccaaatcaacaaagaaaacaatcgaggtgggcatggtagagtttgtcggattgattaagatcgacatcataagaggcacaaatctagctatccgtgatgtcatgtcgagtgatccttacgttatcattaacctaggacaccagacaatgaaaacgaaagtggtaaagagcagtctaaatcctgtatggaatgaaaggctcatgctttcgatacccgacccagtgccgctgcttaaactgcaagtctacgacaaggacacgttcaccactgacgaccggatgggggaggccgagatcaacatccagccactggttgctgcagccaaagcccacgagacctctgctatcgcagataccgcgcagctcaacaaatggctggcgaaagatggcatctggatcccgagggacagcgccatctccatcgtcaacggcaaggtgaagcaggtggtgaatgccaggctccagaacgtcgagcgcggccagcttgagatggagctcgagtgcgtccctctcactcaatagcttgctgctcagtaggagtcgagtcctgagtccagattcacttacttgtgtacttcttcattagtctgcctccctctgtttgtgatgacagccatctgaaccgatgcaaatacttattgggaatgacgattctgtgctgtatacttgtatgtgtgggcaaacgaaacaaggatataccatgcccattcctgttgacatgcgagtttagtatacatgttacagttttttgctgt

SEQ ID NO: 39540 - DNA, 378 bp, Zea mays
  Clone ID: MRT4577_136060C.1
aaaaaaaaaaagagttgtcgcgtcgattgcacagcggtttcactccacatcatataacatgtggaaaacaacgcatcaccatcatctggagctctatataggcacatcaattctttcctggtttggtgcgtgtttaattatataagctcaatcaatatctggcatggaggactcgagccagttcatgcagtgggccctgagcacgctgcagcacgatgagctcccaccggcgacgccgccggcggccatcgcctacgacgacaatggctgcaacaccttctcatcagtcccggcgctggggtactccgctgcatcagtcaacagcatggtcccggcggaaccaccagcacaggaaggcccccgggccaccaccgccac

SEQ ID NO: 39541 - DNA, 865 bp, Zea mays
  Clone ID: MRT4577_136061C.1
tgggtacctcgaggccggccggcttaggtgaactatagaaggccggccgggaatcttggttagagtcgagactcgagacttcgagttccctctccgttataaaaccgaacgcccagggcgctccgtgttcaatctccttgcccgttgtgctctctctcttcattcgttcccggcctcaccccgagccagtcgtctcgctagggtttcgccgccgccgccgccatgcctcgccgcagctcaggaaggtctgccccacgcccagctccccgtgctgcttcactgaggaacccgccacagccagcacgccaggctcctcctccagctcctgttcgagatggtggtggctccatgtttggaggaattgggtccaccattgctcaaggtatggcgtttggcacgggtagtgccatggcacacagggctgttgactctgtattaggtccccggaccatccagcatgagactcttgccacagaagctcctgctgctgcccctgctgctccagcgatgaatgctgatgcttgcagcttccattctaaggctttccaagattgtctgaacaactatggcagcgagatcagcaagtgccagttctacctagacatgctgaacgagtgccgccgtggtggtgtgtctgtctaagctgcctctgggattattcatggattttcttttcggatgggtatctcattaataagacaccgtgaaacttcgaccatctccacagcttgaaaccaaacttcctgggattaatttattttgttatcctatggtgttggaacagacttttgtctcttgatcataaatatttaaacgaacctgttatgttggagcaaaaaaaaaaaaaaaaaaggcccctagggcc

SEQ ID NO: 39542 - DNA, 549 bp, Zea mays
  Clone ID: MRT4577_136062C.1
ccggccgggaactaggacctgaagggcatattaacctcgtttcgttcctcgtgcactggtcgtgtttctcgcgtttgcattgccccagctgtccgcccgcgcccgcggtaatggcaggcggagcgctggtgaacgcggactctggataaacacaccccggccgcatgagtgcgctagtgttcttcacctgcctggcgacgacatcgaggcggcctcatcttctgacactacttcagattctccgggagtgtcacgacaatggcgtgaatgctcaaggaattcttcccctccatgaggcaaagacctgcgagacacgcaacgggcgcaggtgactgagcctctgctgatctacttcttgcacgacgtgaacgacatcaacgtgatgcatgttctacatcccgttgctggtcctgaccatcatcttcggcaacaacacgatgctgatggaggacgccatcaagtgcctggacaacatgatcaacgccgtgtcgtacatcgcgtgcgtggacacactgggtcgctcctcgatatgcctgaaatctgccacac

SEQ ID NO: 39543 - DNA, 405 bp, Zea mays
  unsure (1)..(405): unsure at all n locations
  Clone ID: MRT4577_136063C.1
cctcnctgcagcaagctccctcccatggatgtttgtcctattgggcgccgcatctcccagccagcacatgtgcatcttcctccccaccgctccttccctggtgcaggcgcagggagcagctcccctggccgagctcccttccagcagggacgcccaggtcccgacggcccctgcgcagctcctccccgcggccaccatggtgctcgacgcctctccccttcaagcgcagcagcagcttccctagtctccatggcgcccctaacagccatggcgcccttccatgttcttcagcgccctccacgccatcttcctccctggattccccacgccagcagcagggagcacggctcctttcctcttcatggccggcgcccccctcatggcgagcagcaagctggcgcccct

SEQ ID NO: 39544 - DNA, 434 bp, Zea mays
  Clone ID: MRT4577_136064C.1
ggggcattgaactctgctacttatttgtaacaacaactgctaccattcaaccaggtagctgtagtctaccagcagcaattgcttccattaaagcaactagcaatattgaactatcctgcttatctacaggagctacaactactaccattcaaccagctagctcgatgtgagccctgcttcctatctgacacaaccacagtagttggcgttctaccagcacgttgcgcctatacgctgcaccctcttacaagtggaacaattgctgccattcaaccaactcgctctgtcacacccattcaacgttttaccatcatcccatcattggtcggcgcactactattacattcagctatgatgtatagagcaatgctacagtcttgaatctgatgcatgtggcttcccagtaatagcacggtgcatttatagatggtaaa

SEQ ID NO: 39545 - DNA, 358 bp, Zea mays
  Clone ID: MRT4577_136065C.1
aatcatcatctcatacagccataattattctcaataggccggtttaattcatgggaactaacgactctcacaacatcatgtgttgtaaaccacacattacttcataacagacacacattacactatagcagtagcatctcacggcatatcacggtataagggcatcacactgtcctgatgctgcgtcatcagcaaacttctctagtactcgtcaccctcgtctccatcctcgcccttatctaactcaatgccgacctccttgtattccttctttagcgccttcaggttcctatcttcctcataaaacttacctttcttcatacccttacctacgtaccattgcacttaatcactcttt

SEQ ID NO: 39546 - DNA, 802 bp, Zea mays
  Clone ID: MRT4577_136066C.1
attgggtccctcgaggccggccgggaaaaaaaatccccaggtaggtataaaaaaatcgaagtataaactacatggcccacaggccgaggatgtccgatgccaagctgtttgctttacgggccttacggcctcgccgctggcagctggcacttcagctctagccttccaggcaacagcgcactctctcttctccgccaaactccaaggctccaagccgttttccgtccgtgcgagtgtgcgaccgtgccgccgtcgaatcgtcgctctcagtctcagcactcagcagtcaccacctcgcgcacgctgtcaattcagcaatggttcaaaaatccatccaatcattttgcaaaagaagaaggggtgaaccagaacctgatattcaaaaggagatcttgagtgttattgcaatgaaaattagaaagcatattcgtgatgaagttggggatgcaaagttctcaattcttgtagatgaaacatgtgatgtatccaaaagagagcaaatggctcttgttctcagatttgttgataaagatggtgttttacaagaaaggttctttgattgtgttcatgtaacaaacactagagcactgacactgaaacaagaattgtctcatgtattggcaatccattcctttgatatacaaaaccttcgaggccaaggatatgatggtgctagcaacatgaagggagaattgatgcaaaagatgtggtgcctgttagccaattttttcagaagcttttgtttatcgtgaacacagttgactcatcatccaagcgtcacgatgagcttcatgatgctcaa

SEQ ID NO: 39547 - DNA, 833 bp, Zea mays
  Clone ID: MRT4577_136068C.1
gccggccgggccgggatattatttatatcagtgatattatttatattagtgtagccatcagtgtatttatatattccgtgagatcaaaccatagattctttcattcagctctgatggcttcgttccattgcaaaccacctcccgttctgatttctgcgggcggaattccataaggccctcccccctcccctatcctcctccccttgccactccaattcctctgcaaaattttctcatggcagccgacgtttccatccgcactcgatccgcctcaaccacccgctaattcctcctagttctagacttctagtctcctctctctctctctctctctctctctcctgcgccgactcatcttcatcctcgtctcacctccctgctgctgccgacgctgctgccggcaagatcaaatcgttcaaaagagttctgtcgacatggcatctccaagaggaaggatgtcatttccccttcgttcctttctgatgatctgcctcatggctcagctgggagcttccaatgttgtactcatggcgaacaacactaccctgtcgttcgacgacgtcgaggcaatttttactccagcagtgaaaggttcaggtgtaaatggtgtcctttatgctgtggaacctatggatgcatgcagtccattgaaaacaaaagcgataggaggctctgtctcaccatttgcgttggttataagaggcggttgccatttcgatgacaaagttagaaatgctcagaatgctggattcaaggctgctgtagtatatgatactgaagacaacggtgtccttggtttcatggctggaagctcgtctggagtcacatatatg

SEQ ID NO: 39548 - DNA, 325 bp, Zea mays
  Clone ID: MRT4577_13606C.1
gttctaaaaaacaggagaaaaacagtgacatggactaacaagggcccaacaccgcctcgcaacccaaaaacctactaaaaaccgatcaacacagatcaaaaaaaatgcatagatacacattcctgcaaagtgcaaacagaagctaatagaaactaactctaaagaactaaacagcaaatagcactttaaagaacaataaaaatcaggcctttatcggccggtagcagaggttaggagaacctacaacgatctgaatatgaggccatatgaggccataagggaccaacatgtaaagttatgaacaattatgaacaagcgtatgaat

SEQ ID NO: 39549 - DNA, 319 bp, Zea mays
  unsure (1)..(319): unsure at all n locations
  Clone ID: MRT4577_136070C.1
cccggttcgacccagcgtccttttcatanaagtagaatccatagcaacatagagcaacatggcgaccaagaattttcccttcttatgctccttgctctttctacatgtgttgntaacgcgacaattttgcttgaatgctcacaagctcctatagcttcccttattgcaccataccttccatcaattataggttgaggatgtgaaaacttatttatttaaccatataggcttaaacaagaaatgggaggaagcaacatacctttatcgaaattgatgataaaacaatgatcagatgtatatttggtgcaatgattggtat

SEQ ID NO: 39550 - DNA, 181 bp, Zea mays
  Clone ID: MRT4577_136071C.1
aaaatataaaacattttacttcttcctgcacttctcaaccaaaagagccaactcaacaggggctgtttctttccttgccttttacaaaactctcataaaacttcccctcgcttactatgaacttctcgaacgcggacctttaccaattaggaatactcttaccaacccaatttccccctca

SEQ ID NO: 39551 - DNA, 222 bp, Zea mays
  unsure (1)..(222): unsure at all n locations
  Clone ID: MRT4577_136072C.1
ttccggggcggccacgcgtccggcaattgttgaagcagccacttcaccttggggtcatacagaaatggcggcttattgcgcctgcgcactccctccactttcctgcgtttcctcctacagttcaccccgccgattcaggcgctctggtgtggtggccatggccagcgttgggcagaaggtgtatgcgcccggtgtggcggtgtcngagggcaatggcgggct

SEQ ID NO: 39552 - DNA, 850 bp, Zea mays
  unsure (1)..(850): unsure at all n locations
  Clone ID: MRT4577_136073C.1
gggtacctcgaggccggccgggccgggaagggaacttcaaaaagctgggctgagatcgatcgatcgatcgatccccttccacaccaacctcctaccgcgtcgcttagtgctcactactgctcaccactactccgtcccgcgtcgcgccccgcgccccgcgccggcgaatgctccggctctcctcgccgcagaggtcgcgtttatgatcagaagaaggcaatgatcaacttatttgacctcagcgcagggatgtctagcacaaatatgctcacagatcgagctcgtatagatggttctccagcgtgtagaagcaggcaagatgccaagagaacagttgatcccgctaaagtttataccaacgataaagtaggagctagtaactggagctcatcaagaaataaatcaaatgcgtctccattgaatgtggcgttagaaaaggagatgtccagggaattggaatcaaagaagaagtcaccaagtgtggttgccagattgatgggacttgaagaagatctacctggtcaagagccagcattaccttccactaaaagaaatttgaagaaaagacacttaaatggcaacttggtcaaaacaaacaatctccatcgacatcaagagcagtaccattccggtatgacaacatgcgacaaacacataggacccaaagaaacagttgaaatttaaggatggtttatgaangtcagtgaagaaccattgagaacataccatcttcaggaccaaacttttccctagggaaatgtcttccaggagcaagagggacataagggatggaaatttggtcgtcagaagntcatgggaagcaaagcgtctttgctacagatgagaaact

SEQ ID NO: 39553 - DNA, 195 bp, Zea mays
  Clone ID: MRT4577_136074C.1
ttttcttgttttctttaagcaaattgattttttttgggttttttttttgggtgcctgctcattttccagcgccacggggcaaacaaagagaaactgttaaaagaggatggctgccacaacctacattgtcaacccagccgaccgccggaaagacaacagcggatccggaaaaggcaaaaaataaatcgccccccg

SEQ ID NO: 39554 - DNA, 337 bp, Zea mays
  Clone ID: MRT4577_136075C.1
gtatgacgcaatcactgtgaatggtgaccttgattggcaggataagctccacaagtacaataagccattctttgatgtatgtgatgggctattttctaactatacatggccggcaaatgacccacaagattcagctacagttgctggcgacagacaatatgatgtatacatgggtattgatgtttttggacgaaatacatttggtggtggtcaatggactacaaatgttgcccttgatctacttaagacagttgatatctcagctgccatatttgctcctggatgggtatatgacactaagcaaccacctgactttcagagagcgcagaatcattgg

SEQ ID NO: 39555 - DNA, 502 bp, Zea mays
  Clone ID: MRT4577_136076C.1
ccggctaccgcccgcgccgtgcccttgtccacggtggggggggctctttgatccggcgcacggggaccctcctctcctctcccggcgacaagccggcgcccagcaaggtcgaggatgtcatgccgatcgccacggggctggagcgcgaggagctcgaggcggagctccaggtgagaggtcactctgggttcggacttcggaatctcaacgtgattccggcggcatttgatgtggattttgatgcgttttctccaggggaagaagcggccccttcggtactaagattaacttgtgctaagcacaagtaatgacacaatatttcactccagtatggacatggctgtaagtaaaaaagacccaccagatacatctcttgttacttatattaatatccgaaactacaaagtatttgatatgtgcatgcttaagctgcattacctgaagcttggtccaaatacaccagcagtcagcccgacatgaaattcggaggggatgtttataa

SEQ ID NO: 39556 - DNA, 684 bp, Zea mays
  unsure (1)..(684): unsure at all n locations
  Clone ID: MRT4577_136077C.1
ggcnnnggtgcctgcgcncgcgcggcttgnntcntgttygcgatgggttttyngggatcctctyggtaatgctggyttggtyttykctctgycbcttkgstgtcycanctcsgtccccnccactckcggctsagcattccctgtsgatgcncactsctkccsscggstgcygscttcttccgcctgcgccgttgcycyttgyyttgttctgctcgcngccccygcgttttnstcgtttgcngccgcgctatcgngctctgtngtsaccgtcgtsncacastctckctctatggtcgtsngctcgtgccgtcgtctccttcggggcngtacgccaccgtgtctgtagccccctcgtctcgtctccctcttctggctctccctstsctstgcctcgcatctsctctkctcacgggttckcttcttcgcgggcgcnsctcgkcgccgtcttctscngctcstcsgtctgggctsctcktcktcgcgctcksccctcgccctctcctsgggcccgccttktcgccgggtcgcgkctcgcsttctcygctcgccgccgcgggggcgcgctcgtntsctkctctggcggctccgggcggcnsgcgggctcgctctccncgcgacctcgtccngncncgcggcnctcgnctgsngcgcggcgcggtggcgcgtgtgtcgcggccggtcgtg

SEQ ID NO: 39557 - DNA, 1418 bp, Zea mays
  Clone ID: MRT4577_136078C.1
tgggtcacgaaccctgcattcaaccagggcgatcgcaagacagaaatggcctacatcgagaccaaaaacacatccacacacacacacacacgagcgaagcagacgccacgatcgggtttcgagcctccaagggccgctggacccgggagcaagcagcgaacgaacgctctctcctttggagacagcgcctgtctgtgtgtacctggtggctggcactctgtgcccgctcacagactcaactcatcctcatgagcatcacacatgttcgatgcctacgtactatgatggccatgaaccacctcctcacactagctacgactacgataagataaaaaccaaaccatacgaaggttgcctgcatctgcatacagggaaaacaaaaaaaaaaacactctggactgactgattcctcgttttgcaacgggcccacagggcagtgtccggggccgataaaacgtgggccccagtcgccgcggtgggtccctccctcgtcctagacctagagagacggctggaagttgaggcgcgaggtgtaggtggccttgggcgtccagttcctggggatcacgtcgcgggccgtgagcgtcttccgcgcggacagcgtggtgagcctcacggagaaggggcccacgagcgggccccgcaccaggcaccaggttgccccccacacgtgccgcatgtccagccactccaccgagttggcctgctttatctgcatggatcctatgtcgccctcgccgtcctcgaactcgacgagcagcgagagccagaagttagtcgagccctcgttcacacggaacgcgatgttcttcccgccgtacttgcaggccgtcctcctgtacacgacggacagctggccccggtcgcgcagccggccgccggccccggcgacggccatcctgctgaacgcggcgccgctgaggtcgaagtgggtgcggccgaacgcgcacagcccgccggggcactcgtccgtgacgaccaccgtgacggcacggcgcgagcacacgccgcggtccaggcacctgaccttgtagcaggcgccgcagccctcgccgtccttgaacagcacggggctcaccgaccccacccgcgccttcatcggcaccacgtccaccagcgtcccgtacccgcacgcgccgccgtcgctgccgtcgccctctgcctcgccgtaccacgtcgcagtggccggccgccactccgcgtcgacgcccgccttcttggccgactcgccgccgccgaacagcaatgtggccgagacagggggcgcgggcagcagggcgcagaggaggaagagagcgagagcgagagcgcgagaggaagccattgagggattgggtctgctctggctccttcctcgcccccgtccccttccttcgctcttcttcttcttcccctagctggaggctggactggactgg

SEQ ID NO: 39558 - DNA, 614 bp, Zea mays
  Clone ID: MRT4577_136079C.1
agaggagtgcgttgtccgggatgggcagctcgtcgcggaacgagtgcgacggcgtgtacacccggaggtagaactgctggcccgggtacctgcgcgcccacacctccgacctcatgttccacatgcccacgttgtccagcgcgatcagaaccgccgtccaccctctcgggtacacttgcacggtacagcgcgagacagcgtccacaaggttgtagccatccctgctcttcttgctccacgtccccacgtccattccgacgacgaacacgccgtagccgtcgaggtgccagctctggacgccgccgtcctcgccgttctcgagcacgacctcgacgaaggagcggtggtccgagtccatgaccgccgtctcgttccgcacctcctccgccggcggcggcgcgtcggggatgccgccgagccggaacacgccgctgatgttgtagtgatccgccagcttgagcggcgtgtcggcctccgcgaacgagacgccgttcaccgcgtaccggcgcctgccgcggaccagcccggccgagctggccagccggatggtgcgggtcacgctgatggagccgtagcggtacgagccctgcgggttcggcctcggcccggtcgcc

SEQ ID NO: 39559 - DNA, 491 bp, Zea mays
  Clone ID: MRT4577_13607C.1
acgcttccccatgactactccgtgcgtgcgtgtggattgactcgcgcgcgcacacaaacgccactccaccccacccccttccgtccgcgtcagtccccctcgtgcaccgcagcagcagccagcggcattcagcgccgctctcgctctgcttttctcgctttgctttcttctccctcctgctgctcccccctcgccggtcaccacctccggcctgtcctcgagctagcctgccaggcgcgacacagacgccggacgctcggtgggtgatacgagatctggtgggctagctgagcggagacgctcggccacctatgggctgggcgagccggcgcggcctcgccgcggcgctcctcctccacctcctcttcctcgccgctgccctcggtgggtgcgccgcgacgagccggaggagcggcagcagcggcggtagagcagcgctggagcagtactcgtgggaggaccctgcggaggcggcgcggcggagggagctg

SEQ ID NO: 39560 - DNA, 416 bp, Zea mays
  Clone ID: MRT4577_136080C.1
aaacgttggaaaaaggcggtttaagaaaagaggaggaagaaacaagaagacaaaaaaagggacaaaattttggggttttttcacaaggggggttttacaacatcttttaaaagagaaccagaaacagaacaccataatgagcaccaagatactgttttgcagaggatgggccagtagaggagccgagtattagggggccacaagcattggccaacaacaagggtcccattacaaactacagcgaactgacaaccaaaatgaaaaaacgggggaaaaaaaaaaaatgaactaaaaggtgattccaaaaaaaaggggccggaaaaaggtggccggccggagtaagcgaacgaaacttgcaagataggagggggttaaaagggtgggggaatgaaggttatttgagatttctggggaaa

SEQ ID NO: 39561 - DNA, 361 bp, Zea mays
  Clone ID: MRT4577_136081C.1
gggggcaaaaagtattttttagttcaaaaggggaataatattttgttacaaggtattcctttaaactcctctttaatttacttaagcctcacccaatacttccatgaagttgatccacgtgggcccagtcaccattttgttgtttcccctgggcctgggccacccccggggcccatcgggtccattatttagtccagactggtcccgctccttggtttgttcctccagtacctcgcctgtgtcactgacagaaaaccacactttacggaacggaacggggaaacccaaacaacttgtgggacgaccgtacgtccttagtttaaacagaacttaaatggaaatgctgtttggaatgcccttg

SEQ ID NO: 39562 - DNA, 205 bp, Zea mays
  Clone ID: MRT4577_136082C.1
tcggccacgcgttcggccacgcgttcggttcaaggggacctggacaaatgactggacaacccacgataaacgatccaaagagtaggggcgcaacaggccgcaattaccgtgaccgtcacacccacaaggtggtggttcgtgggggacacgtttcttgctagccatgggccggggcacaaacgagcaagctccgttcggcttggaa

SEQ ID NO: 39563 - DNA, 359 bp, Zea mays
  Clone ID: MRT4577_136083C.1
gggagaacgtggacagtgctcatgctgctttcaataaggactacaagctagctaatcttatcttgtcggaagaaggatccgattccatggaagaaaatgccaaaggtcttggtttataaaaaaggcttctgggggcgactagcttatgagttggttattttatatcgtcccaatttcgcggatcgcgcttgcgtattctgtgaatcaatcaacccaagctattgttatgaaaatgtgcgcgatgttagcatgtgaacttgcgaaaaaacacatgctggatcagtctgaataagtgagtatgccgctctatgtggtcatgtgcgactaccacaatgagcatgtacgtatggtgaaatatc

SEQ ID NO: 39564 - DNA, 274 bp, Zea mays
  Clone ID: MRT4577_136084C.1
atggttcatgaacaaatagtacaggaaagatgaacaactttcggcatggtcatacaagattcacggcaaagagacatactggatagcatgcacgggcgtactactaaggatagctactacacattggttcttgcatacagagggggagaaccacaaaggcactgtctgaaggctgttcctcatcagcttacactggtttgacaatcagctatgcatacatccttacttgaactgctcgagccaattggtgtctgtgcgtcagcctgacttattg

SEQ ID NO: 39565 - DNA, 545 bp, Zea mays
  Clone ID: MRT4577_136085C.1
cacgccccaccaccccaacagagccttaacgtgccttgccttgccctgccggggatccacctgcacctcgccgaccaaatccccgcacccaacaatcccccatggggccgcaggccatcgaggcgcaccgcgcgggcgcggaggcgcaccgaggggcggagctgagcgcggagaagtcgacggagctgctggcagaggcgcacctgccgcggggcctgctgccgctgtttttttttgaggaggccggctacaaccgcgccacggccttcgcgtggatgagccagagcccccgctcacgcacacgttccgaccgatcgcgcgccaggtctgctacgccgccgaggacaccaccaccttggaggaccggcggaggacgcgcacgaccggggccaacaccaaagagccgctcacctgggacacactatacgacatgttgcgccgacagggacgacccctgcaagaccacctgcaagacgcccacgcgggcatcggcaggacctaccgaggtaccgacatgcctaaggaaggcgccggtgacaacggcg

SEQ ID NO: 39566 - DNA, 522 bp, Zea mays
  Clone ID: MRT4577_136086C.1
tcggggttggcttgtactaacaatcacggttcgggttcctgatgagtgaggttatactaagtccggatgggggggacagcacctatagatgggcaggtcatgcggtgagttcgcattgcttcttcggcagcctgggctgaacacacggactgaccacctgactcacaacgactttaaatcatacacacgagatggccgacatccaacacatgacgaaccaagagaccaatgttgactagggttaacactcacggaccttatcaagataacatgccctgccgaaccccaccgatgacatcctccagttggagctggacgtgccgtacatgacggcacggttggcaccgtcgtagcctaggccaccacgaccgtatccgtcggcgtcccatcgtagccgtcgacgccgccgttaccgacgtggccgtcaccgtgatggccaccgccgttaccgccgtgtccacggctaccatggtggccgccgccgctaccgtgttcacggccgccgctacactggtcccaacc

SEQ ID NO: 39567 - DNA, 219 bp, Zea mays
  unsure (1)..(219): unsure at all n locations
  Clone ID: MRT4577_136087C.1
gaggtcggcggcaccaagaagcaccattttttccttaggattaaccnnagaacaaatcccggcaagggtaacagcatccattgatccacaacacatgctggttggtgcctgggncnntgtgaaccgagggtgaacaccatcctgacaactgtcaccgagggaccctgcaatcaaaaacacagatgggcgaccgcccacgcgacgaacgccggtaaaccc

SEQ ID NO: 39568 - DNA, 426 bp, Zea mays
  Clone ID: MRT4577_136088C.1
agtatagctcaggacttgattgaattatttgcatggcatgaatgcctttaatttgtatacaagaggatgaataacccaaaacatgtgtgggatcggaccaaaaagtgaggtgaagtagctgtgggaagagaaaaatcttttacattggatccaatagcaatgtcaaggatgcaaaaatactaatcttgacgtataagtatatatgtatagttgtatatatatgcatgtatatatgtactactccttccattgatcgccagctggagatgcaacacggccctcccaatcattcaacttggaaatcaagaaaaggcaaggatgacacatttttcatcagcttcttcaggtcccactccccatgcatgacatttctgctcatgtactgctggcgggcccccttccagtagacattattgctgccactgt

SEQ ID NO: 39569 - DNA, 277 bp, Zea mays
  Clone ID: MRT4577_136089C.1
atctctatcattatcagcgcctgacgaaggttataccccgagttgctgccaagacacgttcaaggatccttgcccgaaatactgatttccgagccttacaatagaagggtagttactctcaggaccccatgaccaagggccttccttggtcttgactaacagacaacaccaacactaactcgttttatacaagggtgctcctaactaggcctactagaccatataacatggcatattagaataagccctcggagccccttgcgtcctagggcattta

SEQ ID NO: 39570 - DNA, 351 bp, Zea mays
  Clone ID: MRT4577_13608C.1
tcccgaccgaccacgcgttctataatgattgcaactgtatctatttatgactcttgtgctgcgttgctagccaaatcggctataatccctgcactcattgagttgctaaatgctcaacaagaagatgatgaatttgtttgtcagataatttatgtcttctaccaaatggttttccatcaagccacaagagatgtcataatcaaggaaacacaggctccagcatatctcatagatcttatgcatgataaaaataatgaaatccgaaaagtctgtgataatacattagatattatagcggaatatgatgaagaatgggccaagaatattcagagtgagaagtttcgctggcat

SEQ ID NO: 39571 - DNA, 714 bp, Zea mays
  unsure (1)..(714): unsure at all n locations
  Clone ID: MRT4577_136090C.1
gggtacactccgaggtctgccgggtacaatacaatgggtccaagatttactgttgttgggaatttagctgaaagctttgattacaaaaccgagtcgccattcgccaaaagaaaaagggaaaaacgtccgcgggggaaaggtggaagagaggtgggagcgaaggaaaagcttcccgagtgaagaagtgtttcccaaaggtgtggataaggccgacgcccgacgcggttggaggctccggctcccgagaaagtggggggctttgtcgcgggcctagctccggcggaggaggacgaggcctgctggtggacttgctcgcccgcctagggttttgggctgccggccggcttgttcggaggccgcaagtctaatggctactgagagtgctttccgattgattggtgggacaggggctagggactggagtaagggatttggtgcatttggctcttcagcaggtgccctatcaggggaagacttgggatttgtggataatgacactggggtttatgggggctggaacaaatctgttccaaatcgtagtggaagcgcaccgcctagcattggaagaatctcttgctggctcttggccatctcattgatcagcagagtgggagccttgaagctagnttgacaaccttggataacataactgacagttccaaatttgaggagcaactacgtgctgatccagcatttttttgagtattatggctc

SEQ ID NO: 39572 - DNA, 994 bp, Zea mays
  Clone ID: MRT4577_136091C.1
ggaccctaaaaaactcgagagccggccgggagccccgagcccaacaggacagtaggggctcccttctccagttctccttgcttgcgtcttcccggtcccgtctgcgtgcgtgcgatcgacgcagaggcgcgggcgctcgcaccaagccgatccgatggccttcatgcgctcccgctcaaatgcatcttctggcatgggagttgctcctaacattagggagacgtttgtcgagctccaaatgaagaagacattccgatatgttatcttcaaaatcgaagaaaagcaaaagcaggtagttgtggagaagacaggggccactactgaaagctatgatgattttctggcctctctcccagagaatgactgccgatatgcgctgtatgattttgattttgtcaccggggagaatgtgcagaaaagcaagattttcttcattgcctggtccccgtcgacatcccgcatccgtgccaagatgctttactccacctcgaaggaccgcatcaagtatgagctcgacgggttccactacgagatccaggcgaccgacccatccgaggcggacattgaggttctgcgggagcgggctcactgaagctggttcgccttcgaagaagaagggacctgtggagggctgtgaaccttttggtcagatgcaaattctattaccaatgatgaaagctcccgccttggtatttgttattaagttcctgtaagcatgtcgtttaggcgcgatgcgtgactctagctggtgaagcgttatcaaagctgtatctgtaagagttttggttgtcgagcctgtaaacgaagcaaggtttgcgaacttgttatattgtggtattgatggtactggattactgactgtgggttcctgggaatgcctgtgttggtctggtatgtgggcgtggttgtggttcgaccgggaatgggccctgttggtttggacgtccgaatctgttggatagattggtgttaatcaaacgaatgctatattgct

SEQ ID NO: 39573 - DNA, 333 bp, Zea mays
  Clone ID: MRT4577_136092C.1
acgcccacgcgtccgtcccgttcccgatcctcatcacctcaaccccgcgccgccccctccccaccaccctcgccatggtcagcgccgccgcctcgccgccgccgtccgggaagccgacgcaggacgagctgaagcgcttggcggcgcaccgcgcggtggagctcgtggagcccggcatgacgctgggcctgggcacgggctccacggcggcgcacgcgctggaccgcctgggcgacctcctccgcgcgggcgcgctgccgggggtggccggcgtgccgacctcgctcaagacggatgcgcaagcggcgcgcgtcggcatcccgctgctcccgc

SEQ ID NO: 39574 - DNA, 392 bp, Zea mays
  unsure (1)..(392): unsure at all n locations
  Clone ID: MRT4577_136093C.1
gttcaaacataagtttgtggtcnacaaccgatgtccaaatctgttttgtttgtcccctgggtgtagaccctgacctgcgcattcgaacttcttatctgaatttgtttattttttatgcgcattagcccttttgctaggttgttcaaagatgatgttcgtgggtttattgtggcctcgccgaaggaggagcccttgcggctgcttaatgggtgtatatggcttggagtgctgcatttgttctgccgctaacgtgttggttggttccgggtgctcgttgtcccagggtccgaggtttgccctggattcgtcatttttgcccgcttctttatgagtggacaccgtcctgttggtggtcttgtgttttccgatctgcttggggtactgcgtttttg

SEQ ID NO: 39575 - DNA, 688 bp, Zea mays
  unsure (1)..(688): unsure at all n locations
  Clone ID: MRT4577_136094C.1
gcttcccctgttcgcgcgcgaccaactcttgccgccgccgccgccgccggagagatggactcccggggcttcgattccacgggccgcgagttttccagcgccacggagatgtgggcccaggagatcggcgccaccgcctccgcctccgccacggcctccgaagtccctccgggcgccgccgccgccgccgccgcctcaagcaatggggacgccggcgaggaggcgggcggagaagggaagcgcgaggagtggtactccaaaggaatcgcctactggcagggcgtggaggcgtcgaccgagggcgtcctgggaggctacgggtgcgtcaacgacgccgacgtcaagggcagcgccgccttcctccgccccatcctcgccgagcgattcggcgccgcgaagcgccatctcgtcgcgcttgattgtggctctggcatcgggcgggttacgaagaattttcttatcaagcatttcaatgaggttgatctcgttgagccagtagcccattttctggaagcggnacgggaaaatcttagtagctgtatggatgtagggcatgatacacacaaggctgcgaacttttattgtatacctcttcaggacttcactccggaggaaggaagatatgatgtgatatggatccagtggtgcatagggcaacttactgatgatgattttatttcatttttta

SEQ ID NO: 39576 - DNA, 629 bp, Zea mays
  unsure (1)..(629): unsure at all n locations
  Clone ID: MRT4577_136095C.1
ccggccgggatcaaccctcaagaactccatcgtcgccatggaagattagagttagcacatgaagggttccgcgtcgccatacgtggacctcgcctttgccgccggtccaacctggggcaccgggtcggggtggagcacgagatccggggagactggtccgttgattgcattggtgcgagggcggtcggattctccgcaattgctcgccggtacacagaattcgtagtggtaccacgcctcatcgtgggccaagttccccactgcgccataagtccataactggtgagaagtactcctcttggtttgccttagcctccgctttgtgttgggacttccgtagttggggatcgtgaaccaacgcatcggcacggtagggctcaccgggcagcgccggcgcgtgaggctttgccccgccgcgctgtttcgtcggagttggggtggatcgcctgtgccgtggatctatgggggtgaccaagatctgattgggttcaaactggatgtagaccgttggatcatatgtgtgcgacctggattataagatcgcgtaccccttcgttgagggattcacggccatccgatttggatctggcgcccgagacacanaaaaaaaaaaaaaaaaaggggcggcc

SEQ ID NO: 39577 - DNA, 587 bp, Zea mays
  Clone ID: MRT4577_136096C.1
gcaagagcgaccatatatcatacaaggcttgcatataaacaggttgcatgcagtaccttacaacagagtgtgactcatacgattacaacaggtcatggaaataatctatgctatccgaggctgtataacaactcatatcacacctatcgaccgggttttatccatgacactatatcaatctatttcgtagtgcatgagcttttaacacatctaggtataaagattacaatactcgtccatcatgtactatgacatataagactacaagtattattgttaacggcaccacaggtctatccttactctcatatgatactcttatgtaagctgtgccgctctatatcattgttccttatagccgtacatgactgaagcgcgcaaacaataaagccaataccctaacctacaagttcacatacacttgtccaaacagaggtgaaatccactatacgatcggtacacactgagatggatatacaggtgatcatgatcttaatatagtgaggaccttccttaggataatgtcacacgcataaaccataccctgtctgagaaaccacaattccagaccggaacattaaagccta

SEQ ID NO: 39578 - DNA, 535 bp, Zea mays
  Clone ID: MRT4577_136097C.1
aaacgcaggaaaaatacgggtctaccatctcttaaccatgtgacaaagcattgacggaaaacattagccctcgtcatgaagcacagctcctaacccactggctcaaacacatcaaacaagaagacatgctcctattagggcatagcattcactggacagtttacagccagcggaatgttattactacacgcacctaatggaaatttcagatattacccaaaaacactaaaaaaggcaggttgacttttcgcagtaccggctgacttctaaagtaatttgttgagatattataacctcacctttaatgcacatttatccttttactttatagcctttccttgattttactttcccgggattgtctgacggggccttagtctaccattaaaagcaaactgttcaaattcatggtcaaccttcccttcagtgattttgaacggggaatccagtcttccacttgtaaatgatcacagaggaaccaacaattgccgggatattaaaggatctaaaagaccaaatgttgttgccattcata

SEQ ID NO: 39579 - DNA, 104 bp, Zea mays
  Clone ID: MRT4577_136098C.1
gtcacgagtccggaacgacctagcgcgcgatgtcgcgagccaattcagcggtccctaccatcgcagacgtcgtcaaagcatctatacaatggcaggttggttca

SEQ ID NO: 39580 - DNA, 282 bp, Zea mays
  unsure (1)..(282): unsure at all n locations
  Clone ID: MRT4577_136099C.1
tcccacattcccctcccccggccctcgcctattcgctcccgctaaccggggagccggggggcccnncctaaaacaatccagcggaggagcgaaatccatacggtcccgacaccgtaccacatgaccgacacatcccacggacataaccaagggaagttcaggaaacggatcgaaccgagggacttcattaaacatatcctattagaggggggggggcatnncaaaaaaaatcaatttacaacataacacctaaatatataaaatnctaacaaaaaaaacaca

SEQ ID NO: 39581 - DNA, 494 bp, Zea mays
  Clone ID: MRT4577_13609C.1
gggggaaaaggggccaccccctggtgggtttccaaaaatcattacccttttttacaagggaaggggcgtttcccaaggggggggcccctttgaaaaaaccggccccccctggggggggccacaaagggaaaattttggaacaaataaaaaggggcaacaacccccaaatttaggaggggggggaaacattttttttagggaagaccccggaagcccggggatatgcttgaaccggttcctttggggcaaaggggttcccattcgggggaagggctgtaagtaacaaactcccagccccaatttgagagggatcacgggggcaaaagaaacaacaattcactcaattcagctccttttttacttaaagatcaccacttcaacacacgttatattttgttgctggggaccaaaaattagggcacaagggagggggctgcaaccttgataaaaaaaagggttttttaccaaaaaagatgagggcccaaaaacaaaaa

SEQ ID NO: 39582 - DNA, 379 bp, Zea mays
  Clone ID: MRT4577_1360C.1
cggtcgaccacgcgtcgtccacgtaagtccaccccgctccagccctacagcgaggtgttcggcctcagcgggtgccagggcaagctcatccacggccgatgggccatgctcgcaccctcgggccctaccgtcagtggctcaccggcgtcacctggcaggacgctggcaaggtggagctggggatgggtcctctacctgggccagccgctgccgtaccatctcgacgctcatctggattaagtgcttggatcggctcatcgagttcagcgcaacgccgagctcacccggagaaaagctgtccccggcggctctactttgaccgctcccctggggccgacccggaaagagggacggctgagctgcggagatcaacacgcgc

SEQ ID NO: 39583 - DNA, 502 bp, Zea mays
  Clone ID: MRT4577_136100C.1
tcggttttttttttttttttttttttttttttttttttttttttttttttttttttttaaaaaaaaaaaaccgatctccaacaccaatctttaaaggggatgacccccattgtttttttgctaacatctttaatctttcttacattttgcaggggaaaacaatcgaacacaggacagggggtaaactaatataaataacaaaaaaagcaggggatttttttcgtcggaggagggccctaaatcacggggcgggggcaaaatatatttgatgccccccgagccaaacccgacccaaaaccggatgcatggaacaataataccaggcggggcaaaaaaagaaaaaaacgaagagggaaaacccttggcccctccctgggaccccttgttgatcaggaggggttgacctggcggcactgcttcctgatctggccgtttgccccggggagcacttcaacccggcccatttttttaatggacatggaaaaggcggcgaaaaacttga

SEQ ID NO: 39584 - DNA, 807 bp, Zea mays
  unsure (1)..(807): unsure at all n locations
  Clone ID: MRT4577_136101C.1
cattgggtacctcgaggccggccgggaccaactttcaanaccaggcttgtcacgggagagcgatgccaaagcaaaccggagtgaaagcgaacggaaatctagcggacgacgagaccgcgattaggaggaattggaccgtccgcaacggcgacccgctcgtgcacctccatatccggcagccggcaccacggccacggccgcgaggaggcgaagaacgtcgtctggtcccgcaccggatcgctaagctgtcatgggcgtccgatcccgaggtgttctacatgctcaacgccgtggcccggcagaaagagctgtgcgtggcgatcaacgtgtgctggggtgaccagagggagaaggtgtgcgacgcgacggaggacgggaggagctccatctcgagtcgctcgtcatggctagccgtggcctcggccagatccaaaggtaaggtacgcccgctgtagcaacagcattagcagttctccctgaaacaaaacaaccattcaaggctcgcgacatgctcgacgttctgagaatcaccacacgcaaagcgtcgctcatgatccatcatcggacacgaaacgcagtccagtcatatacggctcgaacttccagtgtgccgacgaaatgatacagcacgcgtatcacctgcatatatctagcttttccttattgtttttactctgctggacgaatttatgtgctgtctgatgcatcatgccctgtgactgtcgtcaagtcaaaagtagtggctggcctctaatttccagaaatatgaatctgcaattaaccaaaaaaaaaaaaaaaaaagcggcc

SEQ ID NO: 39585 - DNA, 823 bp, Zea mays
  Clone ID: MRT4577_136102C.1
gtccgctttcgcctttcccctcctcctcctcctctcgacaccaccaacacaacaccactccaccgccgttcgaatattccaagcttgagattggaggaggaggggaggggagccgagcgcagaaccctaattacctccatcgattgctaacagctcagatctcagaggcaggggaggtaaaatgccaagagcaaatgagatgttcagggcagattctagaatgatggtggtttttggtgccttgacatcgaaaccagagcagctgacattcgaagaaaccctcagatttgtcaagaaagtgaaggtgagttgaatgttttaataatatattatgtcatcgcatggttttcatctctgtgtaatccaaacgcctattctgagtcattgccttgtctagtaagttgcgatgattttgcatttttgctggtaccattcacttacagtctagtactgaatctcatctcatgttttgatgcatagagttaccaactatctgaaatctatgtgattggaggcacaattgtgggtttgtaaccttgggattgcgcaatgtggtggtgtgtgtgctcgtgtgcagtccttgtaatcgaaaaacaaaaacatccaaaatgtggggtttacatgtattcctacttgtaagatcctgctgatacctgagtctaggattttgagtgaacaattttgttgaactttttttaaacctacactccctctagtctaaactattatagttcactttagctttgtcctaagtcaaacttatctaactttgaccaaattttagaaaaatgtgacaacatcgagaagctgaaataatgcccta

SEQ ID NO: 39586 - DNA, 375 bp, Zea mays
  Clone ID: MRT4577_136103C.1
gattaaagagagacgtcctacagggcttatatgatacaaaatggactctatggattggacccaccggctggacagagaggaggaatgggctctatttcaccggtcctatagaggtcgatccctctgagatcgaatttctcgaacagatcggtagcggaagtttcggtgccgtgtacgctggaaaatgcagacaaaaggatgtcgcggggggggttctggccaagcaagacttcgatcagaagactttagaggccttccgtcacgaagtggccgttatgtccaagatctatcaccccaacgtcaatgtttttatgggggcttgtaccgttccaggtaatatgatgatagttacagagttaatgagaggtgagttgg

SEQ ID NO: 39587 - DNA, 166 bp, Zea mays
  Clone ID: MRT4577_136104C.1
tcgcgcgcgtggaatctggctgtccctacccgcaggctggtgccagccacctgcctcggcatcgtcaagctgcccgctccgtgccggctcccgcgccctcgcgcagaccgcgccgggtggcgctaactgcctgaggcgccgctggacgtggcatccccggcggggg

SEQ ID NO: 39588 - DNA, 352 bp, Zea mays
  unsure (1)..(352): unsure at all n locations
  Clone ID: MRT4577_136105C.1
gacaggggacacnangaacngacaggggcgggggagccaacaangccnagcacnnncgaagggnnnccccccaanaanggagnccncnaaacaganganccagccaacnacngnggacccagccangcagngcccnnncncaaganggggggagggggggcanggagcncgcngnngcnacaacncnanccacccngaacgncaaggacgncanngangncangccngggcccangaaaacngcngngcncngcngaaccaagccgaccnnggcnngganncnnggaagcacggngcnnggaacaaccagcancgacagcnngangcncccaacnggnngagcnaacggcca

SEQ ID NO: 39589 - DNA, 168 bp, Zea mays
  Clone ID: MRT4577_136106C.1
aacaaaaggggcaatcggatgaggagtatttctttaatacggggggttcacccacactactcccaaaatcaataaggattcccatagccatccgagccttcgtcttcatactaatgaaccacgcacaacagcaccaggcctaggcatctacaaaatttcccaaccaat

SEQ ID NO: 39590 - DNA, 155 bp, Zea mays
  Clone ID: MRT4577_136107C.1
ggacacttctgagggagtccggagaagcttgcgttccttcggccctctccctaccaacggtcaccgccacgccacgccgtctcggtacatatactagcctgcctcgatcggcctccctcgcattccccgtcgcccaagatcctccactcgattcc

SEQ ID NO: 39591 - DNA, 407 bp, Zea mays
  Clone ID: MRT4577_136108C.1
tctcctcttttttttttttttttttttttttcgttgtttttttttttttcccccaaggagaatccttggtctgatcaatcatggaacctcctaggaacattgggctatattttggtaagagactaagctctcaaccttttaaggccgcacattcatggttggggatccctaccattcagcttttagggggggggccttggtccaatttagggcccattattgatgatttttctatagggggaccatcccggggcctttggtttttacttttccctaaacctttttccggcggagccacctttcctttgacaggtgaaatatgtagcgggggcaatgctggggggattttgcccggcaaagcttttgcagttgaagttgtggcccatttttggggcaaaaactgtccc

SEQ ID NO: 39592 - DNA, 156 bp, Zea mays
  Clone ID: MRT4577_136109C.1
cattagcacagcgtctcgagtgattaatatattcgaagattttattgcccggttcaatttggggtttcccccaagggaccttccgccccattaattttttccagttgggaaaaggcgtgatgtttgctttaaccaaattgcactatttgaagggaa

SEQ ID NO: 39593 - DNA, 728 bp, Zea mays
  Clone ID: MRT4577_13610C.1
aagaagtaagttgctaaagttttggactgtcttctttcatttttcgtctcacctattctatttctttcaggaatcagaaaagcatatggaggaactatgctccaaaatcaaggtgggtgatagatgtgaagttgagcctggtgccaagaggggcactgtaaaatttgttggtagagctgaagcccttggacgtggattctgggttggagtgcaatatgatgagccacttgggaagcatgacggcatggtgaaaggcattcgcttctttgagtgccctcaaggtcatggggcaattgtgaggccagagaaagtaaaggttggcgacttcccggagagagacccatttgaagacgaggacgatgacgagatttgagtgcgtgtgcgtttggaaaagcaaggggaatgtccttgttgaattgcattcgaaacgtgtgtaaaatgaattcggagatttgagtgtgcgcgcttgcttgcatcttcttgggcaatcatagtgatcacatttcaaggcatgctgttacatctctactatttaagcgtgagctaataaattttccctccaacgcagagtatccaaaaaatggggtggattcgaatcctgctcacttgtataaagcgcatgacttctaccactataacttatttctgtctgtgttatataaattagagatattttgtgtgtatgatactaataattttaaaaaatataatatcatttaagcaaggtt

SEQ ID NO: 39594 - DNA, 221 bp, Zea mays
  Clone ID: MRT4577_136110C.1
accccgccttcacgcctccctgaccaatttaggtcccgtccttttccgacattcacaggggggacaggaaattagtggtcatggcctcgattccggcgacgacctttgtcgtcatctcatccgtccttttttgtgccgcggctggcaccgccttcgtcaacgaccttccccgactacgtcatccagggccgtgtttattgcgacacctgccgttccgggtt

SEQ ID NO: 39595 - DNA, 316 bp, Zea mays
  Clone ID: MRT4577_136111C.1
tgagtagctggtacagcggtcgccctttttttttttttttttttttcgggatcccagctccataaaacaccatcattcatccgagtcaaacagggatagccaattaagctaattccagactgcttgagggcaccgttacccatacagctcgcgccagggtgcctgatcaatatttgggggttcgatccttgtccagaaaacaaaaacaacggtgaatttcaaagccgagtgcttggccaaatgctattttaaaaattgcaacacctcacgttcagatactgttgggctcttgggtggctgataacccccatttttg

SEQ ID NO: 39596 - DNA, 437 bp, Zea mays
  Clone ID: MRT4577_136112C.1
cttccatcaaatgccattggacttgcttccagggccacttattagtcccagaattgccacttgaatgggtggttctttccggcccaaaccagaaggaaattttccggggccggagggatccttgggggaacccgaaaaccttttaccagttcaagaagaattcttgccttatggcctgacccacttgttttggttgttccccagttaagaacctcccctttggccatggttagtttaccaccttcgcttacggccaaaaaaaaacccccccgtttttgaatggtggttaacctttcgaccaactggtaatgggttgggtccattaatgcctgcaattccaatggaccccccttttacttatttggcaaaaaaccagggccccttgacctgcttgtggcccttttttttaatggtccatggaacctggttattgggtg

SEQ ID NO: 39597 - DNA, 420 bp, Zea mays
  Clone ID: MRT4577_136113C.1
ggggggtgtttttttttttaccccaaaaggaaggggacccggcaaattctggcacacggttttttctggggcccgcggaccccacacaatgcgcctaaggattttggtcgggcaaaaccccccaagggggccaggggaggactccatccctttttaaagccttttggggggaaaaaaatccgagtattccctggcccccgaaaaaaggaaagagggatttaaggctcgcaccgggaccccgaaacactttattaaatggcccaccaaacccctttccctgaaacgaccggaagggggcaaggattaaattacttgccccaattgcatgggccgccctggcagaggcgggcaaaatagggccgggggaaacaaactccggcggccgctttatacccgcccacggcggaacgcttgggggga

SEQ ID NO: 39598 - DNA, 623 bp, Zea mays
  unsure (1)..(623): unsure at all n locations
  Clone ID: MRT4577_136114C.1
agttaatgattcgcataaaataagaaagttctctgcattattgtatcgagagtaggaaaggtatgatggcatgtgagtatttggatttgttggtgctctttacccttcagcaatagaaggcgtggggagaagtttcagcgacagaaatgcctgactagttgattgatcttctggatctgaatgctgatgatttgcttcaaagacttagtctcatgtagtcatgtcatttgtggagtctgctgacccatcaggctctggattttgtaacacgaactttgatatgcttctgtgaaaaaatgggtaaccttacataagtgtttagacggtttagtggtgttctgctcttttctttacggtactgaaaaacattgactgttagggcttgttcggttagctctcaatccatgtggattgaggaagattggatgagtttgaatcctaaataagtcaaacttctacttaattttttccaatcccatccaatccatgtgtattaggaaaaaccgaacaaggccttagttgggttgttaacctggttgaatgttatacacacttagttcaactgaattaaattgtttatttgattgtttcannnaaaaaaaaaaaaaaaaaaaaagggcggc

SEQ ID NO: 39599 - DNA, 448 bp, Zea mays
  Clone ID: MRT4577_136115C.1
agctcgtaattcggctcgtgctcgagccgaaaagatatcatcatatcaacgaagctaggccacaagactagcctgatacaccgtgatgcctgcaccacttgaggaagaaaggttcatattgtgagacaagggatatatgtaccatatcactgctctatcaagcatcagttctcattatgattcccatggacatgtggttgtccattacacagatgttgatacaaatgttcagctcctttttaggtaccgttgctcatgttgcagcccgaggttgtagctacacaggaacacaaattcagggatctgagcttcaatgatctatctggcccaatactgtctatactgggcaacttgacatacactaagaaattataagctattttttatttgttacacatttgtttcatagttgatacatcagtgatgattttacctatacagtgagttg

SEQ ID NO: 39600 - DNA, 137 bp, Zea mays
  Clone ID: MRT4577_136116C.1
ggctttcgactcaaggcatgagcgccctatctggcaaaacgcgagctgcaggcggatccggctagcactatcgtgactcggactacagctgggcctgatccgggccgtagctcgtgcgtggcaggaaaggagatcgc

SEQ ID NO: 39601 - DNA, 320 bp, Zea mays
  Clone ID: MRT4577_136117C.1
cttggggaacacaccactagagaatggagaaccacgtgatgaacacgtgatatcgtgggaacccggactaccagctgaggcttaagcacaatactacaactagtacagacctatcacaacgcatgctacatggtattgaccacccccactaacccactcatgggcacaaacacacagccgaggaacaccgaaccctgttcaaagactacgctgtactaatgcccctccaattaaaaggcagagactttcgcatttacaacctgaaaggagcaaccgtgactgcttggactccccaactctccgtgaaattcacacctgct

SEQ ID NO: 39602 - DNA, 192 bp, Zea mays
  Clone ID: MRT4577_136118C.1
aaggggcgagcctcacccatggcgaaattaaccacaataacgccgctgaagataggatacacctatatcaagagggacgagcccaacggcacttagcagcatccacaacagaacaaagttataacctgtaggaaatgaggaggacgccggccaaggggatgactgaggatcagggcgcccgcaaagaagggg

SEQ ID NO: 39603 - DNA, 243 bp, Zea mays
  Clone ID: MRT4577_136119C.1
agacaattgaaatgaagaattcatagtgatatcagaatatggaagtcatacgaattgaggataagctgtgtggagcatgctgattattgagtcccaaatattgaaacctctcataatctaggttgtctccagtagatcatgcatatggtcataaaaacactgttttatattactgactgtattgtttacatagtgaaatttaaaatacaagatatgatagacgatagaataggtaagttgctg

SEQ ID NO: 39604 - DNA, 1505 bp, Zea mays
  Clone ID: MRT4577_13611C.1
ccggccgggatacgcacgtactcctgtatcggatagccgctgccccgaagccacctctttgtgcctccacttgcgtgccgctagccacagccgctcgtcgatctgagctgccgccgccgccgtcgttcgccgattggagccaccgccgtcacccagtcagtggccgattggagccgcctccgcgaggcctgtggtcgtcagcccgtcagccgccgattggagccgccgctgcgagagaagcatgcagtcgtgcaagtcctgtgatcctaactgattatgcactccaatgggctgcggagcacaaaggggagaaaaacaaaaacgagtgggaggtggccgtgggccatgttgctgctgctgacgaggcggcgcgacccatagtaaaggcgtacaacagctcacctccctcgtccagctccagccgccgtcaggcttctgacgcaacttctaactccgttcgcctccaggcgacaccgtcgcccgctggcacgccgccactgcaggttaacacaatttgacccggagcttagttaaatcctgcttccgccactgcggacaaccatggcgtcgtcgaagctgcagctgcctgctgacgacagcgtcctcctgctcatcacccactccaatctcaccaccttcgcagcggacatccgcgtctcgcaacagaccaccgtggaggcgctcaaggacaagctctggcgcaagaccggcaccgccgtcgcttccatgcgcctccagctccgcgacgactccggcaccaagatcgccgacctcgacgacgacgccgcgccactcgcggcctacgccccctacaacggctaccggatccatgtcgttgatctcgacccttcctcactcacctcagggggttggttggaagacacttcccttgtcgacaagtacaaaatgtccgatgaaacatacgataagctcgacactaactttcgaaaattcaaagaaaagatggtcccgaaaaactctccgtcagaggataaagaagaatcagaaaagcatatggaggaactatgctccaaaatcaaggtgggtgatagatgtgaagttgagcctggtgccaagaggggcactgtaaaatttgttggtagagctgaagcccttggacgtggattctgggttggagtgcaatatgatgagccacttgggaagcatgacggcatggtgaaaggcattcgcttctttgagtgccctcaaggtcatggggcaattgtgaggccagaaaaagtaaaggttggcgacttcccggagagagcatttgaagacgaggacgatgacgagatttgagtgcgtgtgcgtttggaaaagcaaggggaatgtccttgttgaattgcattcgaaacgtgtgtaaaatgaattcggagatttgagtgtgcgcgcttgcttgcatcttcttgggcaatcatattgatcacattccaaaaaaaaaaaaaaaaaagcggcctgctgttacatctctactattcaagcgtgagctaataaattttccctcc

SEQ ID NO: 39605 - DNA, 273 bp, Zea mays
  Clone ID: MRT4577_136120C.1
ccatggcccccactgtctgcatgtggggagccttctggaacacgttgctttgcccagtcagtggtgctgaggggtatagacagagcatgccacacaagccagctcaccccagggacacctccaccctctgcccttcatgcatgtaccactggggaagaaatcttggctcagtatttacaacagcagcagcctggagtcatgagttcttcccatctgctgctgactccctgcagggtggctcctccttacccccaactcttctcaagctgcagt

SEQ ID NO: 39606 - DNA, 469 bp, Zea mays
  Clone ID: MRT4577_136121C.1
aattgaaaaacacacctcctgtgtttttttaaggtataaggtctgttttgcttttggctcgcagcgaacaaaaacgttccttgtcccatgacagtatatgcaaggaggggaggggccccttggcagtcagacggggaaccatatccgaactacaataggtgacccaagccgcccatgtggatgcgagcttgcgggctaaagaccctgcgactggaagcgcacccctggcctcagacagggggggaaccttacatcagggcccgggtggggtcagggcgcctagttgccgtaacaactcgcgccccatcccgacgtgggtctcccccaccttgaccgtgatgtgggccccccagaggctgtaccccttggggaagcagatcggcttggggcccgtccccgggtgggccttctcccgccccttgagggcaacgacggggcacaccttgggggggggcgccccctccttttt

SEQ ID NO: 39607 - DNA, 171 bp, Zea mays
  Clone ID: MRT4577_136122C.1
gactttgtaggtgagccagagactgccacctttaaagagcagttagactcatggagggtgacgacccatgaaacgactctgcagcacatatactgacaaagacaactgcccatgatgccgcccgcaaaccgctcgctccttgctgcgtcaagggcaaggcgcgtgtgcctg

SEQ ID NO: 39608 - DNA, 608 bp, Zea mays
  Clone ID: MRT4577_136123C.1
tttttttttttttttttttggagaagaagaacggtagggatgttgtttatcagttctattatgcgatacctctccagttcacgctataagtatataaaatgctaccgaactactgggcggacgcagcctggcccataacaattacacgacccacttcggcccgctcaaacgaatgtggctgaatgcgtgggtcgattgtttcctccttactgacctaattttgtccagtcctagaattacccattgacaaacgtagctcaaacataggtcttgtaggtaaggacgactggacgccttgtaaacatatacagtgtgaccttggtatggatggccatccatttgttataccaatcaaccttcattggactataagcttgcaatcagtccatgcccaccacgagatcaactgatagcagcggcaaaaagatgagatccaatctaaatttgtagtcagacatataccatttagccttggtcaattgatggacacaatgtaacatttgatcatttgccactttgactgctagcctccatgataactattgaacgcccaacaacattggtcgccatttctcactgataaatgtatgagatgagcttgagttaat

SEQ ID NO: 39609 - DNA, 157 bp, Zea mays
  unsure (1)..(157): unsure at all n locations
  Clone ID: MRT4577_136124C.1
aaccggggtcccgggcaattcggcntaccggccggcttaacgggttagaggctccgggacacttctgcgctcgagacgggaacgccgccgacgccgcagaggagacgcatcgagaggaagcgagacgacagaggcaagtgagagacgatagagtcaa

SEQ ID NO: 39610 - DNA, 164 bp, Zea mays
  unsure (1)..(164): unsure at all n locations
  Clone ID: MRT4577_136125C.1
tcccaaggccaagtgggcggccgcgtcgggcgtcggcggcactgtacgtggcccgcagctgagcaattggcagatgtagtgataagctgatccgtngtctcccgtcttcccgacccgggtcccgcctcgcccgtagacaacagatcctatttgttggatcgcca

SEQ ID NO: 39611 - DNA, 589 bp, Zea mays
  Clone ID: MRT4577_136126C.1
cacaaccatttccagaacgccaagttctacaccctcaccgagcatttgatcctgcctgagcccatcgtgatgtcgaaaatcacctggaacaaactcagccctgcccagcaagtcatggtgaagaacgccgccaaggacgcccaggctgacgagcgcgtgctgtgggacgccaagtcctccagcagtgaagccaagctcaaggccgccggtgtcgagttcatcaccgtcgataaaaaacccttctatgacgccaccgcgccggttcgcgccaaatacggtgcggcttacgccgacatcatccagcgcatcgacgcggtcgagtaatcaccctcccttctgctaggcccggcgcggtccgcatcgacgcgcccggtcacggtgaacgccatgaagaatttactgctgcgcatcaatgaccgtatctacatgacctgcatctgggtcgccggcctctcggtactgggggtcgcgctgatcattccttggggcatctttgcccgctacatcctcggcaccggctccagctggccggagcccaccgccattttgctgatgctgggattcacctttatcggcgccgccgccagct

SEQ ID NO: 39612 - DNA, 464 bp, Zea mays
  unsure (1)..(464): unsure at all n locations
  Clone ID: MRT4577_136127C.1
acccacgcagccgcagaaacacaccaagcgaagcgcactagcaacgacctaacaacaaggccaagaaagagcccgccgggcgccccaggcccgnnnagggagcgcaacaaangcgnncaaaaacccacagcgcacacgcgcnccaagngccannannccacagnnccncccaccagnnaccccaangggcnncgaacacccagccgggcaagccaacaggcaacaacaagcgcnagcggcgagcgccnaacaacaaccaanngcccaanngcaacaacaanccggggcacaacgaacccaacaaaccaaagcaacgcaacaacaacaacaacaaagggccggccagcacngagccacccagccgnggngaaccccgccaccaacttgcaacagcagcngccggcaaccaacccaccngctccggcgaacgnagccgcaaaccagcaacaacaacagccgcaaca

SEQ ID NO: 39613 - DNA, 413 bp, Zea mays
  Clone ID: MRT4577_136128C.1
aagacgaatggtcaatttttttttaaaaaagggttaacgatgacatatatttatgaacggatggagtagcaggtgagccaataatgttacaacttttttttatgctatgtggtttgtggggggtataatgggtaagctgttagcaagcccttttaggatatacttatgcttatacactgagaaccttgatgttacgcttggtgagaaaaattttacttttgtttgagttgatggtttttagttgggtagggggatggacttgtttacgcaggataaaagcgagatagtagataggaaaatttttattaattttgtgatagggtagtttggtggtgagttaaattatggtgggtaatgagtttgagtataagataggggaaatttgggtgtttgaagtgattgtgtagaaatta

SEQ ID NO: 39614 - DNA, 312 bp, Zea mays
  Clone ID: MRT4577_136129C.1
atgggtcggctggctaaggaagggaagtgggccgctgacaggagagaggtccagacgcgcttgtggcagtgggccggggaaggaaaagctggcccaaaacgattttgggacttacaaatcggctataattcaccaaacagtctgcgcgaggagccggacagtctggtgtaccagccgtgcaacggctacctgccacgtcgaccaagagccaacgatcatatggcgcaccggaccgtccggtgccccacagaaaaggaaaccaaccaatcaggcttccggtgccaccacgtccatgcagtcaccataaattaa

SEQ ID NO: 39615 - DNA, 346 bp, Zea mays
  unsure (1)..(346): unsure at all n locations
  Clone ID: MRT4577_13612C.1
cccacgcgnccggctaaaccctnnggnccacacgagagnncngncncgnggagcggggcnnangacaccgngcggancnnnnaacagangngccgccccagccaaacnccccaccngacaangncnnccgcccggancggcccggcgaggccgggccnnggagccaaaaggaggggcggngccccgcnnccgacccacggaanaagnaaaanaacgnnaaaagnagngggaggncacnggcgcccggaggcncccacnnanccnacaccncncaagncannncacaaagncggaccagagncaagcncaacagggncnnncnnnccccgcggaaaccgccaagccc

SEQ ID NO: 39616 - DNA, 787 bp, Zea mays
  Clone ID: MRT4577_136130C.1
gccgagggatgtcactgctcgcactccgccaccacacgactaggacaacatacccttttaattaatcgcaggaaagctgcatctctctctgaaaaatcactccgatgtcgatcaggaaaacacagaaaacaacagccgctgacagaagctgctgccaccaaactgcattttctgtcaccccatcaagcgagcctatcgcatatagcgtgtagcattagacatgtcatgtcaatatgtcatcttccaaatgaccaaacacgagagctagcccaagctgggtgccacgaaacgcaatttcaatttgtaatgaccagcgcgcacggcgtgttagggacagccggacgtccctctcggatgaacaggccggtgtgacgcgcgacgaagctcaggggggtgcaccgcacatgcgcagacctgcctgccaacgaatggcatccgtttccttctctctcgccgattcgtccagccgtatatgtaacgctaacaatatatatctgcaagactgcaagttgccattgcacagcacgggctttgattgacacactagctaggctccaaaagggcatcccatgtagtagcttcgcaaagtgttattggatcacggggaagtttagttatgtttttccaactacagctggataaagttagcttggcgtcatctatatttagttgagttttgactaagctatataaaggcagcagaagtcgtctgtaatttttactctgcatatagaagtaagcaggaatatatgcgcctccttaattttaaaaaaccaccccccccccc

SEQ ID NO: 39617 - DNA, 345 bp, Zea mays
  unsure (1)..(345): unsure at all n locations
  Clone ID: MRT4577_136131C.1
cttcctctggggggttctactaggagtgttgcttttttctcccatggcaatggcatngtcgtagagcgagctgaggagctgcagcgcattgtgcgtgcccagcctgctggcgccgtgacgttcgtgttgcccggaccggccgcctgccgttctgcgcccactccaccacctacggccgagtcaccatgtccgtggagtgtatgcccgggcagctccgccccgcccacctcgacggttcctcgacaggtgacttcggcttctaccccctgggcctggccacagtgccggagaatttcttgcggtacaaggagtcggaggcgtaccactgtcggtgggccatgctgg

SEQ ID NO: 39618 - DNA, 571 bp, Zea mays
  unsure (1)..(571): unsure at all n locations
  Clone ID: MRT4577_136132C.1
cattgggacctcgagccggccgggtcgccaccgatgtcctcgaactcgatcaccgctcctggatcgctgaccgagcgttcttgcgccatcaacggcgtcatgacctggtcatctttcttcgcacaagcgaacgacaccatggtcgtcgtcggatcacgggcagttgccgccgccacactcccatcgcttctcgtatcatcaccaccagcagcgtcgtcgtgattggctctccttctcttccggcgcagcacgcggggcgtcgtctcggctcggccgccgccgtccgccagcgcgcgctgcaccacgtcgagcgggaagttgaggcacgcgcgcgggccgcgcatgcgcagcgccgccttgtcgtaggccagcgcggcgtcgtcggcggtcgcgaacgtgcccagccacacccgcgcgcctctcctccgcgtgtcccgtatctccgccgcgaacttgccccacggccgccgcctcacgcccctgtagctcttgcacgccgccgccgccgacgacgncttggagctgctgcaccgatgatggcggagccggcctgcttcttggttcgacggcg

SEQ ID NO: 39619 - DNA, 195 bp, Zea mays
  Clone ID: MRT4577_136133C.1
gcgagcagctagttgtgttaatgaatcacacaactcaccactgctagggcggctcgagtattgcacactattccgcttcctctgtcactgaatcgctgtgctgggtagatctgctgaggatagcggtatcaactgactcaaaggctgttatacggctctccacacaagcactagatagcgcctaaaagatcatgc

SEQ ID NO: 39620 - DNA, 423 bp, Zea mays
  unsure (1)..(423): unsure at all n locations
  Clone ID: MRT4577_136134C.1
gcccacaccagaaagactcaagatggtgggacagaccagatttaaacaatagcaggaaaaggctctgcaacgnttgtccagggggggggggggcncatttccctccattttcttcttaacaacatttgaatcgactcacagacattggatagggcttttttgcccaatcaactgtgacagagttaccattctttgcctccaacgttcgcttcaaaaggaatagagtgcaagaagcgtttcatttgggtgagctcaacgacttatataaaagggcctggataaccttaagggcgacctcaacacttccatcgccaagggtttcacgtcttcccaccggaaactaagcaccttgcccggcttctaacaattgatgccccttacatttttgtttgactgcctatttttacctgccaccccctggtt

SEQ ID NO: 39621 - DNA, 784 bp, Zea mays
  Clone ID: MRT4577_136135C.1
ccggccgggatcttcgtagatagggcatttggcgcatatggaaggccatggctgcagcaagttaacgacgaaagacatgtcgacatgctgatcattgcactctctcctagctctctctgcccggccggatgggtccataaatacgcactagtacatactcagcgggtagtctcacatagcatagccatcttcttcgtcgacaagcaggggagttaggtctcacatgcatgcttcatcacattgttgactgcataacgaaacacatcgtcgtcggatcggagatgatgagttccgtcgtcgtggatgctgctgctaccagcagcagcgagaagaagacgtcgtggccggaggtggtgggcatgtccatcaaggaggcgacggagactattctcaaggacatgcccaacgcgtacatccaggtgctgcctgttgggtcgcccgtgacgctggaccttcgccccgaccgcgtccgtatcttcgttgacaccgtcgccatgactccgacagttgggtgatacataccaaatgcaataaacaaaccctactttttattttatgtttccagttaataataaaccaggccttagcttcttggttgtccttccttggttggtgttagcttctaagctactagtacaccattaaaaaaaggaggacctcatgtatggctaccgtgaaaaatgtgatcttgatggaataatatatcataaataagcaattaatgatgataaaaaaaaaaaaaaaaaaaaaaaagcggccaatgtcacctaagcctcgggctcca

SEQ ID NO: 39622 - DNA, 761 bp, Zea mays
  Clone ID: MRT4577_136136C.1
ggctcaggtatgaaagtcacccattcgtcagctggggccttccatgatacagcagatgcagcagccttgcaacggaatagcatagccatcttcttcgtcgacaagcaggggagttaggtctcacatgcatgcttcatcacgtactgacactgttgatgatctctagctacttctctcgctgaactgatcctcctccttctgtatattaattaatctgtgcatgtggctagattgttgactgcataacgaaacacatcgtcgtcggatcggagatgatgagttccgtcgtcgtggatgctgctgctaccagcagcagcgagaagaagacgtcgtggccggaggtggtgggcatgtccatcaaggaggcgacggagactattctcaaggacatgcccaacgcgtacatccaggtgctgcctgttgggtcgcccgtgacgctggaccttcgccccgaccgcgtccgtatcttcgttgacaccgtcgccatgactccgacagttgggtgatacataccaaatgcaataaacaaaccctactttttattttatgtttccagttaataataaaccaggccttagcttcttggttgtccttccttggttggtgttagcttctaagctactagtacgccattaaaaaaaggaggacctcatgtatggctaccgtgaaaaatgtgatcttgatggaataatatatcataaataagcaattaatgatgatatgcaaccatctaataccaaaaaaaaaaaaaaaaagcggcc

SEQ ID NO: 39623 - DNA, 513 bp, Zea mays
  unsure (1)..(513): unsure at all n locations
  Clone ID: MRT4577_136137C.1
gcccttntnnttttttttnnttttttttnntttttttttttttttttntttttttttttttttttttttttttttttttttttttttttttttttttttggccaattaaaccccccagttaacggccctggaacgaataactattacaggtctgaacttccaaacagggttctaaactaatttttttggaaaatagaaacatagaactctcccagctcagctttggctttttaaggaacaatggcattttcattttcggggccatgcattagctggggaaaaaaggacccatcttcctcttaaaaaggggtatctggctggggggggataggcccaggggaatatcggttataatcttaatcccggggcatttaatcctccagtttattgcaaaatacacatatttcaggaaccgctaagttataaaaggcatttgatgtactgggcgagggggtcaaaatatacaacagcttgaacaccaaatagggctcatttaattcaagggcaaattca

SEQ ID NO: 39624 - DNA, 1055 bp, Zea mays
  Clone ID: MRT4577_136138C.1
gggaccctcgaggccggccggggcttcgactcccactcccactctccctttccactctcaggctccgcactccccccctaccggctaccctacccatcacacacaaacagccactcctcacctcccccgtcctccggttcatgtcctgctgctccccatgtcgcccccactcgacctcgactacataggcctctcgccggcggggtctgcagccccgctggctggcataccacgctggcgctcagcgtggacgccgtccccgctcaagtgaggttcggagctcagagccttgcgatctctcggctgcgcgcgcgcaagatggctgacccagaattggaagctatcaggaagagaaggatggaagaactaatggcaaaacacggtggcggtggggcaaatcaacaaaatgcaagccaacaaaaagctcaggaagacgcgaaacaggaagctgaggaacgccgacagatgatgcttgctcagatattatcttctgaagccagagaaaggatctcccgcatagctttggtcaaacctgacaaagcaagaggggtggaggatgttctgctgagagctgctcaaactggtggaatatctgaaaaggtgtccgaagaaagacttatctcccttctagagcaaattaacacccacacaagcaagcaaaccaaagttacgattcagaggcgtcgaagtgtccttgacgacgacgattagacgcgacctgcaagctttgcctctgagtgcatgatgatgggctggtgattgattgattataagctgtaccgaacttgtttgcttaaagacaatgatctgatgcgactgcaaacagccatcaaaacttggttgtatatgatccgatgtcttgttggtgtaccccccgttgaggacagtcgatgtattggctgtgattatccctgaaacactgttcttccttgagttatagtatttattaatgggtgttcgatctccacgccggccctgtcaaaaaaaaaaaaaaaacaccactctgcaaccccccctcttctcgagcagagcggcagcttcggcgcgcgccggcg

SEQ ID NO: 39625 - DNA, 757 bp, Zea mays
  Clone ID: MRT4577_136139C.1
gccggccgggctgcgatcttcgtagatagggcatttggcgcatatggaaggccatggctgcagcaagttaacgacgaaagacatgtcgacatgctgatcattgcactctctcctagctctctctgcccggccggatgggtccataaatacgcactagtacatgctcagctaggagtctcacgtagacatcttcttcgtcgacaagcagggagttcacctcgctcggtgtgcagtgagcgactagattgttgactgcataacaaaacccatcgtcgtcggatcggagatgatgagttccgtcgtcgtggatgctgctgctaccagcagcagcgagaagaagacgtcgtggccggaggtggtgggcatgtccatcaaggaggcgacggagaccattctcaaggacatgcccaacgcgtacatccaggtgctgcctgttgggtcgcccgtgacgctggaccttcgccccgaccgcgtccgtatcttcgttgacaccgtcgccatgactccgacagttgggtgatacacaccaaatgcaataaacaaaccctacttttttattttatgtttccagttaataataaaccaggccttagcttcttggttgtccttccttggttggtgttagcttctaagctactagtacaccattaaaaaaaaggaggacctcatgtatggctaccgtgaaaaatgtgatcttgatggaataatatatcataaataagcaattaatgatgaaaaaaaaaaaaaaaaaaaggcc

SEQ ID NO: 39626 - DNA, 394 bp, Zea mays
  Clone ID: MRT4577_13613C.1
ggggggggaaacccggggacaatggaggcatgcaaaaagctgcaaattgggtccctgaatggcagcccgggcgggaatacccacatggggaccacctaggggaaaaaactgccttaaaaaacatgtgaaggaggggggggggggtttcaacctccccctgagagggggaaaaaaaaggccaaagggggcagagaaccacaacttttattgaaaaaaaggagggggggggcccctcagaaaagcctgggcggataaataaacccccaaagggggggcttttttgcttgcaaaagatgtttatgggggagggaaaaaaaaccagcggagaatttttcttttttgccaaaggggtttcccccccaaaaaggggaaaaaggtttaacccccccacaaa

SEQ ID NO: 39627 - DNA, 419 bp, Zea mays
  unsure (1)..(419): unsure at all n locations
  Clone ID: MRT4577_136140C.1
tgtaattcggcacgagggtcgagtcctccctccctcccccgcggcctcgccgcccgtcactccaaaccttccctccacctcttcctccggcctctcaccggcaccgcacgcaccaaccctcagtcacctcacctctccgcgttttatcggcgttccggcagggggacgatggcgaggcggcgagccgcgctggcggcgctgctagtgctgctgctgctggcggcgtgcacggcggcggcggccgccgtgaccgtgtcgcggaagcagcggcagcagcggcagcaccgcggcggggcgccggcgtcggcggcgcggtcctgcgaccccttcgcggcggcgggcgcgtgggtggaggacngnntcgncccggtctccggctgggcgcgctggcccttcgtgcgggccgcgtttgggggcgc

SEQ ID NO: 39628 - DNA, 278 bp, Zea mays
  Clone ID: MRT4577_136141C.1
gcagagaagccggatgttgtataatggatgtatggtaaaaacgttacaggaaggtattatagcaaaacgtggacccctggtaagattcgtgcagacccatatataagctcaaaacctttccgagagaaatccaaacctaatcatacatacagccgaagcaaccacctttatttacagttaccccgccctcaaaaggcattaaaataaaccatataggtgcagaggccaataaacaagccctgggaactgcataaaaacccttgatggcaactcaggga

SEQ ID NO: 39629 - DNA, 595 bp, Zea mays
  Clone ID: MRT4577_136142C.1
ggccctccctcgagtttttttttttttttttttttttttttttttttttttttttttttttttttttttttttttttttttttttttggaagggaagggatcaaaaatttttggccccttggaccaaatttaaaccttgggccccttttttttggggggcatacaaaagaagtttttttggtggttggttaccgggaatttgaatttatatcccctgaaaatggggaaaaccctttttgaaaaattgattttaggggcccaaaccaaccttttagagcaaacgaccccaagggcaaaagccaaaaaaaacggccttgaagggggggcccaggttaactttaatggcccgattaaaacggttaaacccccctgcccaatgggggaacatgggggcaaccaaaccccgccccggccctcccaaaaagggacttcccttggggcccacttatggagggcaggggttgcgccggggtgtttttcgggttaacctctttaaaaacggacctgaaagcgggggccctgcaaatgccgtaaaaaccggccccggcttgggtctgggcctgccccgaaacttggcctttccctttggctgcct

SEQ ID NO: 39630 - DNA, 521 bp, Zea mays
  Clone ID: MRT4577_136143C.1
ctatgttattctctctgctgcattcaattaactgccccaaaaagacaggtaaggtatgacattgggtatcaaaaaggggcagtggatattcccctatacatcgcgggttattgtttatttttctcaccacaagtatttttgtagtccagaatgcaatgtccaaaccaaattgagtaaaacataacacaaaatgagtaaatatgttttaatgttgattataaatcaagactatgcatccactttgctacattatgttttctgtgattttttgtttctacctataggtcatctattgtgcctagctatagcctgagtgactacaaagctatgatgtatgggaaatactgaaattcgaacggtaaatttgaatgtattgtgttccctgaaaacatgtatacctcaaatagctgcttttgtaacaatgaatatttacttgtgttcctagcagcctgtgatgaagatggatatattttcgtatgactattcacctgattttggtagcgtcgcccgtgagctgcttg

SEQ ID NO: 39631 - DNA, 104 bp, Zea mays
  Clone ID: MRT4577_136144C.1
gacaatatccttgcaccaagccacttcttctgtccgatattgtcgaatgtgagagcaacagtaaccctgctaaggatatgtgcgagctctggaagcaccactga

SEQ ID NO: 39632 - DNA, 577 bp, Zea mays
  Clone ID: MRT4577_136145C.1
ggttcttcgtgctgtaaaaaacagaagacaagtgttccaacaactaaacctccaaacttgcgaccaagaccacaaagacaaaggttccaacaactaaacctccaaacttgcgaccaaggccacaaagacaaaatgctcaacctcaagacgaacaagcgattgctgatttgcagacggtgggagattttctcactgacaatgttgaagtttccgaggatgatccaatcaatgctacaaaaaagaggcctgcaaggggcataactaagatggagggaatattctcaaggtcacctgaaatgccaaaaatcaaaattttactcaatgatcgaggtcagcctattggtaaaagtgctagacaactttcaagtgctattgggtgtcaagttagaaagaaattgtctattgctaccacggactggaggcttgttgatataaacaagaagtatgagttgtgggaggatataaagacatattatgatgtagatgctgctgccttaaactgggttatgcgcacagctggaaagaagtggaagcaatttaaagcatccataaagcaacgatacttcaatcctgaatt

SEQ ID NO: 39633 - DNA, 245 bp, Zea mays
  Clone ID: MRT4577_136146C.1
gtgcctgagacgacgactaggtgggttaccgtcgatgggccgccgtcgccgccgccgacttacttcagaggcgaggccttcatcggagtctgttcaggtgacgaacactaaccaggtaactctgttgtgttatctgtacttcaccgattgttacgagcacgagctggaacttttttgctctcgattaattagcccgcttgctggcccattgtggtctctacgatggcggctgcatctcggacacg

SEQ ID NO: 39634 - DNA, 366 bp, Zea mays
  Clone ID: MRT4577_136147C.1
atgggccaacttggaaaaatttttgaatttgggtgggttaaaaaaagactttacaaaaaaaattttacaccctacaattttactactaaaacatttaaaagggggacactttgataaaaacataacgggggaattttgaaaaaagccaaccaaacagcaccggttttttttttttttttggtttccaaaagtttcccttgtttaattgaaaaagttaagaaagcaagccccctccgggttggtttgtttttttcaaaaccccccaatcacccttaattttaatttttttctgtcaccccccgaaaagaaaacgccatgttcctttggataaaaaagccattatgggtgtaacggaccttgcggggg

SEQ ID NO: 39635 - DNA, 311 bp, Zea mays
  Clone ID: MRT4577_136148C.1
gtagcagcgcagcagcgtagtagtcggaatctgtcgaactcgagcgtgcgttgagcacgctacgctgtctccctcatgtgcacgcattgtgtctgcttatgttttacttgtatgcctctgtgtactgtgtgtgtgtgtgtgtgcccacgcgtgcgcccgtgtgcatgcgttcgtgttgccctgactggctgtctcaagcctcctgagtaatggcggactccagttgtctgtctagctcatgtcctgtcttcttccagtagagccgtgaacacccaacacacacagttaatcgggctccccccagtccatgt

SEQ ID NO: 39636 - DNA, 184 bp, Zea mays
  Clone ID: MRT4577_136149C.1
gtgagacacaatacgaggtccatgcattcgcttcagtcatgactaacggctatcgggtcctggagtacattgtcgcgcagtccatcatcttccagatctacgacgtgcccatcaacgcacttgttagcttacacttcatcctgtacttcgacatagactacacgctcatgtttcatcatctgaa

SEQ ID NO: 39637 - DNA, 284 bp, Zea mays
  Clone ID: MRT4577_13614C.1
ttgtcataaattctctgatggtcgccctgtgagatcttgttccagaagctcggatctggcttgcatttgtcaaagaagctgaccaggatattcgcggtcttgtagctgtggcaagggacaatgtgcgagccaaataccccgtccacgaggtatctgtcacggagcatcatggcaggtcacgatcgttgcctaaccgtacgtaatgtactcgatcacagttgggcccgacgcttcgtagaacgcatgctggaccaatgcactctttgtatcggacatgcactgag

SEQ ID NO: 39638 - DNA, 425 bp, Zea mays
  unsure (1)..(425): unsure at all n locations
  Clone ID: MRT4577_136150C.1
ctctcaccagcatgnaggagaagagcatgaggaggacaggaagacctccccagccaccctggtacatatcgatcgactacagacggagctgctgaacagggacaacaagaagatgtacgctcatttaggcataggtcaacgcgccatgctctgccatatagcagtcctcgtctatatatggcaacccacttaccacttagccttgcgcacgggaccagtaccatggccattgagatctgactgagctatatatttaatgactggcacatggcaacctcgtatgctaacatgtcagaccagtctaggagcnctccaggccacagaacgctagaatagaggtcgtacgccaccctttcttgtatggaataaatatcgaacattctgcctaagaaataaactgatactgactgatatgtcaacaaaaa

SEQ ID NO: 39639 - DNA, 256 bp, Zea mays
  Clone ID: MRT4577_136151C.1
ggactgctgctgctggcatcgtcgtcgttactgtccgcattgattgccgcgcagcagagtggacccgccgacctccacagcaaatgcgatggcggcgcgtctgatgacgataggaaggcggaggacttcacccctactgcatatgatcatagcctatactaccttcacatgcacaatccgctgaccgctacttcgcactacactgcacaaactaaatctagggggggggtgacaccacgcatcctttctatcctcc

SEQ ID NO: 39640 - DNA, 645 bp, Zea mays
  Clone ID: MRT4577_136152C.1
ggtacacggcgccccctctcgagtttttttttttttttttttttttttttttttttttttttttttttttttttttttttttttttttttttttttaaaaggggcccccctctttttttataaagttttataaaactttcagggcccgttggatttccggaaaaaaccataaaaaaaaaacccccccccgggccatttatccaccccccccacaaaacttttttttttggggcacaaaaaaaaggaaaagggcccccaactaaaaggggctaacccgaaaaggaaacggtgggggggggcccaaaaattcccaacctaaataatattccccagggcccaagggtatacctcctgttcgggccccggaaagtcaagggacacggggccggggccaaattggaagggaaaccccctttcgggggagtcaaaaaggaccctggggggttcccggggggattaagggccaaaccgaccgccccggaaaacctggaaagccaggcccttgccccaagaatggttgatcaggggaaactccaaagggggcccccgggggtgagaattgcccagcaccccgggggggggaaaaaaaacccccggaacgagggggggggggggccccccgggggaacccccttatgggggggg

SEQ ID NO: 39641 - DNA, 264 bp, Zea mays
  Clone ID: MRT4577_136153C.1
caattcacttttattgctacttaacatttataattaaaatcgtacacaattcactggcactgtactgggtaaaggaaagaataaggcgaatcttgcctaccattttgacctccacctctaactcttgcggacagaaaaagaatgcactgaatatttacttagagactcactcagagcatgactgcacacataccctggatgcttaaaaccaaaaacatcacacggcactctgaagaacccaaagaacacatggctattgaatgg

SEQ ID NO: 39642 - DNA, 1301 bp, Zea mays
  Clone ID: MRT4577_136154C.1
agggccttttttttttttttttgtacaggaagaaacagccttgtcttttccattcctcgaaaccaaagcacagatcgactgcaaatcatgaagcgtgggagtgcggggggcatgtaagagcaatcagaatttcgatcagccaaatgaaggaaacaacattggagaacatacaaggtacacttatttacatgccatccaaagtttttttgtttttcagtttttgtttaattgcaatttctgcaataaacattgtattgatgagctggactggcttcttccaactcagactagggatcaggattgccaagtatagcttcatcaccggagtcgtcttcctcctcgctaagctcttcatcactcgacttgtcttccggagtgataccagcgtcctctggtttggcatacttttcacaatattctttcactttctgttcataaacaggacgatcacgcatcatcagtgctgcagcctccccatttaatggatcagaaggatttggatatagtaacagctgtggaaggaatacttcaaaaacatttactagatcaaacattgggctccatgtttggtttatgacatctaaacatacagagccagacatctcatcaacattagggtgataaatcttgttgatgaagccgatggacggggatttgtaaggatatgcatcaggcagttctaccctaaccttccagacaccgccttggtagatactttcggccggccccttgaattcgacgaagaattcctgcatcccatcgttcaccgtctccaccttgtagtcgctcatcatccaagagaggtccagcatcctcacagcttcataaggtccatctcgcggcgcttgctcggggacgacatcttggagagcggggaaacaagaacagcagcagaagggccccccccccccctcagctcctcgccttggggataagagggagaaagggattgcgcagcctgtagacttcgacggtgcgtccgcgtcgtcgtacgtccttcgcctgcacgagacttattattttattgttgcagccgcagcggaaatgagatggaagagggagagggttgtggaaggcgagagagagcgggcgagacaagcacaggggatgatgaaagggacaaagcgaacgaagcataaagagtgaggattagggacgcaatcaatcacgcaaaacgctgccgagctcggcggctaacttcggtcgccacccccctaaacacgcctccctcgccagtgatccaatcgcgtcttttttgtctaatctaattgaggcctttaggacttttgctctaggaggga

SEQ ID NO: 39643 - DNA, 370 bp, Zea mays
  Clone ID: MRT4577_136155C.1
agcttttactgtatccgaatccttctgatccattaaatggggaggctgcagcactgatgatgcgtgatcgtcctgcttatgaacagaaagtgaaagagtattgtgaaaagtatgccaaaccagaggacgctggcatcactccggaagacaaatccagcgacgaagagcttagtgaggaggaagatgactccggggatgaagctatacttggcaatcctgatccttagtttaagttggaaacagtgcagtcagctcatcaatacaatgctcattgcagaaattgcaactaaacaaaaactgaaaaactaaaaaaaactctggatgtcatgtaaataagtgtaccttgtatgttatccaatgttgttccttc

SEQ ID NO: 39644 - DNA, 700 bp, Zea mays
  Clone ID: MRT4577_136156C.1
gggaaacaggaagaaacacccttgttttttccattcctcgaaaccaaagcccaaatcggctgcaaataataaaccgggggagggcggggggcctttaaaaccaatcaaaatttcgatcagccaaatgaaggaaacaacattgggagaacatacaaggtacacttatttacatgccatccaaagttttttttttgtttttcagtttttgtttaattgcaatttctgcaataaacattgttttgatgagctggactggctttttccaactcaaactagggatcaggattgccaagtatagcttcatcaccggagtcgtcttcctcctcgctaagctcttcatcactggacttgtcttccggagtgataccagcgtcctctggtttggcatacttctcacaatattctgcagaaacatgggagagaatgttggcaccttagtgtcaatatgacacaaacctaattggccaatggtgaacaaagtagtgctccaagatatggcatattaaaatgcaatagagaaattttgctttattgcgactttgttgttcagcagaaaaatcttgcgaaaatacgtatgttgtgttggatctgcgggcatacaacacaaaatcttagtcgagaacgatgatatacatgataggctagagatagcaccagttcaaaaaaattgcccaacactgattgaaatggtttggacata

SEQ ID NO: 39645 - DNA, 505 bp, Zea mays
  Clone ID: MRT4577_136157C.1
ttttttttttttttttttttttttgcacagcaactagaaattcaattagacaaatgaaggaaacaacattggagaacatacaaagtacacttatttacatgacatccagagggtttttttttagtttttcagtttttgtttacttgcagtttctgcaattggacaatgtattgatgacctgactgcgctgtttcctactcagactaaggatcaggattgccaagtatagcttcatccccggagtcgttgtcgtcgtcgtcatcatcatcatcgctaagctcttcatcactggacttgtcttccggggtgatgccagcgtcctctggtttagcatacttttcacaatattctgcagaagcatggggagagcaagttgtcaccttggtgtcaatattgcacaaacatatttgaccaatgatgaacaaagtagtgctcgaagatatggcgtattaaaatgcaatagaaagagattttgcttttattgcctcattggtgttgtgaaact

SEQ ID NO: 39646 - DNA, 373 bp, Zea mays
  Clone ID: MRT4577_136158C.1
cccttccgaagttcacctgaaccaacaagccctcccaaattttttttaacaagttccagaactctctcaatcactagaaggttcctaacctttcggggtccacacttactttaatcggttcaaaccttaaccactacatccgaaaactgttttacaacgggttgatcaattccaccatgagttccaaagtcttaaatttaagcatggccaagccttccataaagttcaacagcacccatttcccataaaagttattgaatttccttatccaacccccttaaaaaaatggtttttttccattcaattaccaaccaaaaatttttcttttgcattcccaaatactatccaaaccattccaaattataatattccc

SEQ ID NO: 39647 - DNA, 1246 bp, Zea mays
  Clone ID: MRT4577_136159C.1
gaggcctaacagatattcccaaaatacccttacgttgcttaaacaggcaagcaatccacatccaatggacgaagccacaaccttgtttttgcctttccttgaaaccaaagcacaggcatgcaacagcaactagaaattcaatcagacaaatgaaggaaacaacattggagaacatacaaagtacacttatttacatgacatccagaggttttttttttagtttttcagtttttgtttacttgcagtttctgcaattggacaatgtattgatgagctgactgcgctgtttcctactcagactaaggatcaggattgccaagtatagcttcgtccccggagtcgttgtcgtcgtcgtcgtcatcatcatcatcgctaagctcttcatcactggacttgtcttccggggtgatgccagcgtcctctggtttagcatacttttcacaatattctttcactttctgttcataaacaggccgatcacgcatcatcagtgctgcagcctccccatttaatggatcagaaggatttgggtacagcaacagctgtggaaggaatacttcaaaaacatttactagatcaaacattgggctccatgtctggtttatgacatccaaacagacagagccagacatctcatcgacattcgggtgataaatcttgttgatgaagccgatggacggggatttgtaagggtatgcatcaggcagttctacccgaaccttccagacaccaccttggtagatactttcggccgggcccttgaattcgacgaagaattcctgcatcccgtcgttcaccatctccaccttgtagtcgctcatcatcagcttcataaggtccatctcgcggcgcttgctcggggacgacatcttgcaaagcggagaaacaagcagaagggccctcctctccgctccgctcctcgccttggggataagagggagagagagagggggggggggttgctcagcctggtgcctttgacggtgcgtccacgtcgtcggacttttttttttttttttttttttttttttcacctaatcaaagtttatataaatcagagaaacaatccggttaggaatcgttccgatccaccaatccagtaaaaacgaacaaggccttatggtggcggcttcgtggcaattccaacaaaaattattattgactagtctgctatgctgtcgcatcagtgaacgatatataataacggaacacagaattgaattgcgtgatgcaagaagtagcccgg

SEQ ID NO: 39648 - DNA, 384 bp, Zea mays
  Clone ID: MRT4577_13615C.1
tttttttttttttttttttttttttttggggtttttttttttttttgggggggtttttttttttttttttatttttttttttacgaacaaatggcgccgaacccaaaaaaaaagggggggcaaaaaaacgaaacacaagggggggccccctgggggggaaggggcaagaaaagggaaaaaaaattctgttaaaaccgaatcgtttccccaggggggatgcaaaaacccttatgtgcttacaaaaacccaaggggcttgtaaaatggagatttttttaactttctccgcccaaggggggggtaaacccctcaacaaaaaaaaaccccccatgctgggggttattaaaccacacccctcggggaaatggtgacccgcgggggtttg

SEQ ID NO: 39649 - DNA, 565 bp, Zea mays
  unsure (1)..(565): unsure at all n locations
  Clone ID: MRT4577_136160C.1
gcgcgccctttnttttttttttttttttttttatttttttttttttttatttttttttttttttttttttttttttttttttttttttttttttttttttttggaacaaaaatttccccaatggccaaaaaagggcccaacagaggacattggtcgccccttcaggagacaggtaacacccccccccaaacccagagagaggggggggggccttattttggttggggccacccggggggccccacccccgggaacaggtaaaacacgggccccaaccaaaaacccccaaaggaaagccctaaagggggggaccccccgggggatttaatcttcccggggggggagcgggcctttgacgggccctggtccaggaaccgggccaaatccaaaccccggaaccacaacaattccagggggttaaaggggacggggcccaaaaaaagcaaaaggggccttttgggcagttttaccaaccccaaaggccttatagggcaaaggggcccgggggaaaaggaacaatggtcctccgaacccggttccaaaaaaaaacccgcaaggggggggg

SEQ ID NO: 39650 - DNA, 1127 bp, Zea mays
  Clone ID: MRT4577_136161C.1
ttttttttttttggagaacaggaagtaacagccttgtcttttccattcctcgaaaccaaagcacagatcgactgcaaatcatgaagcgtgggagtgcggggggcatgtaagagcaatcagaatttcgatcagccaaatgaaggaaacaacattggagaacatacaaggtacacttatttacatgccatccaaagttttttttttgtttttcagtttttgtttaattgcaatttctgcaataaacattgtattgatgagctggactggcttcttccaactcagactagggatcaggattgccaagtatagcttcatcaccggagtcgtcttcctcctcgctaagttcttcatcactggacttgtcttccggagtgatgccagcgtcctctggtttggcatacttttcacaatattctttcactttctgttcataaacaggacgatcacgcatcatcagtgctgcagcctccccatttaatggatcagaaggatttggatatagtaacagctgtggaaggaatacttcaaaaacatttactagatcaaacattgggctccatgtttggtttatgacatctaaacagacagagccagacatctcatcgacattagggtgataaatcttgttgatgaagccgatggacggggatttgtaaggatatgcatcaggcagttctaccctaaccttccagacaccgccttggtagatacctaccaaattgagtgcgaatttatttggcaaaatcatgtgataaactatgactgaaaaggaaggacggttcgggtcaactgagcaaccaatcaaggatgaagctaaacggacaagaatatctgaacacgatcaacagtggagactggcagttttcctgaaactggacttccccccacaacatctagatcagaatcaggagcgtgcaccatcagcacgggaggcggggagagagaagagcaaccgggattcagcgcgagggctattactttcggccggccccttgaattcgacgaagaattcctgcatcccatcgttcaccatctccaccttgtagtcgctcatcatcctgcgacgccgataaaccaagaaagccggcaagaatggccagatcaaaaaaaaaaggcaagcagaacac

SEQ ID NO: 39651 - DNA, 817 bp, Zea mays
  Clone ID: MRT4577_136162C.1
agtaaaaatatagtgatttggctcaccgttatcaactcgatttagtgtttgcggaaacgacgacaattttcgattgaagtcttcgatcaaacagctgacgagtatggaacggagcttcactttcttttccatccacaactcttggaatctctcaatattaagtagaacttcgcataaacggcgataattcttgttctggcctttcgccgagcacttggggaatatcacgctgttagctccgtcttcacccgattcttgggatttcttgatgacgcacggaacgacgacgagttggagacttgcagggtcaagcacaacaaggagttccgaaaatcgacgtaggcagcacgcaattggaaaacagatcatcgaagtcgacgagcacgtcgtggatacaacgtgggccggcgacgaggtccatgacgagcgtcagggataagcgacggtgatgagctcggcaagacacaaggtccgagcgacggcatccacgactgtgcacgggaaagccggtaaactccacgaatcaggggcaacccggcgcgacgatggttcagcggataacagtgactagaactggacacgaaaaaaggagcccagggaggcacgagagcgtgacaaccagagccatggcgcacgcgagtcctgacagcatgccggtgagctgaagatagcaaccacgaccaacactaccggaggtcacaggtagagaacgacggcggtcggcactatagggaagcagggacgcgcgccaaaatcccgggcgcggcggcggcctaggccagagcctccagcggccaggagatctgcgcggccacca

SEQ ID NO: 39652 - DNA, 193 bp, Zea mays
  Clone ID: MRT4577_136163C.1
caaaaaaagtttcagtccgtttcgaaccaggtgaattttgtccaacagacatagacactatttgatcgggctaccgggaggtaatttgataacagtcgatgggttgaaacagaagcgccacggatacgggaatttcataggtgagtaaggtaccaacagaggtaaaagtcgcctcaaagggtacactacgggc

SEQ ID NO: 39653 - DNA, 647 bp, Zea mays
  Clone ID: MRT4577_136164C.1
aatgccacaagatcaagtagccgtacatatcggaaacaagatactagatcgccgagatgacagactttttcaccaccgccaccgttgcccgcagccaccgcagcagccgcgtgacgacgcgcccgcccacggcgctggrccgagcgcgatccacacgcagagccatcagcgagagaagcattgtcgcggrcgaggcccctcacccacttcagctgctcctgccgccgggtcacgccgcccgtcggcacgcgcctgcccagacggcagctgcgggcgagcgccgtcaccagcagccagccgagctccacgagcacgagtgacatagggtaggacatcacaaacacgaacaccaccagcgcccccctggacgagtgcgcggaaggcgcgctgcacgtactggagaatggacccgatgctggacacctgctggaagaccttggcgacgagcgcggtgaggacagcgcggcgaagaagctcscgtggggcacaccaggagctctctcaatgtttcaatctcctccctccaccacagggcccgcttggacaccgccagcggctcgtcggagccgtcctgcagcagtccgccgcactcgacttttatctcgaccagacggagctcagcctcctccagtgtcgccgatgttctc

SEQ ID NO: 39654 - DNA, 298 bp, Zea mays
  Clone ID: MRT4577_136165C.1
cttgggaaggggaaaaggacccgccattttctgggacggccggccaaaaaaaatttaggctttcctaattaaagggggttgggccccccccgggccctaaaaaaccaaaaaaaattttaaaaaggcgggccgggggtgtatatatttggaaaaaaaaaaaaacaaaaccaaaccctccgggggaggggttttgaaaaaatttccccaaccccgcttacaagccagggcggggggaagctcaagaaaaaaaccgggagcgtcccccccccacaaataatgtcgccggacccccccgggg

SEQ ID NO: 39655 - DNA, 436 bp, Zea mays
  Clone ID: MRT4577_136166C.1
cgggtgctatgttggatttttcccgagtgttatcgcatgtatgttgtcaaaaaaaaaaaaaaaaaaaaaaaaaaaaaaaaaaaaaaaaaaaaaaaaaaaaaaaaaaaaaaaaaaaaaaaaaaaaaaatttaatgcgcctcaagccaagccattgatttatcagtataaaaaaaagctcaaagaacatattactatatatttatctgcgagcaatttggggggtgtagggtaaccaccccccacagttcattgatctagcatcattcccttccaaggaaaaggccaaataggggcgtcatgacaagcgcccaaaataataatgccttcctggatggatcatggatgatgcttatgtatcttgaaaacacatgtgcttaaaaaagttcaaattgggtggggaagttaatttgattccgagtttggcccattcccccac

SEQ ID NO: 39656 - DNA, 403 bp, Zea mays
  unsure (1)..(403): unsure at all n locations
  Clone ID: MRT4577_136167C.1
cgcgcccggcgtcctaaacctaacgactctactcacatatgagacattttgtggatattctacccgggcacattccgcatgagctgaggcctcccagggcaagctcagccgataagactgaacacttcacttaagcatcgcaaactaaatctcatctcgcgtcaacgtaaatagctggcaaagccatgctacttcagaacacacaaagngagtcttaagcaaatcaacacgaccatgcaagcaaaaatggagcatcttgacataggctcggcactgcagaccgacagctagaaataacctggatgagtgaagttcttagatgcaacacaaaaaaatcttgcagaatactgtgaatttgtagcaccgggaggaattatgatgaacactctaatgaacaccatga

SEQ ID NO: 39657 - DNA, 1321 bp, Zea mays
  Clone ID: MRT4577_136168C.1
actccttagggcgattgggaccctcgaggccggccgggagcatagtaccattcactaatccaagacaaaacatggctgtgaatgtgagaaccatgtggtcgtcgatgcgggcacatgttgcgatggttgtggcgttggtgttcttggtgagcggcgcatggtgcggtcctcccaaagtccccccaggcaagaacatcacggccacctatggcaaggactggctggacgctaaagcgacatggtatggcaagccgacgggtgccggtcccgacgataacggtggcggctgcgggtacaaggacgtgaacaagccccccttcaatagcatgggcgcatgcggcaacatccccatcttcaaggatggtctgggttgtgggtcctgcttcgagatcaagtgcgataagcctgtggagtgctccggcaagcccgtggtggtgcacatcacggacatgaactatgagcctatcgcggcgtaccacttcgatttagcaggcacggcgttcggcgccatggccaagaagggcgaggaggagaagctacgcaaggcgggcatcatcgacatgcagttccgaagggttaagtgcaagtacgactccaaggtcaccttccaccttgaaaaggggtgcggccccaactacctggcactgctggtcaagtacgtcgacggcgacggtgacattgtggcagtggacgtcaaggagaagggctccgacacatacgagcccctgaagcactcctggggcgccatctggaggaaggacagcgacaaaccgcttaagggacccctcaccgtccgcctcactaccgagggaggcaccaagtccgtctacgacgatgtcatccctgccaactggaaggccaacaccgcctacaccgccaaataattaactttagtgctgacaatactttaagccgacctatgctagctatactagattgggttggatcccaagcaatgcattacacatgcatgcattggaccgtgatatctatttgctaccactaccctattacgacagtgatgctggcgccaacaatgatggtgtcatcctccttctccatcttcttcatctccatatatagctagagtgagacttcgctgttgtttaaaagagaagagttaagaaatggattgacaagttatataataagtgcctaatgaaatatttgataggccttcattttttataaaaggatccatgaatgttgtgttgtccatgtatctcctacgtaatcctaactttatcatgcatggctacattttaatagaatacatattttttatgactaattgaaatatatgatagtacatgctgattct

SEQ ID NO: 39658 - DNA, 256 bp, Zea mays
  Clone ID: MRT4577_136169C.1
attgaagcgtcattggagcgacgccatggagtaaggctgcggggccgggcggggcggggcgcctgcgtcggcagcgcgcagcgacgaacgacgacaacgtgaagggcacgaagcacggccccagtcgaccagtcagaggaggaaggatgcgagggacggagagatgctggggaggggaagccagagatgatggagccgcaagggagggggagaagagatgacgcgtgggggagtgttgccggctgctaactgggga

SEQ ID NO: 39659 - DNA, 580 bp, Zea mays
  Clone ID: MRT4577_13616C.1
cgaggacatcgacggagatgtcctcatgagggtcggaggaggcaagaggcatgggcggtactggattgctaagtgaggcaattgactcgtcgtccagctcccatacgtcacaggcccagctagaagaagaaatgagggaacgccaggagatggagacgaggatgatggcggagcgggaggcccgcttagcagatcaatagaggatggcggagatgctccagtacatgcagagccttggcgccacacaaggttttgctccaccacctccgttgttccctccagttgaccctgcttagttccatactcctggacaatttacgacggcatccaacaaccctcatgaatctcccagcctatcgccgcaccagtccagccgcccacctcgcccatgatcttctcttagcttagttgtgattgtgagacttgtgtgataaacttgtcttgaacttatgtttgttaaaaacttatgtttgagagttggtaatacttatgttggtaaaacttggtatgaacatagacatgtttatgaaaaacttgtgagatttgtgtttttttgtgaaatatgtggtctctattatgt

SEQ ID NO: 39660 - DNA, 753 bp, Zea mays
  Clone ID: MRT4577_136170C.1
gtatcatcttcacttctctaagagcgtagcgatgacaagagataggcggagaagttgaatgtcgaagaaatcgtggagaaccagcggaaggacgtcaagaagccccaactcgaccgctacaaagccttaaggcaacctgcggcaagccaatcggcattgattcacacagcgaagaggaagatctacgaatgcaccttgatgaccaccattgcccatggtactgacaagacgaccaggcactacctccccacgaaggtcaagaagttagtggtgcacaacggtcttgcaccggagtagctacacgatgcaccaaagagatgactgccaatgcatattgcacccaacgcgtcccaactcaaccaccaggtaatactggatctagactgacaacaccacaatgaaccacccataaatcttgctagattcacaatgaagaaggccgatgactctggcatgtcgtgtttactactacttgggtgtatctaaaacttatgtgatggtctattatatgtatgcatcactatatatatacttgagtttaggtattgttgttcttggtctgctggagtttgaagataaagactccgtcgatgaagttgacctatgttatggtaagagagatatatatgccgtcactcctaatatatagtatagacctactggtatgcggagtactggactatcttttctccatatgcatgttttggcagcccgtaatgaatggaatgtgcactgctacgaaaaaaaataaaa

SEQ ID NO: 39661 - DNA, 472 bp, Zea mays
  Clone ID: MRT4577_136171C.1
aaaaaaaaaaaaaaaaaaaaaaaaatatacaaaaaaaaaaaaaaaaaaaaagtcggttttcctccctcccctccacgctaatccaatccatccaccccctgatcacccccgccgccggcctaacccccctctcccctgctctactacgcgcgcgatggcggcggtgacggctccggtcgaggtgcccgcggcggcgccggtgaggactgtgaaggtcacaaatgtttccctgagtgcaactgagcaagacattaaggagttcttttctttttcaggagacattgaacatggggatatgaaaagtggtgacgagtggtctcaaattgcatatgttacttttaaagatgcccaaggagcaaagactgcgcttcttctttcgggggaaacaatagttgacctttctgttatcattgcacctgctccagagaatcaaccgccccctactgcctctgctccactgatgagtggaacc

SEQ ID NO: 39662 - DNA, 642 bp, Zea mays
  Clone ID: MRT4577_136172C.1
acgtgtgggacgagctggacctggacctggacgcggtaccaggcgctgaaatggaccggcgagaagcggacaagggcgtcgctggcttccacgacgtcgaggacttgagtggccggccttgcggttggggtgatgagttctcgtatctcgcggagccgatgcagttcgtggagcactatgactagtggtgcaagaatagcttgatctggagctggagggggatgattagtggcttgttcatagcttcaccatactaggattctgccagctgagattcgtatatactggttgagttgacatgctggctgtggtgtggtgtatagcgtcagctcggacttctcagaatagagatggcaatgggtacccgaaacccgaatacccgacgggttttacccgatatgaaggcgggtacgggatgatttctctacccgcgggtatgttaatgggtaaaaacttctacccgttgggtagacgggtacgggtatgggttggtattacccatacccgtctacccgtgggtaaaatatacccgcatcaatagcactataaacatataatagagtccaacttagctagaataaaacccttctctagttatcatttgcctagataccaagttatgtaatcatatgatttgttata

SEQ ID NO: 39663 - DNA, 509 bp, Zea mays
  Clone ID: MRT4577_136173C.1
aaacttttttttttttttttttttgtacaagatttatttttttttttttttttttttttttttatttttttttttttttttttttttttttttattttttttttttttttttttttttttttttttgcaccccccggggggggcggttagggggatttattcagctacctggggggttctttttggggtttcttccgttgaacccattggtggttttaagctcttctgtttatttttgttggaaaaactttcttccgttcagtttgctcccaaaagtaagccctggtaccttttgggtacaaccgggggggttgtaattagagcagtacactataattaacgctggctccttcttgccgctgcaacagttgaaaaaattgggccaccttgtttttacatacaagcaacattcctgccaagaaccgattttggttggtggcctttttttgatttttccttagttatggctcagtgtcggggctctcgcgtgttgggtgggcgctatccac

SEQ ID NO: 39664 - DNA, 332 bp, Zea mays
  Clone ID: MRT4577_136174C.1
atatagtggggtagccccacagtggcacgcagttgacggcgaatacactcctcccaccaggtgcgaccctgggcttcgcctcgaccgaggccgtggacgcggccgagtccttgaacaccatgggggcaaggccaaccttcgcgcccgctgccgcgccgaagaaacccatgcgagaccccctcagagtcagcgctggccacgctggtgcagtcgctggccaccgagcacgggctaccggccagagacgcgtttgcacattgcccttccggcgccagcgcgtcgtcatacaccgtggatgacgtcctgaccgggggcacggggacccattacat

SEQ ID NO: 39665 - DNA, 431 bp, Zea mays
  unsure (1)..(431): unsure at all n locations
  Clone ID: MRT4577_136175C.1
gggtgctcccttcccttaacggcttaactaggttcatggcttggacgggttgctgagcgggtgcggngaggaaacaaaaaccctacgaaggggggtcttatgaaaaaactgaggccccccaaaacatcccccccccatgtgtcgcaaaagcggggctggcctaaacaaatgggcagcccgctgttctcgggggaaaaaattccctccatatagaaaaaaaaaaaggtgttttcacgcttaagggggcccaccccgagggggttaacgggctttgtggcctctttttttttggaagaaccccccccccccccttaaaatagggggttacagatttgaaaaaaaaatcccccttctttggggggggtttttgaaattgccaccccccccgggggggattgtgtctttttccgaatttccattgggggactttt

SEQ ID NO: 39666 - DNA, 176 bp, Zea mays
  Clone ID: MRT4577_136176C.1
agcgtccaaaggtgcggaatagttatgacagtgtgacacaacaaacccagtcaccatccatcatttatcaaacactacggccatgggaaaacacctatgcataatgaccgggccacaagacacttgcgaaacaacaaaagatcatacttttttttggtccaagcggcaggttaata

SEQ ID NO: 39667 - DNA, 102 bp, Zea mays
  Clone ID: MRT4577_136177C.1
ctaatgcttattaatgtttcgttttctttctctacaatctatcttattagccacatgctataactttatttatctaaagcctgtttctaacctacacctact

SEQ ID NO: 39668 - DNA, 2308 bp, Zea mays
  Clone ID: MRT4577_136178C.1
aggtaccctaaaacaagcaccggcgactgaaggatgtggtaggattgtatcttcccgtttgtttgcctggcactgggactccgtcaccgtctcagtctcaataacctttcccgtcggctgcgcggctcccatccccgcgtcttttcctctcgactctcctctctctctctctctctctctctctctctctctctgcgctgctctcggtttaggtcgaggagttgctagctagctagggggtttggatccctgctggtgctggctgctccgctgctgcgtgctagtcctactccagccccccagccccagcgaagcaggcaagcatagatagaggctggggtgggcagggaggtgcgcggacggagatccatcagatcagaatcagatcacatcatcggccctcggatgcgatgcagcaccggcgcaagcccgcttccgccgcggcgccgccggccgccaagcagccggccgcgcgcaggcccacggcgcggctgtcgctcgcgggcctcgtcgtctccatcttcctcgtcgccaccttcctgtacaacgaggacgtggtgaaggcggcctccggctcctccagctcagcaacaacagccgacgccgctgaggtaggcgtctccgggcgggcgaggtcacccgacctaagggtgctgcaggaggcggcgcaccagggggtggaagctgaggagcgggaggttggagatcgtacggaagcggagctagaagcagaagcccctgaccctccccatccccatccccgtggtggcgctggcggaggaggaactcgtggagaatactaagggaaggcagaagcagcagcagcaggaggaggagcaaagccagatgcgaccgccaccgccgccgcctcctccccaggttgcagggtgcgacctgtaccggggtcggtggacgttcgacgcggccggcgagccaggcgccgctgtacccgcgagtcggagtgcgagttcctgacggagcaggtgacgtgcatgcgcaacggccgccgcgacgactcgtaccagaagtggcggtggcagcccgatggatgcgacctgcccaggtacgatgctcggttgctgcttgagcggctgcgcaacaagcggctcatgttcgtgggtgactcgctgaaccgcaaccagtgggagtccatggtgtgcctggtgcagtctgtggtgccctggggccacaagacgctgcacaagttcgtcaacaacggatcgctcaacgtgttcacggcgcatgattacaacgccaccgtggagttctactgggcgcccttcctggtggagtccaactcggatgacccgcaggcgcacagcgtcatgaaccgtgtcatcgcctggcgcgccatcgccaagcacgccaagaactggaagggcgtggactacctcgtcttcaactcatacatctggtggctcaacacattcgagatgaaagtcattcgccgtcatcagcatcagcttgaaaaggaggaggagggggtgaggtggagcaagtacgcccttgtggaccggccggtggcgtaccgggaggtgctcaagacgtgggccaggtgggtggaccgccacatcgaccccaaccgaacaagagtcttcttcatgggcatgtcgcccaaccacgtcacgccgtgggcgtggggtaacgacggcggcatcaagtgcgccatggagacgcagcccatcagcaacaaccggacggggcgactggacatcggcacggattggcgcctgcacggcgtggcgcgcggggtgctggcgcgctacctccgccgcgtgccggtgcacttcgtcgacatcacggggctgtcggagctgcgcaaggacgcgcacacctccgtgcacacgctgcggcaggggaagctgctcacaccggagcagcaggccgaccccaagacctacgccgactgcatccactggtgcctcccgggactccccgacacctggaaccacttcctctacgcgcacatcctctcgctctcctcgtccgcccaggatcactaaccatttttgcccagcctcacaatgtcaagcgcttcctttcaactcctctccctagaccacccacccaccctggatacctattactactgctgctgctgtagatcttcgtttcattttgacaaatgcatgcaggtcttctcttgtaatttctataaaaaacatccctgatttaattttgactagcagtaccaattactttttcaaaattagtggtgagagagagagagataaccatgatgattaccaatcaagaaactgtggtccggcaagcagcaaaaaaaaaaaaaaaaaaggcccctagggcc

SEQ ID NO: 39669 - DNA, 258 bp, Zea mays
  Clone ID: MRT4577_136179C.1
cagtgagacggtatatctgtgagaactcgccacttctaatacgagatcctaccagaaccagagcaaacacactacacatacaccatgactcttattgaggttaggcgctaggcagcaccacacaattattgacctttgaacgcactaccctcgatcccactttcttacaatctgctgctcttcatgagctctataaactcaccgaaggctgagacggagacatgccgtccagaggactactcggaatcggtccttaca

SEQ ID NO: 39670 - DNA, 311 bp, Zea mays
  Clone ID: MRT4577_13617C.1
gaattaaataaatgatctcatggataaccaaaaaacggggcaggcacatgatcgccgaccagacaatggagcgtacacgcacgtaccaccaagcgcacacttgctccttcgacaccgactacactacatacagacacactcccgtctaaacagctcacaccgacccatacacgacaaggactccattgcggccaaacaaatgacaaattaagcaaataccacccgtacatctcatatctttgccaatacgtcaccgaacgcgccccgcacgagcgaggccgggcctaggggtacaggaggagctggaacct

SEQ ID NO: 39671 - DNA, 510 bp, Zea mays
  unsure (1)..(510): unsure at all n locations
  Clone ID: MRT4577_136180C.1
agcggaaattaattggttattgcaattgattatatggtacaatcagtttacattatacaattatcggagtgattacaaaagaaagtgattcaacagaattacactttgaaatgtataaaacatttataagttttaaaatacatactagctcatgcgacaatcctcaataaagaaactatagatgagatatacttatacatatgagaaggccgagcccaccggcacttagcaccattcacaacagaacagaattataacctaaaaacaacagggaataaaaccctaagtacacaattactctgcaagacttacccgattaaagaaaacgctctccagggtatgctggattggtgggattcaaggtaaagcttatcaaactttgaagactcgttgttgtagaaaagctnactagtangtggatccttatgccaaaattttactttataagctaaggacatttcctgaatctagatttccctaatctagagcattcacttgccctacactagc

SEQ ID NO: 39672 - DNA, 435 bp, Zea mays
  Clone ID: MRT4577_136181C.1
tgatctcagagggggcgcagcgcaggtgtgaaggaagggggacccttcggaagatggggctcgcgttcggcatggtcatcagccggctcttcggcaagagggggaaccggatcctcatgggtggcacctactccgccggtaaaaccaccatactctacatgctcaaccgcgcgctagatcgtcaccaccatccccaccatcggtttcaatgctgaaactgctgaagacacctgcattacatgcactgtctgggatgtcgggggtcaggacaagattagacctctttggaggcattacttccagaacacccagggtcttatctttggtggggacaggactgaccgtgaccgtgttgttgaagccagagatgagctccacaggatgctgaacgaggatgagctacatgatgctgtgctgctcgttttgccaacaagc

SEQ ID NO: 39673 - DNA, 830 bp, Zea mays
  Clone ID: MRT4577_136182C.1
catgtcttttttattatgcattccttattgtttctcttggtagttgcatcatttaagtgttaaggctgcatgtaatctccaattagcatcatatctctctccatgccataaagaatctttgctcgagtcatgccactcaatggaaatgaaaattttaaaagaaagcaattattcgccatggaatataccttgccatgcctgcagaggagtactcttaacgaattatatggggagcatttttgtgaaaagtaaaggtgaattatagctagtaggtattgcatcatctattcacatagctagatgtttttatcaacttttgagggttctgaagcagactgatgttcatgaccattatagtaagggtaatccgctaaatagtttagtgggccatgatgatggcatgctacttggttgtgatatactacatccacctagatcccagattttcacatttcatgcaaaatgatcagtacaagtccagatgaggtgttctttttttttaactgaaaaagtatatatttgctgttcgtggggtaacgattgttctccttgaactcagccttaggtttctgaaggatgctagaatgtagaagtgatggctagtactatgaggacgttagtggatttcatgaacgcattactgggaactttggaaagtgagtctatatgctactatgcctataatctcgagcaagaggctggaccggtcaaagtgtagcatggagaattttgagcccccattacacaagaatgtcggcattctctgagcatatatttgtgaccgtcatctttggtacaatgctgcaatattattgtgcctttttactgtc

SEQ ID NO: 39674 - DNA, 520 bp, Zea mays
  Clone ID: MRT4577_136183C.1
gcgcagctgtcgtcgtacttggagctgtgccgggacctgggcgtactcaacgccgccgagtttccggccgtggagcgtgtctcggacgatgacatcagggacctcgagaagatcatcatgaaccacgtcgtcgaagaacgcggcaaggacgtggagaaagaaacgaaggcgcttgtcgccgtggaggaaacccgactagcttccaagacagtggtgacaaaagagtgggtggtgttcgacgacgacgacaatgacgccgccggcgccaggccgaggtctttaggtagttacatgaatccgttcatggccgcgccttgggacaccgtagcgtgtagcagagacttattggtttagcgtgtgtttggtagctgagatggaaattggagcgccatctgatccgtcggacttttagccaaaaattactcgaaatttgtcgtctatggatttgacctactactttgtattatcattatttggattattgagttgagaatccttgtaaataaaaaaaaaaaaaaaa

SEQ ID NO: 39675 - DNA, 473 bp, Zea mays
  Clone ID: MRT4577_136184C.1
agaaacgaatgtcacatctttactatataataggagttctatacaaaatagctaaataattacatcatatgcagacaacgatctagcaaccctagttgactgggagatgacgacctagaccactcacgaactcatcacagcatccttcatgcgcctcatccagtggtacctgttcttgacctagtatggtgacgcagaggagatggtccgcgctagggggtcttcccgcggcggaggaattgctccggcgagcaattcccggtggcccggagtgcaatccgcccaggaattgcgacgttcatgatctgagaagcttcacgaagctcttaggtccgatcccgtaccccgagcggcagcagacacgttttaccaagaattagggcgccagctcgagtcgtctgcggtggctaatggcgtggcggcggggctcacacacccacacatcggtgcggacgcgtgggcggacgcgtggg

SEQ ID NO: 39676 - DNA, 339 bp, Zea mays
  Clone ID: MRT4577_136185C.1
agccaacacacgaatgcgctttaacaagatacgtgtccaagggggcatgaaaactgttactaaaacaggtataagaaacatgatgagcaatatggactcaaaagtgtgcagactataacagaggaatgaaacaacaaggtactactgtagtacagactcaggatacagactgtcttagtcttaccagtacataggcggcattctaagtgtcaaagacgaccatgcccaacacaaggccgcaaaacatcttggaatgaaaggctaacattgcccgtggtggaggtagcaacggtccagtctgaacacgttctgtcatggagggaacagcatattccaacc

SEQ ID NO: 39677 - DNA, 222 bp, Zea mays
  Clone ID: MRT4577_136186C.1
tcgtcccactccgcttgtgggttccacgattttatcacgatgtgacgatacgagatcattggttgaatttctggagaccaaggccactatcctgatcgagttccttatcaagaaccatgtttaagacattatgatcgatgctatggctcaagaccatattagagtcatcaccatatataagcacttgcacaatccattcctgatagatggccacagattacg

SEQ ID NO: 39678 - DNA, 253 bp, Zea mays
  Clone ID: MRT4577_136188C.1
aacctacaacatccaacatacaatcaaaactaacatcttacctttatcacacttattactccaacaatcattatccctattacatcaataacctttactccatttatttacacaaaacatcataacacaacaactacaacaacttatactatcaaaccttaacttcctactttcataaacaataattacttccatacaaccaactatcttcaattaaactctacttattaattacaacaacaacaactaccat

SEQ ID NO: 39679 - DNA, 546 bp, Zea mays
  unsure (1)..(546): unsure at all n locations
  Clone ID: MRT4577_136189C.1
cggaaccggaacttcccggngcgggtctcgtcgggcttctccgggggttcaggcttcctgcgctgggcggggtgcgagatggccgcataccgatgtctgagtaccgcgtgctatcgtgcggcgggcctcgcgctgcggacacggcacgaccactgcccatccacaacgtccttcagcactctacgagcgaggatcctcggacgtccaagaatcataccatcgcatcggcaaccacgcagnaggtgggcggggggcttccggcgnttcgtcaccctctctccacggcagagaggcagatcgcgagaaccgcctagtcgagggcatgtaaccggcaagggagcgtgggacggggcgctaacactcacgcgatcaatcgaggacccgactcccccgcgtgccggcgcgtggaggacaggcggcaggcggggtaccggtggtcggcacgtgtgaggcggccggctacgggcggtggccgggcgcctcagatggctggtgcgcggctacaagcgcgcggcgagcaggctactgtggcggagcggcggctac

SEQ ID NO: 39680 - DNA, 436 bp, Zea mays
  Clone ID: MRT4577_13618C.1
gttaattaagctgggcaggaaccaaacatcaactgtatggatatacacacaggggctaacgcgtaacatgaacaatctcgttttttcttgaacgactgtacatataatgaagaacaatgcatgcgtgtttactctgagttggaggccataacaaaccatgttttctccgccccagattaaacggacataccgggcaccatgatatgattttatcaagaaggcaaaccaccaagttacacttgcgagcttagctgctggaggcagctgacgaggagcgcgcctgcagcaccttgaaaaactcgcggatagagcacggggtgcgggatgacctccttggctacatgcagcgctgcgaagcgctacgcccacgtggactggcgcaagacccggccggtgtccaatatattgacgcccaccaccttgtcccacgcgcgca

SEQ ID NO: 39681 - DNA, 441 bp, Zea mays
  Clone ID: MRT4577_136190C.1
ccggggccgcacccccaaaacttccgcccgagtctgagctcatctacgcgcgctgccgccgtcgcctgtgccgctcgacgcccatcgtgcaggcgtggggtaacagaccgacaaggatttctctatgcagcctaaggggttcgtcagctcagagcaaatgtaggggggtctagaagccagggctggctggcaataggacttctactacctgtgtgcatagcggcgactctgacatggaagagatggtcacgaccgccgttgacaagggacagatgttgtctgggatcggtgttctgctccgtggccagcacggtgtcccccttgtcaagagtgtcaccggcaggaaaatccttcgtctcctcaagggccatgggctgggtcccgaaaacccggaggacctgtactttctcctcaagaaagcggggggggtttggaagcacc

SEQ ID NO: 39682 - DNA, 334 bp, Zea mays
  Clone ID: MRT4577_136191C.1
gccggccgggtcgggatctcatctcacttctctactcttttcgcgaatggacactgtacacactattcgcccactcagtccgtgagtccctccctgcaaacatggacggcctcgagagacggtgacgaaagacgtggactgccaggcaccgcgtcgctgcagcgcgcgcccgactagatgcggtgacccggtccgtctaggtcgtgctgcagttccccgtcgggcgcatcgggcgctacctgaagaagggccgctacgcgcagcgcgtgtgcactggcgcccccgtctacctcgccgccgtcctgtagtacctcgccgccgacgttctctggtt

SEQ ID NO: 39683 - DNA, 1111 bp, Zea mays
  Clone ID: MRT4577_136192C.1
ccggaataaagcctcgacttacgcgtccgaaagttacttattggacggggtgagagattcctaaaaatcgaacagccgcctgcatccttcttggcggctatggaggaatatgtgagcaatgctccccttgcttcaacagttcaaagaaatcaggctgtactggccatagaggacagcaaaaaatcagaagttgaagaatcacaaccaacgctgcctcctccccactctccagctcaagaacctgggcctgagccagttcaacaagtcccacctgcagctgaaccaacagatttactgggaatcaatgaaccaacccctgccacatctgaaatagatcaaaagaatgcgggggccttggccatggttccacaggataatgcgccaaaagcacctgcttctactaccagttctggaagtgtggagactagctgggagctggccttggtcactgcacccagttcaaatgggactgctgtcactccaagcaaattggccggtgggctggacctgcttacactcgacagcttgtacaacgaggcgcaccgaagagcgcagcagaacgcaagctacagcccttgggagaccaatccagcgtcaggcccagtgatgcagcagcaaatgtacgacccgttctacgcctccaatcaccccgtggccgcagcccgcaacgtccagatggctgccatggagcagcagcagcaacaacaacatgccttcgtgctccagcagcagcagcagcagcagatgattgtgatgatgatggcacagcagcagcagcagcaagcttcttccaatccgttgtatacggccgccgccgcccacacgtatggtgcaggggtgcagctccacgcgggcaacgcgtactctggagctgggatgatgtaagcgttgcacagaacctgctgtctggttctgaccggcatcttccgttctttcttgttttttctcattattttcttgcatttttttttacattgtaagaactgtgttagggctagaactagaaatctgatatagcatcaatatgagcacattcttgatgttcatgaccaataatggtcgatgcgatgatggctttgaactgaagccctaaaatagcatctatccttgc

SEQ ID NO: 39684 - DNA, 144 bp, Zea mays
  Clone ID: MRT4577_136193C.1
atcgagccgttagacctgtccgaatcgcgtacagggcgttcgctttaagattcgtggggggccctaccatctactacctagattcacgacggatatggtttactagcttacctaccgctatggaggtgcgatcacgttcgtcag

SEQ ID NO: 39685 - DNA, 899 bp, Zea mays
  Clone ID: MRT4577_136194C.1
cgcaataagggcactgggcatgtatagaagagcaatcgagcaggcagaacaactttcagaattttatgaagtgtgtaaaagtatacatattgggcggggtgagagattcctaaaaatcgaacagccgcctgcatccttcttagcggctatggaggaatatgtgagcaatgctccccttgcttcaacagttcaaagaaatcaggctgtactggccatagaggacagcaaaaaatcagaagttgaagaatcacaaccaacgctgcctcctccccactctccagctcaagaacctgggccggagccagttcaacaagtcccacctgcagctgaaccaacagatttactgggaatcaatgaaccaacccctgccacatctgaaatagatcaaaagaatgcgggggccttggccatggttccacaggataatgcgccaaaagcacctgcttctactaccagttctggaagtgtggagactagctgggagctggccttggtcactgcacccagttcaaatgggactgctgtcactccaagcaaattggtatacaagctgagataattcacatatattttacacttcatttggcgtctctgcgatcatactaaactcaacttgctacaggccggtgggctggacttgcttacactcgacagcttgtacaacgaggcgcaccgaagagcgcagcagaacgcaagctacaacccttgggagaccaatccagcgtcaggcccagtgatgcagcagcaaatgtacgacccgttctacgcctccaatcaccccgtggccgcagcccgcaacgtccagatggctgccatggagcagcagcagcaacaacaacatgccttcgtgctccagcagcagcagcagcagcagatgattgtgatgatgatggcacagc

SEQ ID NO: 39686 - DNA, 785 bp, Zea mays
  unsure (1)..(785): unsure at all n locations
  Clone ID: MRT4577_136195C.1
tggtggctgtgcatgcctcctggccgtggacggttctggcccaggccaccgtcatgccctgggaaatggtgcgcgtccctgcgcccggttttcgtttctgtcgcactgatctgtgctccgtcctggccgtcttttctgcctccaatcttggcgccgtcgcgagctcgtcagccactgttgtcttgtccgcgccagcacgcgttcatggtcgcgtcggccaagttcgccaacgttctattaccagttcgactatcgtcgctgttgcgtgcgctcgcgctcgctatcccctgctcgacctcgtcgtcgttcttcgctcagcaaggtttcgttctaagcgccgcccttcaagttcgcgtccttggtggactcgcacctccgtgtcgtgtccgttcgtccatgctgtcgacccgtacgaacatagggtctcgctagagtcgtgctgccgttgacgcaacgcggggttagctctctgctctgctcagcttgtcgagaccaaggaatctgcacacacgtcatagtcggtgcccaatatctttgtgtcgcccttcgtatgctgtgacacccccttgctcctcgtcatcaatccatgtcgcgtccgcgacgtgcccgtcgatcctgacgatctatctgtcagttgcgcgccacttgcgttgagctccgaagccctttgtcgtgctcgaccctggaagcctccaactcgttgacatcctttgcgtcgtcgaaaattccgagagtttgaatgaagcaacaaatcccatgtgatgcancatttgcccagagctcga

SEQ ID NO: 39687 - DNA, 673 bp, Zea mays
  Clone ID: MRT4577_136196C.1
aaaaaaaaaaaaaaaaaaaaaaaaaaaaattcccattcatacctcgctttgctttcttgtgcacccaagcaagcctccttgctcttcttcttcctccttccgaccgatctcactcctagccagcttagcttgatcgagagagcgagcatggtggagagcgtagcagcaagtccgtcggaggagcaaggccgcggcggcggcctgtcgctgcctccggggttcaggttccaccccaccgatgaggagatcatcacgagctacctcctgcgcgagttcctcgaccctagcttcgtctcccgcgccgtcggcgaggtcgacctcaacagctgcgagccacgagatctcccaggcaaggccaacaagggggagaaggagtggtacttctttgtgcacaaggacctcaagtaccccaccgggagccgggccaaccgcgccaccaaggagggctactggaaggccaccggcaaggacagggagatcttcaagccccgcgcccgcgagctcgtcgggatgaagaagacgctcgtgttctacacgggccgcgcgccccggggcgccaagtctgagtgggtcatgcacgagttccgcctcgaaggcaagtccagaggccaaaccatgaacaatcccaaggacgaatgggtcgtgtgcaaggtgttcaacaagaagggggagg

SEQ ID NO: 39688 - DNA, 395 bp, Zea mays
  unsure (1)..(395): unsure at all n locations
  Clone ID: MRT4577_136197C.1
gacccgcggcgcccgcagcgcggcgcgccggcgcgagcacagccaccgggagcagaacgcagacacccacacgcagagcgcggcgcaccggcncgcaaagcccaaggagggggccgacgagcacccgcacgcgcgagccgcgnccaagggcaaccggcgccgcgcgcgccggcaccagcngcgggacccggcggcggagcacggcancacnaagcncgccgaccgcacgccggcagagcnccgccggaccgaccncggncnccgcaaggcccggcgcgcccgccgcagagaacccggggagccggcgcacgaggcgcccgggccccccaccgagggccgccccgacgannncgacgggcgggaccacggggccggcggccccgccacgaaccagg

SEQ ID NO: 39689 - DNA, 185 bp, Zea mays
  Clone ID: MRT4577_136198C.1
tttatattcttcccgtccaaagacggagagaggaaaaggtacaagggcaaggcaagagagaggcgtcgtcgtttgatctgctgccggagtgcgaagaggaagaggaagaggagcgccggagttgtcaagatgtttctgtcggactgtctctatggggctctgaagtcgctagatctgatcgagat

SEQ ID NO: 39690 - DNA, 470 bp, Zea mays
  Clone ID: MRT4577_136199C.1
cttggatcctctcagcggccgcctttccttttttttttttttttttttttttttttttttttttttttggggtgggttttttaatccaacattgaggacctatttaaaaacaaaattttaaaccatggaacacatttagaacacttttccttaccgcggaaaaaaaggacatgggattgtcccttttatgagccctggctccacaaacgttcacaaagcaaggttttgaaaaaatactggagcaaaccacatcccccatcctgtaaaccattccctttgccaatgagggggccccctcaaacaaacacctggtcttcatcttgcctaacaaaaggacccctgaaaggggatcaaaaaacgttatccatcccacccttttcgaaaaaagccccaaaggaaggcttctccccggtttctccacaaaagcccaccctaaaaaaaggcctaccctttgggcccctctttttaaa

SEQ ID NO: 39691 - DNA, 339 bp, Zea mays
  Clone ID: MRT4577_13619C.1
tacgtccccgtcccgccgacgcctcggccctcaccgcggtacgtgccaccatacgtccccgtccccccgacgcctcggccgtgaccggcatacgtagcccccacgccactgcacggcgactacagacaacgtaccaccgacgccaatctacgtggcacctacgcctaggtcattaccggcgtatggaccattctagggggggtcgacgccttggacatcaacaccgtacaagacattgtagcgtcagaccatgccttccaccaagaggacgaggataagcgataaactgaagctaaagacagagcatgtatgtgttgactgcactgaaccaactgttga

SEQ ID NO: 39692 - DNA, 313 bp, Zea mays
  unsure (1)..(313): unsure at all n locations
  Clone ID: MRT4577_1361C.1
tcgacccacgcctgcggagaggagcnnnggganggaacatgggcatgctctaagcacatatctcagagcttaaatgggaaacattggcaaatctatcaacacaatacaatctaacaaattcacctaatagggatcacaatgtatgcaagtacatacaatccacttattcatgtcatatcatcattttcgtgaattgatataataacacataagattataatgtcaacctttttttgtataagacaagctgtaatgatttatttacttagatcccttaaccatgcctggttattccttgtattttttcatacac

SEQ ID NO: 39693 - DNA, 197 bp, Zea mays
  Clone ID: MRT4577_136200C.1
attcaatgactttcaaaaactttcatgacatgcatccttcctgtgtctgcaattttaatctgtccttttgaataaaatgtttcctctaacaagtgaagggcactgtttttattgtctcgtgggccacagatgcctgctgaacaatttatgttcatttcttcttttcttaaagaagcatccttcatgttcttagtgca

SEQ ID NO: 39694 - DNA, 178 bp, Zea mays
  unsure (1)..(178): unsure at all n locations
  Clone ID: MRT4577_136201C.1
ccggccgggtggtgtataagcaactgaaaacagccgagcgatctcctctccctctccctctccgatncattctccaagcgnagcgaagtaaaatgtctgaccggnnaaagatgtcgaggnaggcgtacgtggaccagnacctgntgtgcgagatcgagggncannacctcgcgccggc

SEQ ID NO: 39695 - DNA, 291 bp, Zea mays
  unsure (1)..(291): unsure at all n locations
  Clone ID: MRT4577_136202C.1
acgcctgcagtacctntccntaattccctggatgcggctctcttctcacttccatcctcctttctctcgctctctctgtccctcaaagccttcaccatctaagagcggggattcacccaccaggaggagagggtgtntctncttaccttcttgctgtccttgctggaaactccagcccctctgctgaggacttgaccgccattctgcattcaatttctgtgaacttgacaatgaaaatatggatctccttctgtcccaactcatcggtaaggacattaccgatctcattgc

SEQ ID NO: 39696 - DNA, 150 bp, Zea mays
  Clone ID: MRT4577_136203C.1
acggaccaaaaaactatgtgccatgccatagccggtgactaactagctacaatgagaccatttatgcgtcgttgataacagtaataaatgtgtcacgcatcaccatggagtggcaggcccagcgtgagcaacgacctgaatgaacaattg

SEQ ID NO: 39697 - DNA, 372 bp, Zea mays
  Clone ID: MRT4577_136204C.1
cccttttaatacttttcctcaaaaacacttagaaggagggggcttttaagatatccaggagcccatcccaccaaccactaacctttgtgcctcgcgggagagaaaagtccctacatcataaagcgaaacccgccccactactgaaagaccaaaccctcctgaggcccaaccttaccggatccactcagggcgtatctacggatagacgaggggagcagggccggagacaccggggccagacgagggtaataggcttataaaccaggtcatcgcccggaccctcctgaaaactagtaacgacctcatggaaactgtaccacagagccctcagagcccgattgagactgctccaactatgcctttaccatgccc

SEQ ID NO: 39698 - DNA, 172 bp, Zea mays
  Clone ID: MRT4577_136205C.1
cacccgtttcatcgcaccagcgaatccaacgacatcgctgtcactctcgactcatgtactccagatccatctcgctccagaagctttcctcgcctagatctccctcgcgtgcccggtcgcgctgccgacccggacatggcgaccaaggggaagctcgtcgagctagggttga

SEQ ID NO: 39699 - DNA, 118 bp, Zea mays
  Clone ID: MRT4577_136206C.1
gctataatgagttggataaaaaattgcttaaaactactcatagatgatttctgagtgcaaaacgaatagaatgagagttccacattcccaatgcagccatacgcatcatgcgaatagg

SEQ ID NO: 39700 - DNA, 109 bp, Zea mays
  Clone ID: MRT4577_136207C.1
cgcgcaacaaaagaaattctgtatgctgtttagatttgatctgtgttgtatgatgtgtgcagaatgtgcttgcgaaaattttttggtaccatataatcgagcattttgg

SEQ ID NO: 39701 - DNA, 136 bp, Zea mays
  Clone ID: MRT4577_136208C.1
atctttagtgaagaaacgtttgttaattactgaagaaacattcaccgactactaacaaaacgttccagaactccttgatcgctcaattcccacacattatcaggaaacataatacattgcttgtgaaaaaagaaca

SEQ ID NO: 39702 - DNA, 398 bp, Zea mays
  unsure (1)..(398): unsure at all n locations
  Clone ID: MRT4577_136209C.1
cgcccagcttccagcagtcgtccaaccaaaacaacaacaaccgcacagagggggggctacggcgcgccaaatttccaggacggcggaaatgaggagccaagcgctgttttctagatgccttttacggcttggcgaccagaacagacatatattgtggagttaaaaagaggaggggcagattatgaggaggaggaggaggggagtggnagactgggaaggggggtgttgttggcggntgtgaagttttttttgtgttagggtgagttttgttttttgtgttttgtggtttggtggttgtttttttttttgtgtggtgtgtggtttttttttttttttttttttggattttgggggtttttttttttttttttgtgggtttttttttttttttttggggg

SEQ ID NO: 39703 - DNA, 448 bp, Zea mays
  Clone ID: MRT4577_13620C.1
cgggcgcggtattcggctcgtgctctgttcacaacatactggggtgaatttgtgacatctgcccaattcatgaggcggaggtgtctcgggtgatatacagctgttcataataaggtttagaaacgtttatcctgtcgagggactgacgatattgctaccgctcgagagaagcacgtatgctcaaatgtggcacacggactacatgagcgtaacaggccatactttaggcagaaccggataagtgaaggcgtgactctactggtgcaaataagaaaaaacttgggcgacaacaatgcgctaattgactggatgaggctcccacccggcccagggggcctatatgatgcccgaacagagagggtgctgtatcattctgcgttggagccaacggcttcacatttgactggcttcgcaagattgctgaaattatgagatcatacactggtat

SEQ ID NO: 39704 - DNA, 553 bp, Zea mays
  Clone ID: MRT4577_136210C.1
cccacattcacgagttgagccgctgacactcgctcctcccactccctgtcctcctctccactccgacgaaaccctaccacctcgctccagtcccaccccgccgccatggtgcgccctcgccacgtattcgcctacgctgatgggacgccacaactggagctcctctgcgcggcgaccacgggcgacctcgctcacctcgagcgaatggtgaggaaactcgatggtggtcgcggccgccttgcggaggcggtggaagccgtcaaggatcacggcgctggggcactgcacctggccgcctcgggccaaaatttggaggtgtgcgagtatctggtcgaggatgtcggggtgaatgtggatgccgttgacgaagcaggaagaacacctctggtttgggcaattattgttaaaggtgggcaagtggatattgttaagtatcttcttgatcatggtgccaatccagataatgccgacagaacagggattactcctcttcacgaggccgtggaacgagggcactgtgaagtagtagaactcttgctctctagaggtcctt

SEQ ID NO: 39705 - DNA, 1684 bp, Zea mays
  Clone ID: MRT4577_136211C.1
gtccctattaactgcattccggccgggacacgataaggctaacagcctcgtcgccgctgccggagaaatgccgccgaggagttaagatcgccggagactccgcgacccgtcgccgccgtcctccgatgcaagagcaccaccctccgccttaggcttgcgtctcaccctcctcgttcccctccttatcctggttctcgtcctcgccgcccttggcttctccggcctcctctcccattcccctccccactcccaaacgctacagacaaccgcccactccgtctacgagcgcggtctggtcaagcgcgacgtctccgcacgagagatcctctctgagcacacaagggtttccgagaaccggtcgcagcggaacttcgcgaaccccgtcctcgcctatgtgaccccctggaactccaaaggttatgacatggcaaagttgttcatcacaaagcttactcatgtatcaccagtgtggtacgatttgaagagtgataggaacaggctagttctggaaggagaacacatgtcattttcaggcccatcacatggttgggaagctggcattagtctcccggagttagcttagctgtggggtagtgccgagaattgtcttggaagcacttcctgctgtttttactattcgaaaagaagcaaaaggcaaaagctatcgatataatagtgagtgaatgcagttaatagggataagggctatgacggtattgtgctcgagtcctggtcaagatgggctatttatggtgtgctggatgaccaagagctacgttacatggcacttgaatttgttaagcagctgggagaggttttgcattcagtcaattccaaaatcaagtagccaccatttggaattaatttatgttattccagctccaagaatgcaaaagctcaataataaggactttggacccaaagatctcatgcatctggctgacactgtagatgggttttctcttatgacatacgacttctcaggacctcagaatcctggtcccagtgcacctctgaagtggatacatcattctttagcagcacttccttcagcaaaaggttcctctcatagcaattcacattcacggatgatattccttggcatcaacttttatgggaatgattttctactgtctggagtttcttacaaacattttggtacatcaagatgcatgactaaaaagtggtttccaaaagagcctgaggcatttgctgagcagccccaatgcctcctgtgaatgaacttgtgccaccggtggaatgtgcaacagaggttgtttcaacactgtccccacctaggaaattaaggagagctgtgaaaaagataactccaaagaagaagatccaagccatgtacaactgcaatttggttcctaaaatctgaaatgtgtgatcctgtgccatgcaacaacagttggttcactcaaaatgtgtggttatgtacttggataccattgggttcactccaaatgtgtgttctcgtttttagtctaaatgtttgtagcaacccagttttattctaaatgtttgtagaagttagtcttggttctggacttggatatcagttggttctggtcttggacagctgcaactgtcacctactattatgactcatgtttaaccgtggcctgcattttggaaagcaaaaaaaaaaaaagaagggcggccgccgaatagtgagctc

SEQ ID NO: 39706 - DNA, 1922 bp, Zea mays
  Clone ID: MRT4577_136212C.1
ttcctcgaggccggccgggcccggatatatttccaaatctaacagcctcgtcgccgctgccggagaaatgccgccgaggaggcgagatcgccggagactccgcgacccgtcgccgccgtcctccgatgcaagagcaccaccctccgccttaggcttgcgtctcaccctcctcgttcccctccttatcctggttctcgtcctcgccgcccttggcttctccggcctcctctcccattcccctccccactcccaaacgctacagacaaccgcccactccgtctacgagcgcggtctggtcaagcgcgacgtctccgcacgagagatcctctctgagcacacaagggtttccgagaaccggtcgcagcggaacttcgcgaaccccgtcctcgcctatgtgaccccctggaactccaaaggttatgacatggcaaagttgttcatcacaaagcttactcatgtatcaccagtgtggtacgatttgaagagtgataggaacaggctagttctggaaggagaacacaattttgatgccaaatgggtctctgaacttcaaaccaatgggtctctggtagtgccgagaattgtcttggaagcacttcctgctgttttactattcgaaaagaagcaaaaggcaaaagctattgatataatagtgagtgaatgcagggataagggctatgacggtattgtgctcgagtcctggtcaagatgggctatttatggcgtgctggatgatcaagagctacgttacatggcacttgaatttgttaagcagctgggagaggctttgcattcagtcaattccaaaatcaagtagccaccatttggaattaatttatgttattccagctccaagaatgcaaaagctcaataataaggactttggacccaaagatctcatgcatctggctgacactgtagatgggttttctcttatgacatacgacttctcaggacctcagaatcctggtcccagtgcacctctgaagtggatacatcattctttagcagcacttccttcagcaaaaggttcctctcatagcaattcacattcacggatgatattccttggcatcaacttttatgggaatgattttctactgtctggaggtacatataactaacctttatctttctcctcttttcttttgacatgatcaaataagcttctgtatagcttggctagcaaaagttcacccatgtttcttctgtgtgctgtccagattttcactaaaataacagataacatgtacttgatgcagtttaacatgatcatgttgatgttccattgggagaatttggtacatttcccaagtgatatgaaatcataccttccagtttatgtttgacctacactagagaaattatgtttcttatgaacactgatttgatgcagtttcttacaaacattttggtacatcaagatgcatgactaaaaagtggtttccaaaagagcctgaggcatttgctgagcagccccaatgcctcctgtgaatgaacttgtgccaccggtggaatgtgcaacagaggttgtttcaacactgtccccacctaggaaattaaggagagctgtgaaaaagataactccaaagaagaagatccaagccatgtacaactgcaatttggttcctaaaatctgaaatgtgtgatcctgtgccatgcaacaacagttggttcactcaaaatgtgtggttatgtacttggataccattgggttcactccaaatgtgtgttctcgtttttagtctaaatgtttgtagcaacccagttttattctaaatgtttgtagaagttagtcttggttctggacttggatatcagttggttctggtcttggacagctgcaactgtcacctactattatgactcatgtttaaccgtggcctgcattttggaaagcaagttctggtcttagcactaaa

SEQ ID NO: 39707 - DNA, 309 bp, Zea mays
  Clone ID: MRT4577_136213C.1
ctcaaggaaacctttatccatggctggaggtatcatactacttctgcttgtcatccccctcgtcgtgagaagggaatggagtgtcatgggggagagatccaactcgttctcacaggactccaataattctagccctgctgaaaacaaactcgaaccaggtcctcttttcatattggttatattggttatttattagggatcagtgagcttcgaattgagtaaatctgtaattacttctacactactaattatcattatgtgactgctcgtaaaggtgaaaagtccttcgcatcggaagcatactgtgag

SEQ ID NO: 39708 - DNA, 306 bp, Zea mays
  Clone ID: MRT4577_136214C.1
ctctacagtgagtcgtatcatgaagagcacgggcaggtcagcggcagccacggctcagacgatgtcgtgccacagatacttccacaaccgactcatatgacgacgattaatggccatcacctgcactccgctcggaatagtcggccatgaaagacgccgtgtgggcccaaagcaacgcattcccaaagttcagaagacacgagatgatcaagatcactgaaggacttcgacgagccccggttccttgcacataacgggatcttcgtccgacccaccaactagatggtcatctcaacgcgaacccgg

SEQ ID NO: 39709 - DNA, 379 bp, Zea mays
  Clone ID: MRT4577_136215C.1
cgccatcctgtactctcgttcgcacgatgaggcgtcggccgccaccagcgctgacttccatgcgtttccagcgcgccaacgatcccgggcggacgaacggagtctggcctcgccgcctctctcgtacagcgtcctgtgtggtgactaccaggatgaagtccacgcttgggggcagtgcctaccctggccgcaaacgtctacttgacgaggtgaacatacaacatacactgccaccgatccctctagatccatttgtgcggctatactggtggacagtgaagctatctaactactcacggctccgatacgtggacattgaacacgaaccctacaccaaaggatcaggctcgggcaccaagatagctgattccttactgcc

SEQ ID NO: 39710 - DNA, 711 bp, Zea mays
  unsure (1)..(711): unsure at all n locations
  Clone ID: MRT4577_136216C.1
gcctaagcctgacgaagatcgccggtacgcccgcttgccgccctcgcgccgcctcctcctcccccggtgcgatccgacccttctagaagcgccgcgcgcgcgtcccgtccatcggcggcgccggccatggcgctggcgttcgacgatttcggacggcccttcatcatcctgagggagcaggagagcaagtcccgcctgcgggggctcgacgcgcacaaggccaacgtcgccgccggcaaggccgtcgcgcgcagcctccgcacctccctcggccccaagggcatggacaagattctccagtcccccgacggcgacgtcaccatcagtaactgctccaccgcactctctcactcccctccccgctctgcttcctgatcttagcctcacctgttcttttttctttgcgggaaaacttaaggttctcgcatgcgatctggcccttgcatcggtttcttcgagggctagggattttggtgtgtgctacgcagtatctgtccagagttctagatgtctgtagggctgttagttccgttggaaattactttgattttattcctataataanataagggaagttcgggtttctgaataattacctcccttatgattttttagcaaatgacggagcgacgatcctggagcaaatggatgttgacaaccagattgcaaagcttatggtggagctttcccgtagtcaagactatgaaatcg

SEQ ID NO: 39711 - DNA, 484 bp, Zea mays
  unsure (1)..(484): unsure at all n locations
  Clone ID: MRT4577_136217C.1
cactggcaggcaaccatcatgggtcctcctgatagtccatatgctggaggtgttttcttagtgaacattcatttccccccggactaccctttcaagcctccaaaggttagcatcactttattatagagttaaattttcttttctttttttgttttctttattggaagatgaaaagtgttgttctgtcagtctacgaatgggtttctagctgagttggttaggtggctctattagtactcctgaagtcttgggtttgactcttcatgagagtgagtttaggctggaggtacaaaaataatcctcgtctgtcccataaagcacaagtctaaggcccaacacaggctgcggttgttctcacctgggatacggtgccgctgtgtataggtgaggccggggttttctcgcctgcacaaggtcttcttagcaaaaatgcctgggggctttctcagccnctatgagttgatttttttttgttctgtcaatc

SEQ ID NO: 39712 - DNA, 603 bp, Zea mays
  Clone ID: MRT4577_136218C.1
ggcgattgggtttctcgaggccggccgggaaaggtaattatccggccgcgccatcggttacatgcgcgcgccattatcgccggtcgatcaccgaggaggcgaagacgatctggtgcggacgggtcgatggcggcggcgacaacgacacagcggcatgacgacgacaacaacgacgtggagtctcagcgggagcacgatgacgacggtagtagcagccgccgtgagcagcaagagcagcggcggcctctgctggtgaagcggcgctccctggcggacgacggcggcgggatgagcccggtgcagcgggccatcagccagacgtaccagagcacggcgcacctggcgaagctgctgccgacgggcaccgtgctggcgttccagctgctgtccccggtggtgacggcgcagggccactgcgtgcgcgctaaccgcgccatggccggcgctctcctggcgctctgcgcgctgtcctgcttcgcgctcagcttcaccgacagcttccgggacgccgctacgggcgccgtccgctacggcttcgccaccccgtgggggatctgggccatcgacggcggcgcgccgccggacgacccgcgcgccgcggcc

SEQ ID NO: 39713 - DNA, 270 bp, Zea mays
  Clone ID: MRT4577_136219C.1
tgcgtcaccattgattacatctagcgtcggtttatcggctcgaacaacaagaccatggctagattcacttacaccgagggcagcaccaatgtttgcctcaaggagcttgcatgcttctataccctccatctactgacccatctctctagttataatatatctctctttcttttattgcatattattttctatccatttcttacgctcaactttttatctacttacatccaacatctatattatgttctactgtttaacatcctttatttt

SEQ ID NO: 39714 - DNA, 1418 bp, Zea mays
  Clone ID: MRT4577_13621C.1
cgcgttggaacctgcgactgcgagttccacctccgcccgcccgctcgcccacgctcacgcccggaataggcagttgcagcagccagccagccccgcgcgccccgccatcgtgggaggaggcccatgccgcgggggcagcagggggaagggtagaatgggcaacgtcacgtcgtcggtggcggcgcggctggccttcttcccgccggcaccggccacgtacggcgtcgagcccgcggccgagaacggcgccctgctgcggatgacgggggtgttgccggacgcgggcgtcgaggtgcgcgcgctgcccaccagggccggcacgcgcgtcgtctccgccttctggcgccaccccgcggcgcggctcacgctgctctactcccacggcaacgccgccgacctcggccagatgctcggcctcttcctcgagctccgcgcgcacctccgcgtcaacatcatgagctatgattattcaggctacggtgcttctacaggaaaaccatcagagtacaacacctacaatgacatagaggctgtttatgattgcttgagaacggagtatgggatagaagaagaggatctaatcctgtatgggcaatccgttggaagtggaccaacgttgcatctagcctcacgtctcgagaagttaagaggggttgtcctccacagcggcatactctctggcatacgggttctgtatccagtgaaagtgacgctttggttcgacatcttcaagaacatcgacaaaataaagcaggtggactgccctgtgttagtcatacatggcacagccgacgacatcgtggacttggctcacggcaagcggctgtgggagctagccaaggacaagtatgagccgctgtggatcaaaggcggtgggcactgcaacctggagacgtacccggagtacatcaggcacatgcgcaagttcataagcgccatggagaagctggccaaggacagcagcaaggcggcccaggcgccgccgccgtcgagcatggccgccgaagaaagacacaccaagtgcttgagattcgggaagagatgagatgccggcgacctggacctgggaaggaaacgcggtgcagcagcaaccctagttcgtgtatcatccgtgtgagattgagttcagacttcagagtagagagtagacagagtggagtgacagacagacctgtggctgctgtagtatgctgtacgtgctggagttcaggactagagagatgtctttgttttcctaggggcgccacggattagcctgttcgcagctgaattttttcttgttttttttttctgttttcgctatctgtattgtagtcactgtgcaaaaaaaatcgttttgattgattggctgcaaaaagtgaagtgcgctattgcgctgtgactaaaaaaaaaaaaaaaaaaaaaagtcgacgcggccg

SEQ ID NO: 39715 - DNA, 207 bp, Zea mays
  Clone ID: MRT4577_136220C.1
gctatgacgtggagccgcgaacgaagctggacctttagagcggacgtgattttccccgtgccatcaaccctgatttttcctcaccaacctatattaatcattgcgtccaattgtaactgaatgagttgaaggacatgcttaggcccgtccaccttctgatataagactgtagtgaagcatgttccataatagcgaccattatgggaa

SEQ ID NO: 39716 - DNA, 321 bp, Zea mays
  Clone ID: MRT4577_136221C.1
ggcccaaaaaataaactgaattgcattcgaaggtttggtaataacgcatgcccataagttctacagttgaaatgcatgtaaaaaaaaaagagtaatgcatcacagggcgtttattctacagatggcaatatctaaagctgaggtgccattcttgccttcagtggaacacgtcatctcttactgacttccctgccaaattccttgatcttcacctgggcttggatactgaccagaacctctttgacagttatctgcaccatatgctggtccagccccctgtgtggcatcctcaccataactaggattcaccggacgcttggg

SEQ ID NO: 39717 - DNA, 935 bp, Zea mays
  Clone ID: MRT4577_136222C.1
ggtcgccgaccccgttgtttcctgcatcgccgacttggcgttctagagcgcagagcagctgccggaggatgggctcgacctagacatggatatggagacgctcgccgacgacgccaacgcggcgctcgccgacgacagcggcggcgaggcagagcgcaacgaagccgccgaggccgaggctgaggtggagcggtacgaggccgccgaagccgaggccgacatccttcgcgaccgtttccgactcgccgtcatcagcatcgccaccgccgaaggaaagaaggccggaatgacggtcgccgaccccgttgtttcctgcatcgccgacttggcgttcaagagcgcagagcagctagcaaaggatgcagagttgtttgcacagcatgccggtcgcaaatccgtcaggatggatgatgtcatactcacagctcacaggaacgagcatcttatgggcctgctgcggaccttctctcaggagctgaagggaaaggagcctgccagtgagaggaagagaaagaaatcgtccaagaaggatgagacggtgatcgaggtctgatttcagatctgtcctcttttttttttagagaggaaggcatgcagttttatctcgcgaggtcctcccggcttgtacagcttccttgtgtcgatactatcttccatgtcatttcgcagaacttttcttctacgaaccctttcatcctagtcagtttttctagtcagttattgatggtacttgagttgagcttgctttctcaactgcacatagcattagtattgagtccaggagctgtccctgttcatgtggagttgtggacaggaaagatgagctcgcgggcagcgtgtctcttctctcagtccgtcgataaaagttacactctacaattggtccttttctaatactctttccattctaatttataattcagttaacttttttt

SEQ ID NO: 39718 - DNA, 750 bp, Zea mays
  Clone ID: MRT4577_136223C.1
acctcgcccccactgccccctccccgcaggaatcctcccacttttctgttccgtcgcctggacagatctctcgaggcgcatccgtcgcccctctccgcaatccgaagcggcgacgagctcgcgccggcggagatccgccgcctgaactgggttttcatagtctcgacaattctaccggaatgatgttttagcatgattatagaagtgaagccttgtaaatgtagattctgaagctctgtcattgctacacatacacctggatcatggcaccacgcaacagaacttcatctagaaggcctctctgggtcatcgtcttgattgcttttgtctgtgcgatagtcactggtgcctatctttataaaccccaacattacacgggttgctacttgtctaattcctgtggttctcagcctcctctagaacctgtgagagtatacactgatgatgagatagctgctcgtgctgtaatgagagaccttgttctgtcacagcctgttcagtcaaagaatccgaagatcgctttcatgttcttgacacccagttcattgccttttgagaagctttgggaaaagttcttcatgggacatgaagaccgatacacaatatacgtacatgcttcaagagaaaagacagttcatgcaagtccaatattcgctggcagggatattcggagtgaaaaggtggtctggggtacagttactatgattgatgcagagaggaggctcttggcaaatgcactgcaagatgcag

SEQ ID NO: 39719 - DNA, 445 bp, Zea mays
  unsure (1)..(445): unsure at all n locations
  Clone ID: MRT4577_136224C.1
tggacgcgtgggctcgcatggggaggcgaatggggcacggaagccagggcggcagtggcgctcggggaggcagggaggcgaggcgacgctaggtgggcacggccagcggcagcggcggcggcctggtgtgcacgtgcgcccgcgtggggagagaaggtgttacagacactgtccaggaatgtgaggagggagacaacacgacatcagaaattggtgatgtccatggaccgacagcaagtctggcgagcagcagcaaaatccccagggtgtcaagtcgcataaggaagcccaatgtccgtgtcgtaggcctagaatggaggatgtaaggtgtggtgtgtgggaanggttttgggnaacttaacgtcgcgctgaaagacaggtgtaaggatctgaaccacaataccttcccattcactcaaactgccgggctttacaaaaggtatca

SEQ ID NO: 39720 - DNA, 508 bp, Zea mays
  Clone ID: MRT4577_136225C.1
ggggcaaaacagggcccacatttttaccattacgaaaaaaaacgacaaacgggtaaaaaggggaaacaaaacagaaaaaccaaacttatagccgggccaggaggacaaccgaaaacgggccaaaaacctcaaacaatagggaaaaaaaagccatcacagggagcttaactagggaaaaaaaaaacgggaagcatgcgagggaacccttaatcgcccccctccatcttggtttcaccagggggggcctcaaggggggggatttaaacctttgcctaaaaagggtcggccttatggaggctcaaaccgagtttggacatgggggggacccggttgcccaaagggttggggtcctccagggtgaacccgggggtcagagaagcattctcgaacaggagcataacggaatcctgggcggggttgggaatctgggcagccctggcaccctgggggggcctatccatagaaggggcctcggggggggcccccctgggtgttgtggcccccgggg

SEQ ID NO: 39721 - DNA, 276 bp, Zea mays
  Clone ID: MRT4577_136226C.1
gggacccctcgagccggccgggtaatgcgtcgagtcgtctttgaagaggtcccggtagcaagagaaatgcggctgacattttgctgctttgacagattggtccatatcttttttcaagtggagctgggtagccttgaaggttactgccatgggcatcatagggagcgggcacttatgtggggccgcacctatgcgcgccaaaagcgagaggccgcagcggcgccgacggcagcccccgtcagcaacgtccgccagaggatcaccggcgtaacaaag

SEQ ID NO: 39722 - DNA, 370 bp, Zea mays
  Clone ID: MRT4577_136227C.1
tttggcctttggtatgtgcttggttatgtgcttgattgttgtgagacttggtcttgtccttagaagtcctcggaatgttggccttacgagtgctcgactggttgttgttacgggtcgtgtcggacttatttttaaagctgatgagaatagtaagaaatcgaaaaggttcaaggtccggaagtacatttaattaaccatattggtatggtcgaaatagacgtgcgacgagcctcgggatatggtcttgtatcatggaggttaaaaagagactcgggacgtctcgagggccgttgtggagcttgactcagtttccgtatagattactgcggatagcgtcggaactactgcgctgaatttcgatacgatgtct

SEQ ID NO: 39723 - DNA, 833 bp, Zea mays
  unsure (1)..(833): unsure at all n locations
  Clone ID: MRT4577_136228C.1
aagttatgaaggcggcaggttggaagatgccctttctgaatttgtttttaactttgcaaaagctattttagttttgaagtactgcaatgcagacagtgttgcttttgatgtggttgctatcccaacatcttactgcagcagatatctgagttgcgaacttgcaacttatgggggacaacattgtcatttgacagatgatgagaagcaatataatggcatctgtagtgctacttgttcctgggggcacaatagcatgatgactctgtctaggggaatctgtgatattgaattggtaatgccagtttttgtttatagcttattgagtgaatgaggttgattcatgtttaaccatgctagtttctttgaataaaatgatatgtggtctttccttttatagatagaatataagtttgtgtaatgtgtgtttaccataatctgttaacctgtattgaagagcagagttgtttggatcggtacctcccaagcagcagtcttgcgaggcaatcatcttgtccataggcgttcaaagctctgtttgcaggcaatcttgcctgaagagaatcgaaacatgcttgggctctttgctttgcacccaggcagagctgcctggcgcgatggttgctcccaggtgtccgatttcgggtgcctgnggcaaagattgctgcttggtgggaagctctcatctgggaggcctcgaagtaacacactctanatgtcattgccatggacaccctgctttggtggtatgctggatcatgttctacttcctctgntcacaaaactaactcanngtctcaaccctgntttcagtcgtcgactaagtcgtcagtcgg

SEQ ID NO: 39724 - DNA, 339 bp, Zea mays
  Clone ID: MRT4577_136229C.1
tgttttttttttttttggtttggtggggtagaaaaaaaaggaggcatttttttctttattttaaatagaggaggacatgggggagggggcagccacaaccaacaagcgcagtcgcccaagaaggagacgacgcatcaccgaatggtggaaagggggggctgaaaaacataagactccggcggggagggagcttcctcctttggaggggagttggccgccttgagggacaatttgtccttggtgctgccaaaggaggactccttcgccggcgttttgtggggcaaaacaacagggataatgggggggagaacaccttggggggcgggggggccgcccacc

SEQ ID NO: 39725 - DNA, 469 bp, Zea mays
  Clone ID: MRT4577_13622C.1
atagggatatacaacagcactatattctccttatatctctccaaaaaaataaacactaaatctatctggcaagaatcgactgcctacatttttatttttgtttcagacagacctcatgacctcgtttgcatggcaatcgtcggattgcattcatagtccaacaacgcaaaaaaaatttgcagaaggctacaccatgcatgccggaccgggagtatctcagtttcgcgcccatttgctgctgctgtacttcacccacgacatagccacaacctccggcacctgcctgttggccaagctgaccatcgctctagccctcctcaccttcttcaccaggagccgccatgtcttgtccgctttctcagcttgcatcttcgccctgaaatggctgcagaacggcacacggcacggctggtcctgtagctcggcccggtcgcagacggaggcgtggaggcggaagagctgcagcatg

SEQ ID NO: 39726 - DNA, 266 bp, Zea mays
  Clone ID: MRT4577_136230C.1
aaacccaccggtgcttgtctattctacctttcgcgtgctccgccgtcacgactcagattattgataccccacgaagtgagacatgaccgtgcagattccggcgacatcacgcgcactgagcgtccttctccttctacgtggtgccgagggtctactgcgcacctactccaccggcgaccggcgccggcgggtgatccgcgacgcaaggcaacaggaccacgaccaagcgttcctccgcaccctcaacttcggcgctgactccgaga

SEQ ID NO: 39727 - DNA, 238 bp, Zea mays
  Clone ID: MRT4577_136231C.1
gccacgcgtccggcagtccgtccccgccgacgccgagcagtgggcgcagcgtgcggtcgccgcgcaccgcgacccggccacgggccgcatgtagacgcgcacgcgacaggacgacaagtggctgcccgtccagtacgtggaggcgatgcggggcctggaggccgcgggggttcggatgggcacggagcatggaggtgtcggttggggcggacgaggaggtgcgtggcggggatgggtt

SEQ ID NO: 39728 - DNA, 383 bp, Zea mays
  unsure (1)..(383): unsure at all n locations
  Clone ID: MRT4577_136232C.1
accaacccanctcgctcgtcccagcttatcatgtcgagcacctagtagcgacctgcggcagctcagtgtagagtgtcggtaggtgtctgtctctcttggtggctggttgcaacggtcatggcgacgtcgtctcgtcgggtgcccttgctgctgctgtgcctgggcgtgctggtgtcctgctccttcgcggcgggcagcttggaccaagaactggacatcacgtggggcgacgggcggggcaagggccctgaccacgggccgcttctgaccctttcccttgaacggaccttccgcttccggtttcaatcccgggaccaatacctgtttcgcaagaaccacatgcaacttccggtggtgccgggcaacttcggcgggaccggtac

SEQ ID NO: 39729 - DNA, 141 bp, Zea mays
  Clone ID: MRT4577_136233C.1
attcggcttctggtgtgctcgccgcattttcaaataaagctagggccatggatcctgcggatcgttatttaaacagcgagtgcattatgcagatgctccaggctgtccagattggccttgcctagatgactgctgtattca

SEQ ID NO: 39730 - DNA, 863 bp, Zea mays
  Clone ID: MRT4577_136234C.1
acattgttcttcttggagtacctgggtcctctwathatttaccccatgttctactatstgcccgtctacaagtatttggggaaggagggggagsgggctatgcaccytgtcmagacttacgmaatgtactaytggtgtttccattactycaaggggataatggagacgtttttcgtgmackgtttcagccaggsgacgtsgcsgytcycgaaggtcttaaggaactgtgcctactaytggacytgggggtttacattgcttattabtgcaaccacscgctgtaaaccccagtgagtgatytgcasatgaagattgggtttgsttttggggtsgtytgccasctcsvgaayttctaktgccaaatcctgctssggaayttcaggmscccaagcggcagcggsgggtmcmagatcmcccscggtttcttgtycaacatsgcgacctgcsccaattaaacaaccgagatttmcaagtgggtcggyttmaacatcgcaaaacagacggtgggaggttacgtcttctttgtggtgggggggggcatmatgacmaactssgcgttgggaaagaaaagccgtctgaagaagttgtttgacggaaaagatggaaggccaaagtaccytsgccggtgggtgattmtccctccgytcttgtgaagaggtggtggtggtcggccaattgggattcgatgtctacagagagttgtactgtaytaatcgtgcytgtttagcggttgaatttggattccattgtrggaaatttttaatcggaaagttggatttmattttcttyttyttagaattatgtrattgtaccaaggtrgtcttgtttmaattaaatacagtttaaggttcatgtgatgttat

SEQ ID NO: 39731 - DNA, 461 bp, Zea mays
  Clone ID: MRT4577_136235C.1
tttttgtttttcaagggtgacacaaataaataccaccattgcgggcatacatagtgttaaacaaaatactaataaagagagaaagagtccgcgccagcggcgggttcctcttcatactaatgagcccccacagcagcacattaccgggggggggggggggtacaaaaattccaaaacatggggtaaaggggaaaaaatcacaaattgtgcatgagcacgacttcaacatagaaaccccccaccggccttatcaccccctctcccacggggtttggagaaaaccaatccttaccagggtccctcaccaccctttttgtggtggggttttcttcaaattgggcacagagggggaggaacattggggggggggtcctcaatcaacacggtggggaacttctgagtgggaaacagcatacgttcgtggggggggggtcacaaagggggtgggaacacccttgcta

SEQ ID NO: 39732 - DNA, 946 bp, Zea mays
  Clone ID: MRT4577_136236C.1
cccacgcgtccgcccacgagtaattcggcacgtggcagcaaccttcacgagctgcgtggtgaggttgaccaggactccttccggatcctgaaataaggccaccgctcgtttcctctccacctccctcctccttcactccctccccttgcgtttagcctcccgctgttgtggagccgcgggccattcccaaccatcgttgcggtggtggccggtattggccgagacccatgggcatccaggtcgcggcggtcgtgatcccgccgccctgctcttctccttcctcctcctcctcctctccggcgtcgccttcgtcctcggccattgccacgtcgccgcagcatgccgttcttggcgccaggctggcgaggagccagtcgtcgctggcttgctggaacgccgccggtctcggccggcggcgcggcggggagcacacgatcaggcgcgctctcagcgcgagcatcgacagcgtcgggagcgacggcggggacgacgaggagttctcgaggaggatccaggagctcgcggtgggtcagcacccgggcgccggcggctgcgggtggccggcgagcgtggagcggagcgcgagcagcgtcgggctgccgctgtctctgcggatgctcaaacggaggaagcagcagcagcactggagcaggggcggtgggacgagcggctggtcgacagcgccggcgagtccgcgcgcgccgcggtgggccgcgccttctcctcgatggtgctcatcatccgggagctccagagcttcacgctgcagatgcgggaggcggtcgtctacgaggacctgcagggcgtcctggcgcgcgtccacgccgagatgcacgcctccttcgtctggctcttccagcacatcttctccggcaccccggcccttatggtctccctcatgctgctcctcgccaacttcaccgtctactccatgggcgacagcgtc

SEQ ID NO: 39733 - DNA, 314 bp, Zea mays
  unsure (1)..(314): unsure at all n locations
  Clone ID: MRT4577_136237C.1
cggacgcgngggcggcccacacacaccgaactcgngaagcacagnnnccancggaggaggncnaggaagaggttttagaggggcaaagaagaagaaggtgctgtgagctaagcactggtcgacgcaccgccatcatcggcggtgtgagtgcatgcactgaggaagcatgcttgccatgccgtccgcccggagcttcagcgccacgggctggtcgcgtgcgagcagggatgctacggcggtgcacaagaaagaaggcacgtcttatcggcaagggaaggctaagcgcgggcgggcaggtcgccctctctgcatgt

SEQ ID NO: 39734 - DNA, 260 bp, Zea mays
  Clone ID: MRT4577_136238C.1
gagacccgcatccgcagcagccaccgctaccggcggggcgctccgtttgcgggccggcttcctttcggcttcttttgctggcttccttttgccttcttttgccgcccttctttctcatcggaaatcctcccttattctttctccggtgggccgcatttggttccttgggccttcccaattcttcggcggccccaattcgcaacccccgccgcaattgcttttttccattatggaccccccattcgtgctctttcccgcgc

SEQ ID NO: 39735 - DNA, 560 bp, Zea mays
  Clone ID: MRT4577_136239C.1
ttaaatagtacgaagttgtaaagatctctggaattactcttcgactaacgaattagtatttctctttttatgctgtaatagtactgactactaggtctggtatctgctgagggataaatgtacctggtaggatttactgtgttattcttgcacattagtggtgttgaggtactataactgaattctcctcttctggtttttatatcatctcgtgaaatgctaaagttaaattaacttagttaattctgaggaggattagttttattggttgttgctaatccttagcgaagggttttaaagttaggattcggatagatattaattacttagatagctatatgtgtttgtttacctgatttttttcttctgacttggtttgtcaacctttttatgtatcttcgttttcaacctggctaagtaagtataggcgatggctgtaagtatgcagtctttattgacgggctgagttggttgccgccatatttagtacttggtctctatgaactaccttcttattgaataagattcgctctatctggtctaactctgttttggtgagt

SEQ ID NO: 39736 - DNA, 335 bp, Zea mays
  Clone ID: MRT4577_13623C.1
cccacgcgtccgcccacgcgtacgcccacgcgtacgcccacgcgtccgcccacgtcgactcggtcgagggagtccaggctgttgccagcgagcgatggctagcaacggctcgtcgctggtgcgccgagcctgctcaactgtgcgccgaatgcctagttggaagaagcggctcgtcttattcgccgtcggagttagcaccttatcttatgcttgtcaagataatcgagctcttcaaattcgtgatgttactggaaacaagaagaaggcggttatccttggaactggatggactgatgcaagttcattgagaaatatcgacacatctttgtatgatg

SEQ ID NO: 39737 - DNA, 531 bp, Zea mays
  Clone ID: MRT4577_136240C.1
gacccgggggcggacgcgtgggggttcccccccccgtttgagacaatctcgtcaccatgatatctttatgcgttctggtacaaactacaaagtacaaaaatggccggcggcaggtgttgtttctccaaccagcgaggccagcaaccacgaaactggtagtttctgtacatgctcgaagagagaaagaaacagtctctctgttccatttcaaattataagttattctaactttcttaaaaaaaagtcaaagcatctcaggttttaccaaatttacaaatattcaaatgtatctcaagtttgaccacatttatataataaaataataacatttatgataccaaatatctttagattcttcattaattatatttccatattcttcattaatcatattttcatagtatacctgtttgatatcacatttttttatttctctataattttagttaaatttaagatgctttgactcaaaaaaagttaaaatgattcatagtttgaaacggaaacggagggagtaggtttactagttct

SEQ ID NO: 39738 - DNA, 181 bp, Zea mays
  unsure (1)..(181): unsure at all n locations
  Clone ID: MRT4577_136241C.1
cccacgcgtccgcccacgcgtccgcccacgcgtccgctaatggcgactntgtttgaacaanaaagtagcagactttnttgcggagttcgatttctctctctctctctttttctttagaatgtgaacccttttttcacctttctggactggtataaaagtaagcctggactcgtcaaagaaa

SEQ ID NO: 39739 - DNA, 181 bp, Zea mays
  unsure (1)..(181): unsure at all n locations
  Clone ID: MRT4577_136242C.1
ggagacccacgcggcgacaactacacatacatcaaaaggatgaatctcgaaatccttacgcacacggaaccaacggtagaggaagtattactgtcacatgctctanaacccaacaacactccatataatatgcataccagactaacttatcttatgacaccttatccctatactactaaac

SEQ ID NO: 39740 - DNA, 375 bp, Zea mays
  unsure (1)..(375): unsure at all n locations
  Clone ID: MRT4577_136243C.1
gggttgggttttttttttggggggggccccttatcacacacccagtagggattgaattgcattccgaaacatgcaatatgatttggtataacagggggcacaccccgggggatgccacaacggcnngccggcacaatcccatcccattttaataggactcgtcgccatgtatgggcgtgggcgggtaacggacactccccgtagaaggcctttttgaaggggtgcaggtactttggctcgagcgcgaaaagcaccttgatggggtaatccttgtggcgtccctgcgtgacgtacgccgtgccgttgccaaacatttgggcgggggccacaaaccgggggcggccccagccgaagtcggtttttggatgggcatgc

SEQ ID NO: 39741 - DNA, 221 bp, Zea mays
  unsure (1)..(221): unsure at all n locations
  Clone ID: MRT4577_136244C.1
attcccgaagcaggccacgcatgcncccaaccttcantctttctccttgctctgctttcgcttctcaaagccctctcttaaagcgattatagcttcattgagcacgggaaaaaccatacccttcttccacctcccacactaatcccaagtattaagtatctcactacacaggaaccaaaatcatgtttcacattatcttcggctaccctaatgagcaactc

SEQ ID NO: 39742 - DNA, 1018 bp, Zea mays
  Clone ID: MRT4577_136245C.1
agggtttgtgtcaccgcaggacggggctacttccagttcgttgcgccctgcacgttcttcgggacgccgtttccacaggagggccagaagaaggcgcctcgggtcatgctggtgttcttctgcatcccggtcggtcctggcaggagcagggtgatctgggcgttcccgaggaacgtcggggtctggctccaccatatcacgccacggtggctgtaccacgtcggccagaaccttatattggattcagacattttcctcctccacgttgaggagcgtaaatttgctgcggcagggctggataactggcagagagcttgttacgtgccgacgtcgtcggacgccatggtggtcgccttcaggaactggttcagaaaattctgcaagaaccaggtcggctgggcaaccttacaagtcgaccagctgccaccaacgcgtaccaaggaccagctcatggagaggtactggtcgcacgtggtgcagtgcaggagctgcaacgcggcgctcaagaccatgaaggcgctcgaggctgccctgcaggtggcctcggtcgccgtcgtcgggttccttgccgtcgctaagggaacggtcctcacgtcaactgttcagagggccgcagtcgtgtcggcggccgtgctgtgcttcgctgcctcccgttggcttgccaacttcatccagaagaacttctactttcaagactacatccacgcctacaagtgacacgctcatgaatacgtttttaaaggtttttgttgctaggagattgttgtttttactgtgaatgcatattattaggagaattgggtgggtagaaagcagtatctatactgcattaacttgtatataataatgcatataatcgataataaaacggaagacacgcggcttcagttgtgtttaaaagaactgtcgacgcggccgcgaattgaaggcgactctagccgagttggttaaaaaaaaaaaaaaaaaaaaaaaaaaaaaaaaaaaaaaaaaaaaaaaaaaaaaaaaaaaataaaaaggt

SEQ ID NO: 39743 - DNA, 789 bp, Zea mays
  Clone ID: MRT4577_136246C.1
agggggggtcccctttcccattaaggtggggaaatttttggaaagggggattggggggggcctttttttttttaccccacctgggaaaagggggtttttttccaaggggtttaaattggggaaccccggggtttttccctccccccggttttaaaaaccgggcccgggaatttaatttgggggccccaaaaaaaaagttttttttttccatccccggggggttaaatttggtccctttaaacggggcccccccttttttttttttttttttttttttttttttttttttttttttttttttttttttttttttttttttttttttttttttttttttttttttttttttttttttttttttttttttttttttttttttttttttaagattaaccaaaaatttccatgccagcaacgttggacaacagggtcagctagaaagccccaaaacagaagtgctcaaagcaaagcaaagcatagctatagcagatgccaaaagattctggacatctagacttcacaaaaaatactgaacttaagctgcagaagactagacttcacaaaaaatactgaacttaagctgcagaagactagacttcactactgaacttaagctgcataagacaggtctcatagtagactatgcctactcccagccttgggctgtcggcggggctgcttggtcccaaccagtaggagcaaccactggaggtacagggccgtccgcaggtacaggggccccggcttgatcccagccttccccgcgtactctgcggtgttaccactgct

SEQ ID NO: 39744 - DNA, 377 bp, Zea mays
  Clone ID: MRT4577_136247C.1
gggtaggtcttttcaaaaaccatggaaaaaaacaaacacaaatgtggccccaaaagaaatgtgttcttaaaaaagcaccacccctataaacaaaaaaaagaacacaaattagaacccatcaccgcaaaaacgacccccaaaaaaaccccaaaataaacccggccccacagaggaacccgccggccatgggacaaagaacggcacaaaaaagaccaaacctgccccgaggctggccgagggaacgtgagaacttacccgagagcgtggcacccctaagggaaacccgtaagtaaaaggggaccaccagtaaaaaaaccccccagggagcaaggaaggggcccttgggggaccccttgggggacccggggagtaccccc

SEQ ID NO: 39745 - DNA, 298 bp, Zea mays
  Clone ID: MRT4577_136248C.1
aaaagaacccaagggaaaaacataaaaattatttttttccgcccatttttatgaattccaacagatggaaaaacttcaaccggggaaaataaaaaaaaaacccttttggggataacattactgatttactggacacagcaccccatattcaggggtcgctcactttttggacacctaggggtaatactgggccatgggcaccaaaacgggaataaaaaacaggcccccaaaaaaaagggggaaatgcccgggcttttcctccggtttctctttgggtttgaagagggactcccgcttg

SEQ ID NO: 39746 - DNA, 636 bp, Zea mays
  Clone ID: MRT4577_136249C.1
cattgggtacctcgaggccggccggaccacgttcccctctaagcccatgaagctgttacgtcctctgtgcctcacactgaaggtccctctgctcatcatcgacaccagtgagcaacatgcggatctagtctcaagtggcgtcctgctcgatgcctcgtctctcctcttgctgacatgatgggctgctcaatggccagaaacatcgcagcgtactgtgcccagaaatctgactgacgcaggctgtcggacgcctgaaaatccagactctacgcttactccaacatcgcgtgtcactcacaacccttccgcaacggaccataccctatccgctcaaccctcgcacgaacacttgcggacccaccattctggcagatggtacccggacaaaacaaacgacatccaaacgctgcctatgcgctgggtatagaggtgctcctcgtccatcggcggcgccagagaaaactacgggctctcctccacctaagactcctacagcgcggacgattacctgtggaacaacttactggctcctcagcgatctctctcgaccagtcgggcggcgacgtagctcgacagcatcgacttcctcgtcgagaacaggcaggcgaagcactacgatgacttggagaacgagat

SEQ ID NO: 39747 - DNA, 225 bp, Zea mays
  Clone ID: MRT4577_13624C.1
atacaaaaaagacctctcctataatgagggcatcatttagccaactggggcgaggacagaaacatacataggcatacagacccaaaaaaaagtgaccactttaaccataccaactccaacccatacacctcgtcaattcatttacacaatatacccaaaagattaatggctcgcctccccacggtaaactagcaatacagtggcttgctcagtagactaccttga

SEQ ID NO: 39748 - DNA, 285 bp, Zea mays
  unsure (1)..(285): unsure at all n locations
  Clone ID: MRT4577_136250C.1
ctctgacccaagccagggttccaccccacccccgcccctatccattccgatggagggcggcgactcggccggcgccggctccggcggcgccgtggccnnttngtacaaatgtcggagcgacgcgtctcgggcgttacagtactacctggaccgttcgacgccttacgctacagggcggtggatctatacgtttgccgacgtgttcttctacccactgtttttttacatagtgcaggtcttctacattgtgaattactggctcgttatctaccttgttaaactact

SEQ ID NO: 39749 - DNA, 455 bp, Zea mays
  unsure (1)..(455): unsure at all n locations
  Clone ID: MRT4577_136251C.1
cctgccgggactcgttnaggagtacacagtcctccttataattggagttgcacaagccgctcagcgaccttcttcttcatcttctccagtcctctctccctcccgccccgtccatcgacacagcagcttggttgccaccaagctagccaagcaggaggagtaagagtacagccagagagagagagagcaccaccctgattccacccaccgctgtcccttgcttaggggcgggcgttcgtgatcaccaacagctactcgtcgtcgtccatcatggtcatcatcaccacttcaccggtcaccgccatggcatggatcccacccctcatcacatgcattggtttctgtcaacatccatccaatcccaatccatcgccgggcatgcgggcgcgtttagctcattaggttttttttctcatcgggggctagggggatgttacctttctttttttctgcct

SEQ ID NO: 39750 - DNA, 470 bp, Zea mays
  Clone ID: MRT4577_136252C.1
ggccgcttttttttttttttttttgtacaagtgcctttgaatatcctgtaaataatgatatggagataaactatacattagggctctatacactgctatctgacatacggagtaaaaaacttggccatccactgctggacgctaccggcgtattaacgtcagtgtctacacaaatccaagggatccgcactggggagaccaccaataacggatgggcaccctataatttcacagaccgaccgataggacacagacaccaatccgtacctggacacatgatgatacctcacatagggacacatcacaagcggaatatggatatatcaaaaggaggggcttatgcaccatccatgatatgtcagaagagcccctcttattacgaactttggtagacgtatgggggctgcgcctgggggagactttcgtgattatgaaatagtggattgtcctaccggaccacatgctaaata

SEQ ID NO: 39751 - DNA, 384 bp, Zea mays
  Clone ID: MRT4577_136253C.1
acctccgaccaagttgcaggagcatttaacgcgaacgccctgccacaggtacctccgaccaagttgcaggagcatttaacgcgaacgccctgccacaggtgaagacggcgaactccgctccgcccgacccagggctcggactcgggctaagccccggaagacggcgaactccgctccgcccgacccagggctcggactcgggctaagccccggaagacggctaactccgctccgcccgacccagggctcggactcgggctaagccccggaagaacgcgaactccgctccgcccgacccagggctcggacttgggcttagccccccaatactactacctccgcttcgcccggaccccgggctcggactccgccctggcctctgcc

SEQ ID NO: 39752 - DNA, 1415 bp, Zea mays
  Clone ID: MRT4577_136254C.1
gtaccctcggagctttccggagcgacgacgaccgcgaccggtgggcggcggaggcgaggtggggtgggtttctacttctaccacgacacgcgcgcgtgatcttgcgcaggtggtttcatcagctcacacacagagaacaggatcaggatcaggatcaggatcaggacagatgggagccgagaacggtagcaacccttcgtcgaccgtcttggatggcctctacggggtgcagctcggccgtccatcggatccggcacagaccgacggtggggcgtcgtcgtcaccagcagcttgtgaacaccaccacaagcgtggccgtggtggtacagcacaggcacagcagaggttgcggatccgaaggctatggcagcacagaccgtcttgcttcaagcccatccactgcaccattacgtgtggcaagcatgctggcgagactgtcgcgaacgtcgtcacctcgctgcccttcatcgttcttggactgcaggctccaaggaagaacctgaacgccgctatctacgcgaactccctggtcgggatgggagtggcgtcgaggatagctactagtcgaggaatccggaggctcgcacgttgggccgacaacaactatgaatgtacgtgttccacgcagtgtttgtcgagagcagtaggcaacgagaacccaagattgctcatggtcgcttcagcgttgctcctgccgtttcagccactggtggtttcggctgtccacactggactcatggaggtttcatttgcgagaagagcgtcgatggaaccggagctcaggatggcgcataacctgcacaaggtgtcgtctctgctgggaggtgcgctgttcatcgccgacgactgcttcccggagactccctatatccacgccgcgtggcatcttgctgctgccatcggcgttggcacgtgcaacaagcttcttgaatgacaacagcccggcctccactcagtcatgctgatatatcgatgagcagtcgatttaagcactatcacgacctacgtagaatgcacacagtatagcagcttgtcgacatttataacataaaacactataggctggcttgtgtttttatttctgctaggattcgtgtatgttttccatctttgttgtgacagtgaggtgacctgccgcaacaagagttgtatgatttaatctctcttcaagctgaactccttcgtctgacacatggtgtgggagggagtaacgtttgagaccatcttacaggcaatctgaaggtggtgaagatttgttaaagactgatccatttgcatctatgtcagtgcactgaggaaaattgtcaagacatcaacacccgatgaccaagtatttgcagttctacttcaagtatggtgtggatacagtttgcacattcttcatataaaggattttggcttttgagtcacggatc

SEQ ID NO: 39753 - DNA, 363 bp, Zea mays
  unsure (1)..(363): unsure at all n locations
  Clone ID: MRT4577_136255C.1
tccggttctaatcttgcctcctttgcggggatgagaaccttgtgtttctgcgatctgnnacnagggttaagaggcgttttttccccttattttctggcgactggtttctggtggtcgcgtgcgcgcccccaccttctgtctgactggagtttggtgtccttgtggagattcttcttcgttctctctgtttctgaaggaggataccattttggatctttgctggagtactttactgtgatactactgtctgcctttttcccctactgttgatttttctttgcttctgccgcttctgatccacagctcttgattccggaagttggtcaagaatttgcgatcctgagttgaatatgatctcaaatc

SEQ ID NO: 39754 - DNA, 470 bp, Zea mays
  Clone ID: MRT4577_136256C.1
gggggcaaaagcgacaggaccgcaggaacattaaacattttcaacaacacaaaaaagcgaggtctcgacaaaagaacgggcattgagctaactacccaacccacggactaaactcaaaactaaatatcgaaagcaggaaagggagggggaacaacaccatttcttaaagccaacaaaaaacaccaagggttggatcgccatcctaacctaaacaccgaatccctttaaaccccgggggacccaaaccctccggccccaaggacgggggggtggagggcccccacccccgggacctcgggcggggggaacacctcgaagaacaattgggcgaacccggcgccgggcttaacgggaaaatcggcgtcggaggggttgaaaaggaaaacccccacggggccccgggaggccccgttgatcaccccggcccccacgtggatggagggctttaacgccagcccccacctgggccc

SEQ ID NO: 39755 - DNA, 1678 bp, Zea mays
  Clone ID: MRT4577_136257C.1
aggacgcgtgggcgaccgcgaccggtgggcggcggaggcaaagtggggtgggtttctacttctaccacgacacgcgcgcgtgatctcgcgctcacacacagagaacaggatcaggatcaggacagatgggaggggagaacggtagcaactatttatccgccctccttgcgatcggacagccaggcagcgccgacgaccgcgaccggtgggcggcggaggcaagctgggtgggtttctacttctactactactaccacacgcgcgcgcgatctcgcggtggtttcatcagctcacacacagagaacaggatcaggatcaggacagatgggagccgagaacggtagcaacccttcgtcgaccgtcttggatggcctctacggggtgcagctcggccgtccatcggatccggcacagaccgacggtggggcgtcgtcgtcaccagcagcttgtgaacaccaccacaagcgtggccgtggtggtacagcacaggcacagcagaggttgcggatccgaaggctatggcagcacagaccgtcttgcttcaagcccatccactgcaccattacgtgtgacaagcatgctggcgagactgtcgcgaacgtcgtcacctcgctgcccttcatcgttcttggactgcaggctccaaggaagaacctgaacgccgctatctacgcgaactccctggtcgggatgggagtagcgtcgagcctgtaccattcttccagaggaggaatccggaggctcctgcgttgggccgactacactatgattgccaccacaactctgtgtttgtcgagagcagtaggcaacgagaacccaagattgctcatggccgcttcagcgttgctcctgccgtttcagccactggtggtttcggctgtccacactggactcatggaggtttcatttgcgagaagagcgtcgatggaaccggagctcaggatggcgcataacctgcacaaggtgtcgtctctgctgggaggtgcgctgttcatcgccgacgactgcttcccggagactccctatatccacgccgcgtggcatcttgctgctgctgtcggcgttggcacgtgcaacaagcttcttgaatgacacaacagcccggcctccactgagtcatgctgatatatcgatgagcagtccatttcagcacctatcacgacctacgtagaatgcacacagtatagcagcttgtcgacatttataacataaaacaccataggtctatattatttgatagcctaggctggcttgtgtttttatttctgctaggattcgtgtaggttttccatcgttgttgtgacagtgaggtgacatgcagcaacaagagttgtatgattaaatcgacctacgatacgtagaatgcacacagtatagcagcttgtgaacatttataacagaaaacaccatatgtctattatttgatagcctaggctgaactccttcgtctgacacatggtgtgggagggagtaacgtttgagaccatcttacaggctatctgaaggtggtgaagatttgttaaagactgatccatttgcatctatgtcagtgcactgaggaaaattgtcaagacatctacacccgatgaccaagtatttgcagttctacgtcaagtatggtgtggatacagtttgcacattcttcatataaaggattttggcttttgagtcccggatc

SEQ ID NO: 39756 - DNA, 278 bp, Zea mays
  unsure (1)..(278): unsure at all n locations
  Clone ID: MRT4577_136258C.1
cccnttacttaaatcaaccttaaacaaacacccccagggagggctacagggacaaaagcgagccaacaccaacccgggacaggacccgaacagcaggaaccccgacgacccccaaaaggagagggcaccagaccacacaggcacaggggccgcaaaaacaacccccgaacaaaagaccaccagggcaacggagcacagggcggagggcgctcccctgcagaaggaaggagccggaccaggggcggacacgcaccacccggcagacggccaagggcaca

SEQ ID NO: 39757 - DNA, 208 bp, Zea mays
  Clone ID: MRT4577_136259C.1
aattcggcacgaggctcgcctctcccagtacggcttctcctggccccagatgcgcaggatgtatcatcaacctcttgcagctgtacgggaaagatgggtggctgccggtggtggaggctgtgtgtcgcgcgcggggggggggtcgggggtgtgtctgcgggccgttccttctccctctgggggggggcgcggccgctttttttggcgg

SEQ ID NO: 39758 - DNA, 363 bp, Zea mays
  Clone ID: MRT4577_13625C.1
cggctcgagcaatcgcatggacgtgtatggggcgggctggaattcaggtatcgacatgaactacaacccctctgttttggctgtttttgaggttccagaaccggtcattgaagtagaggctctgtccggaaaatcaactagccttgaaacaccccttgagtttagtggatcatccaaggtcgaggttcctcagctcgaacgtcccgtcgttacatccactattttagacgcaagtgaagacattcaagcaacggaagaattggacgagacagatccatgcttcgctctatttcgaaatgaggcccctacctcgattgaccgtcctcatgtcttgttcgaaagaattgaactcggaaagcacgc

SEQ ID NO: 39759 - DNA, 400 bp, Zea mays
  unsure (1)..(400): unsure at all n locations
  Clone ID: MRT4577_136260C.1
catttttccagccgccaccaacagcctccttctcccccacgctgtcttcttccttcctctgccgacgctccctgtacatggcgcccagatttttccagcctctctccccttggcgcaggttccaaacgcggcgcccctgctcctcttcctcctgcacgcacgccagggcagggagccctgcttcccacggcagcagcagggagccaccagcagccatggcgcccatgccctctgcttttccatggcgcccggcaggagctccccccatggccgcctccctctgccccagccagtttccataggagccgagctcctatgccagggagcagcagccccttccccaagtggacaccccatgcaggaatggatcaggaagcacaagcctncttcccccatggcc

SEQ ID NO: 39760 - DNA, 219 bp, Zea mays
  Clone ID: MRT4577_136261C.1
ctcacgctgccaagtacgcttgccatcgatgacattatgaaagtatataccggcgctttgaggggagactattatcagcagcgtggtgtgctacacctacacttgcataaaaaactggacttgtaagagatggaaaagatcgtagctaactgatcacccagaagaaggccatccatgagccggacttgcacaatcccaagctcgagacgcctaatccta

SEQ ID NO: 39761 - DNA, 684 bp, Zea mays
  Clone ID: MRT4577_136262C.1
gcctggccgggagcaacctcgcaggctcgcaccaccacctcgtccgtcgcagcatcaggccagcagccggcggcgccgggcgccgtcgtgaattaccccaggacttgtcccctccagcaaacggagcgttcagtagagcacgcctcggcgatatcgcggcgacatctgctgcagcccgtggagcccaacgagagcagcatcagcagcagctcccgatcgctcctgctacccacggcctcgcccacgcctgcgtgcgcagcagcagaagcaaaggattgggagtcacgcgccccccaaactttgccttgctgcactgacctctgcaattcacaagataggatagtgtgaaaccaagcctggtggctgtttcttcgtgctgtttgctcgagtgttggcaaatcatttgttcataatcatggtttactgggactggctcgctcacattgcgtccccaggcactcccacagaagtgcagtaatgcgacaaaccactccactgctttatccatgttgattattgtgtaaacactgataaatttgtacaagtaaatcaatatatcatgtgtaaatccttcatacatagtgtttgtttcatgtttgagttcccaaattttgcaaatatattttgtgcggttatctttatataaacaagttctacgaaaaaaaaaaaaaaaaaaggccccta

SEQ ID NO: 39762 - DNA, 439 bp, Zea mays
  Clone ID: MRT4577_136263C.1
gggggggggggggtttttttttttttttttttttttgtgtgtttttttttttttttttttttttttttttttttttttttttcggcccaacgcgacgccggtataaattcataaattagctggggaaaaaacaaagctaagaattaagggggggggtaagaaggggatatcccatctacctagggaaccaattactatctagctgggaaatgaccatcgatgaatgataaagcggggctagccgctagcgctaaggaaaaaacgtatatatgggggcgcaggcatggataaacatatgtatgcgggttcagcaggcgggaaaattggggaaaggggtaaacacgtggggggctcggccgccggggcccccccccttaggcttattatctgcacccgcgggggttgcgggggcggaaaatgctccgggggcaacaagggg

SEQ ID NO: 39763 - DNA, 413 bp, Zea mays
  Clone ID: MRT4577_136264C.1
caagtatactgattttcttgatgaccaggttgtttttactggctttgcctatggtggtctgtcagaattatctgaagctgagtatacttcatgctcaatgggttcgaccatagcaggagaaattggcacttttggctacagaccttctgtcttgatggacatgcttgctggcaagagagccgaagttggtacaaaagtgggggcctacatgagaacattttctggcgattgctcaccttcagatcttgagacagctttgcagcttgtttatcaactatttacaacaaatgtggagccaagggaggaagaagtaaaaatagtgatgcaaatggcagaggaagcaatctatgctcaagagcgcgatccatacacagcatttgcgaatcgtgttcgtgaaataaattatgggaact

SEQ ID NO: 39764 - DNA, 834 bp, Zea mays
  Clone ID: MRT4577_136265C.1
ccccccccccccccccccccccccccccccccccccccccccttttttttttttgacgcggccaaacaaattattgcatacttgcaaaaagacgcggccaaacgaattattgcatacatgcagaaacgctagtgttggatagttccagaaggaattaattatacatgttattgtgctccgagatcaaaataatgtaatgattctctatgcgtcaaaccttataacatccaaattccaccaatggtaattaagctgaagccgtgctacatgttcagcatgagcgtaaactaagctcagattactagtcttaagataatctaaggacaacgacgatcatcccaaacaacttaagtaacagttctacagcgacaacaccagtacagggggcgcctcaaggaccaaaaccgttctcttctctacagtagtgacgtaacactggacggatcaagagacaatggccaaaggtagtacatccggtggaaacctacttcccagctgaatcaggagtgccatcaccgtaggaaaccaaacctttcttgcctccaccagacggtgatggggaccgagatttcccatcacttgcacgctccagagatggagaatcaagtggggagggatgatgcactggtggagactttgatactgacctagaaaggtggctcctggaaactgaccgtgcacgatcgctaggtgaccttttcctggcggggggtgaacggctccgtacaggactcttgttgtacccacctctccttcctctgtggacaggactgcgtgatgcgcttcggctcctcctcctgtaggacgctgggcggacgctgggcggacgctggg

SEQ ID NO: 39765 - DNA, 178 bp, Zea mays
  unsure (1)..(178): unsure at all n locations
  Clone ID: MRT4577_136266C.1
aaatagtctaaggcgggggtattggcngaatgcgattattatataatacagtgatgggtaatggataaattctcattaagctgtatgcgtacgaacaatcaaatactaaaccatttttaaggctagtcttacaggatgggagcaatcataaactacccatgtatttgatggacaaaca

SEQ ID NO: 39766 - DNA, 818 bp, Zea mays
  unsure (1)..(818): unsure at all n locations
  Clone ID: MRT4577_136267C.1
attgtcaaaccatggattcctcctcctcgcaactcctcacagctgcgacagcagccaactcaaccttctacctgtcccaatggagatcacaggtgatgatgggagtggaatcctccttgcttgcacagcagaacagcctcctccgcacaatcctcgcatgcatcctctccttcttgacggcgaccatgtccagcgccgcgggcgtcggtggtggctcgctgtacgtcccgatcctcaacatcgtggccggactgagcctcaagacctccgtggcattctcgacgttcatggtgaccggcggcacgctgtccaacgtgctctacaccctgctggcccacggccccgggctgatcgactacgatgtcgctgtggtctcgcagccatgcctgctcctcggggtgagcgtcggggtggtgtgcaacgtcatgttccccgagtggctcatcaccgtgctcttcaccgcgttcctctccttggcaacgttcaagacatacggcaccgggttgaagcggtggcgagcggagtcggcagcaacggaaaggggggtgcttgagggagcgagcaccagggagggcgccgaggaagcactgcttattggccagaaagaaggngccggccatgggtatcactgggtggacttagcggtgcttttatccgtctggctttgcttcttcgtcattcatctgttcataggaggtgagggtgccaagggggcttttgacataaagcccgtgtggcngtgcatactggcttatcacagtcgctcaaatccctgtcgncgtggctttacagcatgtatcatgcaccaaaaaggcaat

SEQ ID NO: 39767 - DNA, 301 bp, Zea mays
  Clone ID: MRT4577_136268C.1
cctacgggctcttttagcacggtgccacctcgctcgccctgagtcccacccgcgggccgggcggtcgaggagagcgatccctaccgcctcttcaacctagacgactacaagcacctccacgaatcgcccgtcgggctgtatggctggatccccttcatgatcgggcatggaagtcggccgtcgcctgtctttttctggctcagcgcagcggagatgtagatccacgtgcttgcaccaggctgggatggtgccactgcgcacgacaatgcggggatcgacacactgtggatggctgaggatg

SEQ ID NO: 39768 - DNA, 568 bp, Zea mays
  Clone ID: MRT4577_13626C.1
acccactagggattgtccgcggagacggcggcgttccgactcgacaatcctcacgccagtagcagtctgtcgattgcaaagcgagatgaagtgcacgttcaaggcatcgctacgagggcgatgaggccacggatcgtcaacaccctcgccgcccccggcgatgacctccgcctcaaggcctccgccacctatgctcgccttcaccatgggattcttgcctgatgggcctacagcctcaccctcgagaattcgggggccttcctcatggtacctcacagccccacaaccagaaagtgcggttgcaaatcatgaactccgcgctcgtgctcgagaaccgcgacagccttgcacctacactcactccagtatgctcgccagcggccccctcgtcccccgtgcagccgcgtctccctcccgcagcgggattcgactgaaccgttactttcgaccccgtacaccatggcagactctaccactcactagggtcctgagggtgtcgcctcaagtacacgcatacgtgcactgggtcgaacggctcaccaccattgagcccctcttcgacaccaac

SEQ ID NO: 39769 - DNA, 531 bp, Zea mays
  Clone ID: MRT4577_136270C.1
atggagtctgctctccactcctcaagtgcttatcccgaaccgaagaatattgtttgtcgcttcggcgtgccgaaggccataaccgtggacaatggtacacagtttgaggccgaagcgttcaaagatttctgtgaccaaattggcacgaagatccactttgcatcagttaggcacccagaatccaacggcctggtagaaagagcgaatgacattattatgacaggaataatgaagctaatcttcaaccggcccagagggaagtggccagacgagctgattaaggtggtgtggagccacaacacaaccgcgtcaaggtcaacaggatttacacccttcaagctcctgtttggtgacgaagctataaccccagaagaagctaaggcagggtcaataagaacggtagcttcggcagaggacgaagctgattatcacgtagcaaaagataccatagaggggaccagacttcaggctgtggagaacatcaacaaatatcaagccgaaataataaaatggcgtgacagaaaagtttga

SEQ ID NO: 39770 - DNA, 263 bp, Zea mays
  Clone ID: MRT4577_136271C.1
ctagcctatagcttctatgaacctctcgtgtctgcccgcacaagcatagccaccagtctccatagctctgccggtggcgtcatgaacttccgctgcccctgccgctcagactatgccgctgtaagtatccatacaatgccatggatgcccgaacaaggttcggaatgcgctcaaccccatctcatgcctgcacgacgtctctacctacgcctagtatcacacgatgactgtaactatctcactggacacctactcgctcatta

SEQ ID NO: 39771 - DNA, 432 bp, Zea mays
  unsure (1)..(432): unsure at all n locations
  Clone ID: MRT4577_136272C.1
ggcggcgaannnananncancaacccttgcggctccgatacccattgccctccacacgcaggtgcgtctcaaagacgtatgcgacctgccctcacaggcaagaacctaaatttgatgtgaccgtgcccaatactagacaccgaagatcgcaaccaagcaggtcacacagaagaaatgggttacagacaccattcgtcagacggagattgatacaggccacgacccgactgccgcagccacaaacgcgaaaacacacccatcctccgtaacaccataccagcgccgacactccctctccacaccatttggtcgttttgcccccccccccccacgggatgaacgatcttctcacgctcgtactgacaccccctgctacaaaaaaagacatagcccgatcctaaattcgcgcaaacgctatctgccacaaaccca

SEQ ID NO: 39772 - DNA, 296 bp, Zea mays
  Clone ID: MRT4577_136273C.1
tgtctttttattccaatgtgctaaactttatcagagtggtccaaacacccccaaggtgctaaactttagcacttcactaaagtttagcaggaagctaaagtttatctcgtgagattgaatcaggcccttactcctagtaggccttactttcttctggcggctcgtgactatggtttacaatcttggcaatgccaattgacatatgacagtattagttgcgtctgtttcaaattgctatctttatatctctacaatcatggaatgttgcaggaaatactagacgccttcaaccgggc

SEQ ID NO: 39773 - DNA, 412 bp, Zea mays
  unsure (1)..(412): unsure at all n locations
  Clone ID: MRT4577_136274C.1
gccgggnctaacctcaacctccgcatcgctctctctcgcgcgcgccgcccttcccagcgccggcggctgccgctcctcccctccaccgccgcctctgctccgcccgtcctcgcgccgtctcgaccgctgcggcttcgtctctccccattgtccgtcccctctcaacgcactctacgacggaccgatgacttgacggatctgggggtttgtctagggggggggggcggaaggggttgtgttttccggggtcgttcatgcagcacgggcccgtgctccttctcccccggctcgggcctcctggctgtgcgccgcaccggccgccttgccgttcgtggcgggctcctcctgggggcgttcccccgcctgttgcgcaccgccttcggtgggcccggccttcgtgtcccggctgccc

SEQ ID NO: 39774 - DNA, 520 bp, Zea mays
  Clone ID: MRT4577_136275C.1
tcggcagccaatggagcatgtttccagccctttatgctctatgatcctccggggcctgaggtaatggaggggctgcaacaagaaacgtttttttcttcagaaaagtttatgaggacggggagaagtggaatgctgggtagggcttgaacggaaaggaaatggagggttagaacattgcttgacacgggacgggtagcttcactggcgcagaagttaagacaaggggaagcgtgggggtattggcggaagctacttcggtagtgaaacactcctggatgcaaaacttgaaaaatgggggggcgggaaacgtaacttggggaggggaagctggaaaggtggtgaagtagggtaacgttggaaccaaacaagcacggggtagtgtgtcatccacgcgaacagactgaagtgtgtttgggggcccacgccaactatgaaatccgataagaaccatgatggtcacacttgaacagaaggtttaggtgtgcggggcacgttggaagaattgccataaagggacttt

SEQ ID NO: 39775 - DNA, 743 bp, Zea mays
  Clone ID: MRT4577_136276C.1
acaactcacccgcacccgcacacagccgcggcgacagacacccaacggcatcgtcatcatcaccgccaccgccaccacttcttctagatagctcctggtactgccgtgccgtcattagccgcgggagcagagcctggacgagtcccagatcggtcggttcggtcggcaccggaaggcattcaggcagctaggcgtgggaactagattaggatcctagcggcagagtgcagcatgggcgccgggattaggatcctagcggcggccctcctggcgctcgcggctgtccgcggcgcgacggcgcagctccggcagggctactactccgccagctgccccaacgtggaggccatcgtgcaagccgccgtggccctcaaggtccagcagacgcccgtcgccgtcggcgccaccgtccgcctcttcttccacgactgcttcgtccagggatgcgacgcgtcggtcatcatcgtgtcgtcggggaacaacacggcggagaaggaccacgtgagcaacctctccctcgccggcgacggcttcgacaccgtcatcaaggcgaaggcggccgtggacacgcagtgccccagccccaacctggtgtcgtgcgcggacatcctcaccatggccacccgggacgtcatcggcctggccgacggcccggcgtaccccgtggagctcgggaggctggacgggctggtgtcgacggcgagcaacgtggacgggaacctgccgccgccgtcgttcaacct

SEQ ID NO: 39776 - DNA, 263 bp, Zea mays
  Clone ID: MRT4577_136277C.1
acaccaagaatgcgaaatctgaagaccatgcagcaaggaaaatcctcccctacaaggctagggcctaggcctgtgatcgcaggctacgttctggctggaggaacccggatatcaacagggatgtcggagaactcaaaaaggatcgcccgggactctgctacgatcactggctgattgtcagtgatcacctcaactatctctgtcaattgggctacatagtagtttataatgtgcctcaaagcgatctcgagggcctcattcga

SEQ ID NO: 39777 - DNA, 1982 bp, Zea mays
  Clone ID: MRT4577_136278C.1
cggacgcggggtttccaagcaccacgccacccgtacacggtttccagcagagcattccggaaggagggggcgcgatgtggcacgaggcgcggcggtcggagcggaaggtccacgacctcatggacgcggcccgccgccgggcgcagcgccgagccgtctacctcgcccgccgccgcggcgacccgcagcaggcgctccaggtctccggcacgcggtgccgcgttcaccgcgacgacgccctgtaccaggccaccgaggaccagcagtgattgatacaatggaatggaaagcaagatgttttgattgacagatttgatggccgtgcattgcttgattttatccgagactcgagctctcgcccttttcgagtccaagggaaatctgaagaagaggaagagttagaggaatttgttaattttgaacgttaccgggatttgattaagcatcgtcgcagaggattttctgatgaggccggtttgcagcatgttgtgcaagagttggaggcaaaagctcttcttccttttagctttgacaaaccacaatcctcacagcctcctgctagcaaaggcgcatattcacaggttggatactcatacaagggagacggaaatgaggaatctgaagacctagacagtgatgacgacgacgaagaggaagaagttgatgatgatgacaaggacttcagtagtgatgatagcagtgatgaacgaatggaaagtatagcgaaagaatttgggataaaaagatataactggcttgtttacatggataaaaaaaacaaagaacaggagaagaggcagaaagaaattgttaaaggcgacccatctataaaaaaaatgagccgtagagaaagaaggaaggcttctcagattgagcgggaaaaggagcgggaggcagcacgttctgttggaagggtatcttatcgtgatccttatagggaacaaaggagaagcccatcatatgaagcatattcaaggggcagaagatcaagatcgagatcaagatctcgttcaccatcccattctaggcgtcatggccgtgggatacatgctgaaagcaattattggagcaagcaaaaggctcctagggttgaatatattactgaatttggaggttccgatgataccagtgaaccaaaagtttcagggatctctccgccttcgtctccaatacgaattgacatacctaaccggttgtctggtggtcaaattcttgaggcacttcacagtgatcctgcctcttctttgtctgtggaacaggaaagaactgcaaaacttttgaaaccttcccccagtacatcatcagcattagctaaactaagcaaggttgcttctgggggaactggtaaaactccccagactgaaaagaaagaaacaccacaagaaagacttaagaggataatgagcaaacagcttaacaagcaaattaaaaaggacacggctgctgagattgccaagaaacgagaacaggaacgacaaaggcaggaaaaacttgctgaagttggtcgatacaagcgtcgtagccgcagtagaagtcttagccgttccccaccaagaaggcggcgatatagcagaagccgtagtaggagcagaagcccaagaaggtaccgatcccgctcgctctccagttcccggtcgccctctcgctctccaaggtaccgaagcaggtcaagacactgaaaatatccaggcagccactaacaaagtgccttgccatgttgtagttaatttattttatagactttttcattcctgcagcgatgtgtactcatgagaagcctccgtttttgttttcttagtcctattatcgacagtgtgtgttccttgtgtttcagaaggtttattctctgttcctcatggcttgcccctttcaagcaagcgtaattttagggcatgtttggccagaccagcttccaggccgaatttagtagtattgccaagcagttcttttattcagaacacaaatgatcgagaatgctaaca

SEQ ID NO: 39778 - DNA, 238 bp, Zea mays
  Clone ID: MRT4577_136279C.1
gacgcaggggctgaaacaaaatttaatcggcatagtcacagggacctaacaaccaacgccgactaacttacatatcaaaagctgctaacatcaagggggggggggggcgcattaaacaaaaaaccttatccggacttataagctatggagactatattggcgcaagaacctaactttaatgtccataacacgccgcatccaactattgagcttaaagcataacagacaagttctaaac

SEQ ID NO: 39779 - DNA, 209 bp, Zea mays
  Clone ID: MRT4577_13627C.1
cccagagcgacccaaacgagcttactaggacctgctctaagttttacttaaccactcccacaaaatcctctggaggaggttatattttacatacggtcaaggcacatgctgtctaccattttcgaagcctgtaagaaccaggaactcttgaatgacacacttgaatctatcactaatcttggcatagaaacatgacagacctgtacatt

SEQ ID NO: 39780 - DNA, 1607 bp, Zea mays
  Clone ID: MRT4577_136280C.1
cggacgcgtgggcggacgcgtgggcggacgcgtgggcggacgcgtgggaaggacttcagtagtgatgatagcagtgatgaacgaatggaaagtatagcgaaagaatttgggataaaaagatataactggcttgtttacatggataaaaaaaacaaagaacaggagaagaggcagaaagaaattgttaaaggcgacccatctataaaaaaaatgagccgtagagaaagaaggaaggcttctcagattgagcgggaaaaggagcgggaggcagcacgttctgttggaagggtatcttatcgtgatccttatagggaacaaaggagaagcccatcatatgaagcatattcaaggggcagaagatcaagatcgagatcaagatctcgttcaccatcccattctaggcgtcatggccgtgggatacatgctgaaagcaattattggagcaagcaaaaggctcctagggttgaatatattactgaatttggaggttccgatgataccagtgaaccaaaagtttcagggatctctccgccttcgtctccaatacgaattgacatacctaaccggtcgggaaactcgactttttaatattttgcaaatatacattgggcgaacttttctctgatggagcttattacctcagtcctggtgttctgaagatgactatgtcaggaataggatagatcaagacatggtcatgatggtatctatggtgtaaaaaatagttgttttgtagataggcatgcattttatggttcgttttatttttgctaagcaggaagaagatttaacacgcatatatctacagtcagctgtggattttatgacctgtgcatctttgccatgtaaattattatggctataataccccatatttttgcaggttgtctggtggtcaaattcttgaggcacttcacagtgatcctgcctcttctttgtctgtggaacaggaaagaactgcaaaacttttgaaaccttcccccagtacatcatcagcattagctaaactaagcaaggttgcttctgggggaactggtaaaactccccagactgaaaagaaagaaacaccacaagaaagacttaagaggataatgagcaaacagcttaacaagcaaattaaaaaggacacggctgctgagattgccaagaaacgagaacaggaacgacaaaggcaggaaaaacttgctgaagttggtcgatacaagcgtcgtagccgcagtagaagtcttagccgttccccaccaagaaggtggcgatatagcagaagccgtagtaggagcagaagcccaagaaggtaccgatcccgctcgctctccagttcccggtcgccctctcgctctccaaggtaccgaagcaggtcaagacactgaaaatatccaggcagccactaacaaagtgccttgccatgttgtagttaatttattttataggctttttcattcctgcagcgatgtgtactcatgagaagcctccgtttttgttttcttagtcctattatcgacagtgtgtgttccttgtgtttcagaaggtttattctctgttcctcatggcttgcccctttcaagcaagcgtaacatgttttagggcatgtttggccagaccagctt

SEQ ID NO: 39781 - DNA, 391 bp, Zea mays
  Clone ID: MRT4577_136281C.1
cactgtacggggtgtcaccgacctacctgacgttcgagttcccggaatgactacatctaggtacaccgcggagatgtccgcggacccggtgacgttcgccaagaaccgtgagctggaggtgatcaactcccgctgggccatgctgggcgcgctcggctgcgtcttccccgagctgctcgcccgcaacgtcgtctagttcggcgaggacgtgtggttcaaggccggctcccagatcttcagcgagggcggtctggactacctcgctaacccgagcctcgtccacgagcagagtatccttgctatctgggcctgccacgtcgtgctcatgagcgctggcgagggctaccgtattgccggcggcccgctcggcgaggccgacgactcactctac

SEQ ID NO: 39782 - DNA, 553 bp, Zea mays
  Clone ID: MRT4577_136282C.1
cctcgaggccggccgggagaaccccttcccgaggcactgtctagtgcgcgcgacgagcttgcttagctagtcgtcatggtctccctcgccggcgtctccgcgaagcaccgagtgcatacaagggcctcgccggcagctctctctccgaaaagaatctcgacaccgccagaccgtcggcccgctccatccgcagggcgcgcccagccggcgcgcagtacaactaccgggacaagagggactactttgacctcgacgacttagggaacaccaccggacagagtgacctctacggctcggacgcgccgtatgtctacaacacagtacacagcgagatcttcagagacgatctggtgtccgttcaccgagagaggcctgctgctcaaggtcctgctgttgcgcggtggctcacttgtagcctacgtcacaacaggccgctgtcagcagacctcctgccgatcaagaaagtatctcaagagccccaccagcctgatcagcgcggtaagatctaagatcagcttctccagtcgcatggtgtactgacttgctttgtact

SEQ ID NO: 39783 - DNA, 1013 bp, Zea mays
  Clone ID: MRT4577_136283C.1
gcactcccacccctagaaaaacccagccgccaccttctttttttccctgtctccttcttcctcacggctgcatctgggcgtgcagctccttctcccatggatggcgcccaagccttcttccccagcgcagggagctcggcccccttcctccctctctttgctgtacatggcgcccctgctccttcctcgcgcagggcagcagcacctccattccccgcggattcatggcgcccggcagcagggtgtctccatggtcggccagcaacctcgttggtcgagctccccagcgtttcccctgctatccatggcgagggcgagctccctccctctccttgcccatggcgtcccttccctccagcgcctccccttgcccctgtgctcggcgcccctgcagcagcacgcgcgcatgagcagggcctccatgggcgcgagtcccttagctcctccatgggctcgacctccccctgcacctctccttagctccccatggcgcccagaaaatagcagctcggctcctctgctcttcttccccgtggtcgcgattctgcgcagagctgcgagcaggagcatgccattgccggatctgccccctccatggacgccccttgctgttccctgcgcctagctctctctatccagcgcgccccattttcttccatggaaaaccaacagcgagcccccttcctcgctattcgttgtggtgcccgccggctgttcgtcaaaatgcgcagcaagccgcgcgctgccggctcgctgtttcgtgaagcccagtggacagcacgccgtcgacgcccgccgtgtgctcgctgttttgcgcagcccatctgcgacgccgtcgaaaatcgtgctagtggtcgacgtcgtgccttgcccgttcgacgaaataccgagccatgtggacaagccatgcgtcatagtcacagacccattcaggaccagagagatggtgatcgtgcacagtgatatggtgccaaccacaggatgccgttggtggcagacccaaggaaggatgg

SEQ ID NO: 39784 - DNA, 162 bp, Zea mays
  Clone ID: MRT4577_136284C.1
gctcctcaggacggtggtattttcataccatcacctaatacatattgaatggtccgaagcctgagctgcttagcttcgttcagagcctgatgcttactgaccgaattttgtgctttctaacaaagctgctcaagaggagagggagcttcttctaaggggtgg

SEQ ID NO: 39785 - DNA, 257 bp, Zea mays
  Clone ID: MRT4577_136285C.1
acgtaagctcggaattcggctcggatctataccattaatagtataatggaaacaacaaccccacgggttgctctttttgttaaggtaatgttatggagtgtgtataccatttgtaataccacttgtaatattgatttattatttggtttcgacccttaacacttgagatagctagacctcaaagagaactagaaacattttgcgagaccaaaatttcttgaaagatttttagattcccaatttaataaaggcaatta

SEQ ID NO: 39786 - DNA, 860 bp, Zea mays
  Clone ID: MRT4577_136286C.1
ttaatatgcattctttgctctctgctggtttctggataaaaaaattattcatgcttaagtcattggtcaagatccacattcttcttctgctaactctgcatcttcttcaataatgcagctgccagagcctttcggattcattttcacatggtttgctgctttgcccctaatattgttcttagcgcagtcattgactaaggctatagtccaggattttttaatccttaaggggccatgtcctaattgtggtactgaaaacctttccttctttgggactatactgtcagtctccagtggcggtacaacaaacaaagtgaaatgtgcaaattgcagtaccgagctggaatatgactcaaaatctcgggtgatcacacttccagaagcatcaaatgcataaacataggtgactctacatttacgccagtaactataaatggatgctctttggtctatattccaaatgtgggagatatcacaccagctttgaagtattgcccgtctccattgtgaacactctgcagcatatgtagcagataaatgagtgaaactatttgtactgcctgctctgcaaattagtatgaacacccctcaaaaagatttggcccacactctggtctctctgtttgcagctgggtatgaaaaaaatgcacaatcttataccattgatgtttagctgttgctttgtagtcaatccagtaaataggctgtgggcatgtacaaatagagttacctgttaatttgttgttcctaaaatgtatgatacatagactgcatttcagttgggacatataacaccaaagcaattacaatgaagtgtctgttaaaaaaaaaaaaaaaaaagcggccgccaccgcggtgga

SEQ ID NO: 39787 - DNA, 248 bp, Zea mays
  Clone ID: MRT4577_136287C.1
gggtacacatggaacagctttttttttgaagggggggtcgagtttagttcagacacgagacaggacgaacacggacagcgctgcgtgaacagacaacaaaccccgggcgcgtgccaaccgggtggggggggacgaagagggtcccaaaacacaggccgcaaagggtgtggggccaccacaaaatgtgggccccccctacggggcacaagatgccaaggccccaacccaaaaccagggaacggtgcctc

SEQ ID NO: 39788 - DNA, 593 bp, Zea mays
  unsure (1)..(593): unsure at all n locations
  Clone ID: MRT4577_136288C.1
cgnacntggggcactgntnngcncncgantgctggtanctgtggtcgggttcttggtncagatatgtgagatcgacgaggnggaagaaagtggcggctgcattgcctgacgccaaattcatctaccactccggcggccgatggcctcaggtcgatgcctttgaggaaatttcaggggtgatcaccgagtttgtaacctcagctgaggaagctggaagcagcaggtggtgacgtgggctccttcgaggctcgccgtccaggtgcgtcctgccgctgtttccggaccttttagttggtgggtgcagtgacaagtgcaacttgagattttttgttcctggagaatttctgcttgcagcgtctgtaccgagttctgactttacactagcgtgtttttttttaactttaatttgttgctaaatggtgtacttgttgtcttgcttcagtttgtaaaacgtgtgtcactgactcatgctagtgtagtagcatgtactcggtttagcgttgttttgaggtagcgtgttctgagtaatcacttgttttgagtgtatccatgcgattaatctttcacataaaaaaaaaaaaaaaaaaactcga

SEQ ID NO: 39789 - DNA, 397 bp, Zea mays
  Clone ID: MRT4577_136289C.1
cctgtgggcatccgcagcggcagcagcttttgttgcggttgcgggcgcccagcttttgctctccgcgccgcatccgtccgtccacctcatcatcccctggtcgctgctaccgaaccgcagctccgccgccgccggcctaactcaccaccgtgctgggccagccgatcgcggccggggtcactagttagttttggttgctgggttctgatgctatggcggcgatgatgatcagatcggcggaggactgtgccggtgcctgtgccggtgccggggagaagttcttggcggttgctgaggcagcggcgagggcccagaagcagcgggcggtgtcgccgcataaggtgggcctgggcgtcccggacccgaagcagcagcagaaccagtggggcagcagcgc

SEQ ID NO: 39790 - DNA, 368 bp, Zea mays
  Clone ID: MRT4577_13628C.1
attcggctcgagctggagcctgcgccttttttttcaaaaccggagtggcctagcctgctcggcgaccccgacgctgagagctccccatatccctaggagaacgcatggccacccagatcatcaagaagaagaagttctggcagctactcgcagtgtcatacgccgagctcaatgagatgctgacacgtgagctccatgaggacggctactaccgtagtcgaggtgcgtctcacaccgatgcgcgccgagatcatgatccgagcaacgcgcactcacaacgagctcggtgagaaggtgccgaagatcagggagctcacgtctgtggtacagaagaggttcaaatatctagagaacagcgtatagctcta

SEQ ID NO: 39791 - DNA, 301 bp, Zea mays
  Clone ID: MRT4577_136290C.1
ggcctcaagtacaccaacactgtctggaaaactggagtcaaaggtgtggaccgcacaactccttagttacatcatcttttcagtccacacgctgtcatcgagaattcacaaatcgacatatagatttgtgatccaatcacaaagaataacaaggccgggagctagctagtaaaggagcagggatttggtcctttaatttgtccaaatgacgatgctgttgatattttcaccgcttcattgcagtggagacccaaaagatgatgctggggacgttcagcccccagctagagccctatgtcta

SEQ ID NO: 39792 - DNA, 418 bp, Zea mays
  Clone ID: MRT4577_136291C.1
cgctcaggtgcgtgtgcccggagctgctcgcccacagcggggtcaaggtctgcgaggccgggtggtgcaaggccgtgtcccagatcttcagcgagggcgggcttgactacctcggctacccgagcctgatccacgcgcaaagcattctgggcatttgggcgtgccaagtggcgctcatgggcgccggatacgggtaccgcatcgccggtggcccgatcgtagaggcggtcgacccgctgtaccgcggcagcggctcttacccgctcgggcttgacgacgacccggatgcgtccgcggagctcaaggtcatggagatcaagatcggacgcctaaccatgttctgcatgtgaggctgcttcgtgcatgccatcaacatcggcaagggtcccgttgagaacctcgtccaccaccttgctga

SEQ ID NO: 39793 - DNA, 472 bp, Zea mays
  Clone ID: MRT4577_136292C.1
gaatcatatgatctattattactacattggatgcaatgtccaaccttaaaaaagatgaatgcatgcatgtattattactgtcacatatagctatggttttcttcccttgattggagcttagcttacatgttggccgatctcttcgccaacccaaaaaaaaattatacaactccctgcatacctctgtagtctgtatgaccaatctgtcatcaccatccttcgaccgggctagagtttgatcggaacggtttgatcgcttgcgtggttaccacatgagatgatatccgatgacgacggctggcgagaggaagaagaaagtagctttatcgacctagctatgatggctgcccatgctgtgccattgctcgttgctgctttgctgctgctgctgctctgcctgagcctgtgcacgctgctgtggctcgtcgtagcagctcatgctggcgctggcactgatgatggcgcccatgca

SEQ ID NO: 39794 - DNA, 448 bp, Zea mays
  unsure (1)..(448): unsure at all n locations
  Clone ID: MRT4577_136293C.1
aaagaantcncctaattctttcgatcgaattacgcgccttcttctctcacatctcttctccttcctccttctctacattaccattatcctcntcacactccactcctttctcaaccccccctacaaaatccccaccttctccatcaccatactttccaccattttcttctccacctccttctcctactacttctacaccccatcatccactccctcccttcatatcttcaatctaaacttccttcccaactataccaactccaactaccattttactcttcctcttaacttttctccctatctttcttctcttttcacctaaaatccaacaacacctctttttttttcttccaccacactatcatactccactcaatgcttccaatcaactttccctttcncatantattataccttcacatcatcctcccaaccttttaatccatac

SEQ ID NO: 39795 - DNA, 595 bp, Zea mays
  unsure (1)..(595): unsure at all n locations
  Clone ID: MRT4577_136294C.1
gcaccagggtgcaaaatccagcaactggtgaggtccttgcaaacgtgtcctttatgggcagcagagaaacatctgatgctattgcttctgctcacagtacattctattgtaagtcaaatgtttcagtgcattcgatttttatgccttagtaccaggattatattatgttccagagcagaactcttgctgtagtgttataaaattctaacaggacagttacttaaacaatgtaaattaatatgtggctatttctggagataatgtcctggctttgtgctgaacgacatgaatagtattatcctgtcttttatttcagttattgtttctactgtaactcagataaatctggtcttgtaggaaaataaagtgtttttggtgtcgtatgtggcccaagtctccattctcaacaatgtccatatcttggttatatctcggaaattcttagatgctctggttctttaaaataccttaactaatggcagcttcatacgtcgaactagcatataaacaaactgcaactgaatatctattggaaaggcttcttttgattcaaacacttgntttattttagaaaaaccactaaaaactggaagag

SEQ ID NO: 39796 - DNA, 977 bp, Zea mays
  Clone ID: MRT4577_136295C.1
ctagtatgttccaccatcagcaggagctcctacaggcagaagctgcggcggcagatcgggagagcagcatgtccaacaacctcacctcctccgcgcccggcggccccaacgcggcgccagctgctgctgcggccaccggcaataataacaagcgaaagcggagcctcccaggcaaccccgaccccgaggcggaggtcgtggctctgtctccggcgacgctgatggcgacgaaccgcttcttgtgcgagatctgcgggaaagggttccagcgggaccagaacctgcagctgcaccggcgcgggcacaacctgccgtggaagctgaagcagcggggcgcgggcaaggaggcgcagcggaagaaggtgtacgtgtgcccggaggcgtcgtgcgtgcaccacgacccggcccgcgcgctgggcgacctcacgggcatcaagaagcacttcttccgcaagcacggcgagaagaagtggaagtgcgacaagtgctccaagaggtacgccgtccactccgactggaaggcgcactccaagatctgcggcaccagggagtagcggtgccgtgggccgtgtgcactttccaggcgggacagcttcatcacccaccgcgccttctgtgacgcgcttgccgaagagagcgccaaggcgcgggcggaggcgccttccgcggaggatgggagctcggcagccgccgtggttccgccaccggcacccccgattgcgccagcgccggcgccactgcgacagcaaccgcccccgcctgcgccgcaacatgcggagccacgtaatgagcctgacacgaatgcgactgaggccgtccagttcgcgccgccgactccgccaccgccgtcgacgtcgcagttacagctgccggtgctttcgcaagcttcggtgagcgctgctgccaacgttagcgccagcagcagcagcagcagcgtcgcggggacgtcgcagagcctgctcggcggtatgttcgcg

SEQ ID NO: 39797 - DNA, 2583 bp, Zea mays
  Clone ID: MRT4577_136296C.1
gacactgggccttcttaccctttgcttctcttctctgccgctagggaggcgctgacactgttcctcttccctcctcctgctctctccccatgtcctcctcctccggtcctcggcggccatgactgctgcggcctctttcgtccgtgcctgcgcgctgcatggctgctgccagctctagatacacactcctagctaggcagctgttgccttcacctgctgccgcgcgctgctcgatcgactgcacgtcttcacagttcacaccacagagcagagggagagagaaagccaagaagccgtcaggggagagtagggagagagagaggggaggagtcgtatgatagaaagaatctggaattgctttccctctcgttttgtcccccctgcgcctccttgattattgtgttgcttgctgttcctccctgcctgcttgctccctgcttcggcttggaggccttctcatgcatcaacctccttagcatctctctccccctctcccatacatacccccttgtctgatgcctgcttctgcttgccccatcctccttcatccttcacgagttcgtctctcgatttattgtctgccacacctcccttcagctagctatcttcccctagctagctaggtaccagtagtgtgtgtatatatagatagatttatagatatagacacacacaacaagtgcaagatcaggcgaaagctactagccgcccttgcaggtcttggactccattcgtcgtcgtccttgggttctcctcctcacctagctactatatgttccaccatcagcaggagctcttgcaggcagaagctgcagcggcagatcgggagagcagcatgtccaacctcacctcctccgcgtccggcggccccaacgcggcgcctgctgctgctgctgctgccccgccggcgcccgcggcctccggcaacaacaagcggaaacggagcctcccaggcaaccccgaccccgaggcggaggtcgtggctctctccccggcgacgctgatggcgacgaaccgtttcgtgtgcgagatctgcgggaaggggttccagcgggaccagaacctgcagctgcaccggcgcggccacaacctggccgtggaagctgaagcagcgcggcacgggcaaggaggcgcagcgggaggaagggtgtacgtgtgcccccgaggccgtcgtgcgtgcaccacgaccccgcccgcgcgctgggcgacctcaccggcatcaagaagcacttcttccgcaagcacgggcgagaaagaagtggaagtgcgacaagtgctccaagaagtacgccgtccctttccgactggaaggcgcactccaagatctggggcaccagggagtacaagtgcgactgcggcacctccttctccaggcgggacagcttcatcacgcaccgcgccttctgcgacgcgctcaccgaggagagcgccaaggccatcggcctcaacgccatggcggccgtgccggcgcagcaccaccaccacccgatgctcttctcgccgccgcccacgcacgtcatgcagcaggacgtcgccctcctccaggagcaccaccaccaggaggtcatgcagcaggagcactgcaactacgccatgaagacggagatgccgccgtggccggggatgacctacgaccacccgctgctgcagccgctctgcaacgccgccgcaccgcagagctcggccacgtccacgccgccgccgccgacgacgatgcagcttcccgctgcctacgcgcacctatcggccacgggcgctgttgcagaaggcggcgcagatgggcgccaccgtcgccggcgcgggctacacccagatggcgggggccgcgacaagcgccaccttcggcctcggcctcccggacctgcagaatacccagcagcagcagcatcaggacggcgagatcatggccgggctcgcgaggacagcctcccacggccgcggcggcgaggaaggcggcggcggcggaggcgacggcatgaccagggatttcctaggcctgcgcgccttctcccaccgcgacatcctcggcctcgccggcttggactcctcgtgcatgggcgccatcatcagtgccagcgccagcatgaactgctacgacgagccacagcagcgtgcacaggctcaggcagagcagcagcagcaaagcagcaacgagcaatggcacagcatgggcagccatcaaagctaggtcgataaaagctactttcttcttcctctcgccagccgtcatcggtacgtcgccatcgctgcatctcatcgctgccgtcgctgtgcagaggcaaagctagctagggccggccgctcggtgcaccgtgccttttgctcatcttttgcttctgttcaggatatcatctcatgcatgtggtaaccacgcaagcgatcaaaccgttccgatcaaactctagcccggtccaaggatggtgatgacagattggtgatacagaggtacgcagggagttgtataattttttttttttgggttggcgaagagatcggccaacatgtaagctaagctccaatcaagggaagaaaaccatagctatatgtgacagtaataatacatgcatgcattcatcatctttt

SEQ ID NO: 39798 - DNA, 334 bp, Zea mays
  Clone ID: MRT4577_136297C.1
gataaccacggacctcgttttcgttcttcatacggcataaatatcctgcagcctaaattccatttcgaagactaatcacctatctaacacttctactgcaccaccaccaccacagatggttttgccggtgccacacaaacaccatgcttcttacaggggggagccacatttccaggctaccaaacttatcaaactgcaccggcagcaacaacgccctaccctgccctacgaccataccaaaactttacgcacacagagagccttacagagagagcttaatttcactgaataccatgcaactcagacagcctgactctttgtatgcagagctttt

SEQ ID NO: 39799 - DNA, 146 bp, Zea mays
  Clone ID: MRT4577_136298C.1
tcgttcattacgtagctcgagcatgaatgtacctgtgtgctctgatacgctgacacggtctgggggcaatcattaagaaagatgtcacggtaattgcgccctatatgtcctccataacatgtaggtattgtagatcacatgctatt

SEQ ID NO: 39800 - DNA, 636 bp, Zea mays
  Clone ID: MRT4577_136299C.1
gccacggtcgccgcagctccatctctcgcagccatcggtgaaggttcctctcctgcccccatcgcgggcgccccatctcgtcttcgcaggttccagtctatatatcagagataacaccaaagaatcttagaggaggtttcgcaactgtaaaccagtttatgatatgttgtggggcatcacttgcttatgttctgggaacttttatctcctggcggactttggcaatcatcgattttgacttccctattgtaggagtggcaccatgtttgctgcaactggttggccttcttgttactcctgagtccccaagatggctggctaggtttggccacccaggtgcatttgaggcagcattgcagaagctaaggggaaagggaactgatatctctgacgaagcaaaaggaatcaaagattttacagaaaagcttcagcaattaccaaagtcgaagatgttggacctttttcagaaggattatatccgtgctgttacagtttctcatcaggaaatacaggaatgctggctatggttgctgttcagattccgatgacaggactaggagtacttctgatggacaaagctggacggaggccacttttgatggtatctgcagctgggacatgcctgggttgcctact

SEQ ID NO: 39801 - DNA, 1159 bp, Zea mays
  Clone ID: MRT4577_13629C.1
cggcacctggtggccgtcaagcggctccgggagaagatcaccaaggggcacaaggagttcgaggccgaggcggcggtgctgggacggatccgccaccccaacctgctggcgctcagggcatactacctgggacccaaaggggagaagctactcgtcttcgattacatgcccaacggcagcctccactcgttcttgcacgctcgcgctcccaacacgccggtggactgggcgacgcggatgacgatcgccaagggcacggcgcgtggcttggcctacctccacgacgacatgagcatcgtgcacggcaacctgacggccagcaacgtgctcctggacgagcagcacagccccaggatctccgacttcgggctgtcgcggctgatgacgacggcggcaaactcgaacgtgctggcggcggcgggcgcgctggggtaccgcgcgccggagctgtcgaagctgaagaaggcgagcggcaagacggacgtgtacagcctaggcgtcatcatcctggagctgctgacgggcaagtcccccgcggacagcaccaacggcatggacctgccgcagtgggtggcgtccatcgtgaaggaggagtggaccagcgaggtgttcgacctggagctggtgcgcgacgccgccgcggggacggccgcggacgagcagctcatggacacgctgaagctcgcgctgcactgcgtcgacccggcgcctgcggtcaggccggaggcgcacgaggtgctgcggcagctcgagcagatcaggcctggtggcagcgagggcggcgctgggccaagcgaagaaggtggtggtggcgccgccgcccatgtgccggcggcttctgcttctgcgggagacgacgacgagtagcaagcaagcagcgccagacaggaatttaccagaaagaaaaaagaagcaatggagaaattaagagagagataatatatgtaggaattctttcatttgtttgtttcactggacggatcggattgatcattttcttgcgttcctaggtaatttccagtttgtataggcaaatattatttgctctagaatcatcgctgtgtagtgtagcaacccctacgacggatggaagagaggagaatactcctagtattaataatgcattattattattttttctatttaatttcctcatagt

SEQ ID NO: 39802 - DNA, 574 bp, Zea mays
  unsure (1)..(574): unsure at all n locations
  Clone ID: MRT4577_1362C.1
cgctcaaggccgtctccgtgctcgtcggcatcgacgccatatcggtggacatggcggcgcacaagatgacggtgatcgggacggtggacccggtgcaggtggtgagcaagctgcgcagcaagtcgtgggcggcgcacctcgactccatcggcccggccaaggagcccgagaagaaggaggagaagaaggaggagaagaaagaggagaagaaggacggcgacgggaagaaggaggaaggggacggcaagaaggacggcggcgacgggaagaaggaggaaggcggcgagggaaagaaggaggaagcaggtgatggcaagaaggacggcggcgagggaaagaaggaggacggagatggcaagaaggaggaggacggcaagaaggaggaaggcaagaaggaggacgagaagaagcccgccgcggtggcccctccatggatgcaccaccagcaccagctgccgccgcagtacatgcacatgctcaccgccgactacatgaaccagtaccaccgccccccgccaccgncgccggtgtaccacccgtacgtgccgccgcagccgcagtactactacatgcg

SEQ ID NO: 39803 - DNA, 1319 bp, Zea mays
  unsure (1)..(1319): unsure at all n locations
  Clone ID: MRT4577_136300C.1
ccggccgggcattgggaccctgaagcgtctgcccatgtcaggacatcggtcaccagtggagtggaccgatccacgccggtcaccagtcgtcctcgtcagctcagctcgaaaaacaccagccgacggagtggccgccgactgagagggagaaggacccaggtcggccgcgggcccgatggacctagaggaccaagaagcgcagaagcctctcctggtcaccgcgcccgggagaatcggtgatggcagtcacttagctgagtccgacgctgccccgtcctcctcttcgattgcggtggtggtcgccagcaccgcagtcgccgtcgccggatccttcgagttcggcatctcggtgggccactcgtcgccttctcagtctggcatcatgcgtgatctcagcctctccttggccgagtactctgtctttggctccatactaaccattggagcaatgctaggagctgttgtcagtggtaccgtggcagaccgagttggtcgaagatctgcaatggcgatatcagatcttctctgcattttcggatatctcttgataatcttttcccagaatttctggtggcttgacattggaaggttctcaattggatgtggaattggccttctttcatatgtggttccagtgtatatatcagagataacaccaaagaatcttagaggaggtttcgcaactgtaaaccagtttatgatatgttgtggggcatcacttgcttatgttctgggaacttttatctcctggcggactttggcaatcattggagtggcaccatgtttgctgcaactggttggccttcttgttactcctgagtccccaagatggctggctaggtttggccacccaggtgcatttgaggcagcattgcagaagctaaggggaaagggaactgatatctctgacgaagcaaaaggaatcaaagattttacagaaaagcttcagcaattaccaaagtcgaagatgttggacctttttcagaaggattatatccgtgctgttacagttggagtagggttaatggtccttcaacagtttgggggagtgaatgccatttgcttttatgccagtgaaatatttgtttcagctggtttctcatcaggaaatacaggaatgctggctatggttgctgttcagattccgatgacaggactaggagtacttctgatggacaaagctggacggaggccacttttgatggtatctgcagctggaacatgncctggttgcctactagttggattgtcattcttagctaaggaacatcactggggaaagggacctgacttagtgctggctntggcaggcattctga

SEQ ID NO: 39804 - DNA, 607 bp, Zea mays
  unsure (1)..(607): unsure at all n locations
  Clone ID: MRT4577_136301C.1
ggtaccctccgggttcggccgggntacacacttacacataattatagatgcacaaattaataattaataatgacatgagtacatgacacatgaaaattaaggtaatttgggtatttcgggtacccgattatgatacccgaaataaattcgggtttcgcaagttgctaccccaaattatctaatgaaattcgggtttcgagtatgtcgggtttcgggttacttttttttgcctagcccaaattttaggacttggagatgcatgcaaacagaagtgctaaactttagcacccaatagcagtttagtttgtaaagttgtgctaagctttagcacgatgctaaagtttagcacatggaatccaaacattacctaaggacaaggatcattctaaaaacaaaacaaaaaaacatacatctagattcatgtccaaacaggacccaaaagcagtgcttctgctggaacctcagtgacggcttccgcctctgaatcatccaaaaggttacccctgggttcaagcaattaataccctctccgtactcataagcgaatggttaaatccatacccttctcagatgtaacagaatgggatttgcgcctgcagggtaattg

SEQ ID NO: 39805 - DNA, 648 bp, Zea mays
  Clone ID: MRT4577_136302C.1
gccggccgggtccggccttttcgttgcaatcttcatagaccttgtctcttgtcgtccccgaaagaactactttccaacacattcttcgtcttcttaacactaacgttgacggtcgtgtcaagattcagattgctttgacctctgttaagggtgtcggtcgtcgtttcgccaacattgcctgtaagaaggccgatattgacctcaccaagcgtgctggtgaactttccagtgaagaattagaacgtattgtcaccattctccaaaaccccgcccaatacaagatccctaactggttccttaacagacaaaaggatattgttgacggcaagtctagccaagtcatctccaacgttcttgacaccaagtaccgtgaagatcttgaacgcttgaagaagatccgtgctcaccgtggtctccgtcactactggggtgtccgtgtccgtggtcaacacaccaagaccactggccgtcgtggacgtaccgttggtgtctccaagaagaaataaacatatctttttgggacatcacacctttttatacaaatatattgctttcttttttcgcgcctttctcttggattcagcaacatgcattatatagaataaaaaaaggattattaagcaaaaaaaaaaaaaaaaaaggccccta

SEQ ID NO: 39806 - DNA, 697 bp, Zea mays
  Clone ID: MRT4577_136303C.1
gcgattggtatcctcgaggccggccgggattcgcaccatctgaggattgcttaggaaggcaataagctttattgtcgaggcatcatgcagattttcgtcaagaccctcacggggaagacgatcacccttgaggtggagtcttccgacaccattgacaacgtcaagtccaagatccaggacaaggagggtatccccccggaccagcagcgacttatctttgctggtaagcagctcgaggatggccgcaccctgagcgactacaacatccagaaggagtccacccttcacttggtcctccgccttcgtggtggtatggccaagaagcgcaagaagaaggtctacaccacccccaagaagatcaagcacaagcgcaagaagaccaagctggctgtcctcaagtactacaaggtcgactctgatggcaagatcgagcgacttcgacgcgagtgccccagcgacacttgcggcgctggtgtcttcatggctgccatgcaggaccgccagtactgcggtcgctgccacctgacctacgtcttcgacaagcaataaatgcattcaacacgggattgggattgatgacggaacggatagggtgccaaaaatgggcgttaaaaggctgtagcacaaagcacatccggtttctgaaataatgcattcacgctaagaagacaaaaaaaaaaaaaaaaaacccgcggcc

SEQ ID NO: 39807 - DNA, 523 bp, Zea mays
  unsure (1)..(523): unsure at all n locations
  Clone ID: MRT4577_136304C.1
tttatttttttttttttttttttttttttttttttctttttgttttgtggagtccttaaaccaagaaaccaggggaataaaaataaagttcggaacatgcgggggggcaaacaaaacacgaataggagccacatccacaagggggaaggggcccgcccacggaaacaaaccgactccgcccaccaccaaagaaggggggtaaaaaacctactccagcaaaaggaggcaagccttcccctatctttaagggggccaaccatccaaaaaagccccaccccggaaggatccccaaatatttggaacggcctggggccatggcccaccaggcaagggaggggaaaacccggcgtactgaactgaaaccgggttctgggaaatggaaatctgccgggctctcactgggagaaaggcctggaaccttgaggaccgcccctactcttttggggcactgcttttcccaaactcccttgaacttgcctgggactcggtgnctgggggggagatgtggcctttccggctccgg

SEQ ID NO: 39808 - DNA, 2359 bp, Zea mays
  Clone ID: MRT4577_136305C.1
aaaaaaaaaacaaaaaaaaaaaaaaaaaaaaaaaaatttcggccgggctcgagaattctattggtcgagttcggtggagcaacctctcaagtgccagtgtaccatacgtcgcgaaacatctcgacccaaccgacgccccgcctcttaaaacggcgaccttcctccatggccaaatcgttgtcctcctccgcttccctccaaatcgaccctggatccaaccccgattttccccagcagaagcaaacccgagcaaattgagcgcttgcagcttcacccggcgaagcagaatcgaatcggagccgctcgccacgccgcgatggggatcctcctccggtccctcctcgtcgcctcgctcgtcctcagttcgctcgtcttgcacgtcgcagcggctaaaactatagatccttacaaggttctaggagttgacaagaatgctagccaacgggatattcagaaagcctttcacaaactttctctaaaataccaccctgacaagaataaagggaagggcgcacaggaaaaatttgaagaaataaacaatgcatatgagattctatctgatgaagagaagaggaaaaactatgacctctacggggatgagaagggtaaccctgaatttggtggtggaaattttggaaatcatgggggttctacatacttcactggtggtggccctaagtccagtcaattcacatctggtaatggatggcagacgatgggtggtcaaggaaatacaaaaacgttttcattttcatttggtggtaaacctggggccagtggtggaaacccgtttggtggtggttttgatcttggtgatgttttctcgaacctttttggtggtggaccaatgggtgatagccatattggtggatcaagtggctcagctagagccaacactggaacttctggtcagcattctggcactaccaagattgaggatatcaccacacaagttttcaataaagaagtagctgatcaaggaactacttggcttctgttattttatactccccaatctaaaagtcagtttgtgctagagagtgtcatgcaagacgtggtccattcactagatggtgttcttagggctggtaagatcaactgtgacaatgaaaaatctctttgcaaaaggtctggtgtttcaatagggaaatcggcccgtctcttcatctattcatatgctactgcagagaaagggtctttgcacgagtattctggggaacatgatgctaagagcttgaagacattttgtcaagaacacctgccaagattctccaaacgggtagatattagccaattcagcttccctttaaatgttctaccaaaccttcctcaagtgctcttactatcgagtaagaaggacacaccagcaatgtggcgtgctatcagtgggatgttccgcaatcggataatcttttatgatgctgaggttcacgatgtttctcatcctctgctgaaaagtcttggcgtgaagaatctcccagctgtaattggccgaaccgtgaatggtgaggagctccttctgaaggatggcatttcggtgaaagatctcagatctggtgtcaaggaattgaagacagtgctagatagttttgagaagaagaataagaagttattatcgaatctagctaataagaaaccttccggtcaatgggaagaaatcaagaagattcctctgctcacagcttccaactttgaggaaatctgtggagagaagacttcagtatgcatcattggtgttttcaggtcaaacaaagccaaggggcagcttgaagcagtcctgtctgagatatctaagaagactctgataagggggcagaactataattccagaaatgctgtctcctatgctttgctggataaggacaaacaatctgcattcctgtcatcgtttgacaagtctggatacaggtcatctgacaatctgctcatcgcctacaagccccgccgggggaagttcgcggtgtacgacggcgaggtgacactggaagaagctgaaaggttcgtgggatccgttttgaacggagacgttcaactgtcgccgacgaaacaaaaacctgtccttcggtagacgattattgcaagttgcaagggttttagatctaacacttattatcttaattaaggacttcttgtacatagatggacgaagagagtaaaatcatagagcgtttgctggacagtttagtcgttcggtaaaccagagttgctacatctctccctcaaccgtgccaatgtaaattgtgcaaatgctgcagtcctgtcgagatattgaatatatacaggcatatagcggaccatttctatacttagccaagttaaccttttgtttccgcatgaagcagttatattacacaacata

SEQ ID NO: 39809 - DNA, 327 bp, Zea mays
  unsure (1)..(327): unsure at all n locations
  Clone ID: MRT4577_136306C.1
tcgcatgaaacacatccaagctgaagcatcattatcaacatacctaacaacaatggnctacgcaagaggattatccctccttgcgtcttcttgcagctttttgcagagctcaacaatatgcagttcaattattccacaatgnctcatcttgctccatagttccattattacatctgttcctcccaccagttaccttcaatgggncttcgaacatcccagctgtgcatagcctatanggctacatacaagcaattagcggcgagcgtcttacaacataccaatttcccagttggcaacaacatatccttggcacatnnctaacaatac

SEQ ID NO: 39810 - DNA, 193 bp, Zea mays
  Clone ID: MRT4577_136307C.1
ggaggggaaaccgttcgcttttattttaagagaacatgccgacaaacaattggtttttccaccaggaacattaaaaaaactggaatccagggtttcttaatcccaaagcagattttgtttgggtgacacgggaagttcgacaaacattgtacaaaatttacagattttcattcaagacaacaaggggtttagg

SEQ ID NO: 39811 - DNA, 735 bp, Zea mays
  Clone ID: MRT4577_136308C.1
tctaacatcgtcgatccctccattgcatgaagatcctacaaatctagctacgtagctagcgatcgatcgaattccatatcattgtttactcagacacatcatcagctacgtaactgcgtcagcttctggttgatcggatcgcgtccatggctgcggcggccgggggcggcaggcggccgtgggtggtggacgtggagaagaagctgggcgaggcggacgcgtcggtggaggtgtcgcggtggcagcggcactgcatctaccgcgtcccggcgtgcatcaaggacctgaagcccaaggcgtacaagccgcaggtggtgtcgctgggccccttccaccacggcgacgcggagctggtccccatggaggagcacaagcggcgggcgctgcggcacctcctgcgccgcgccaagaggccgctggaggacttcgtggccgccgtggaggagatcgcggagccgctggagagcgcgtacctggacctcggcgccgagtggcgtggcggcgggagggagcggtttctggaggtgatgatcgtcgacggctgcttcctgctggaggtgatgagagccaccgtcctcgacgggaagaacaccgccgactacgcgcccaacgaccccatcttcagccaccacggggtgctgtacatggtgccgtacatccgccgcgacatgctcatgctcgagaaccagctcccgctcatcctggctcgagagctcgtcaccgtcgagactggca

SEQ ID NO: 39812 - DNA, 239 bp, Zea mays
  Clone ID: MRT4577_136309C.1
ggggcccaattttggccttataaaaaaaagagctttcggcacaattttgtccttataaaaaaaaaaccctgtttttttggttttaatccggaggggcttctactttttatactagggggcctctatgaatggggccggcaccaaggcgaacattgttaataaatgattttgggcccccttgcttaaacggaacttttaacgggggaatcagttttttgggggggaccttacccctgctg

SEQ ID NO: 39813 - DNA, 1182 bp, Zea mays
  Clone ID: MRT4577_13630C.1
tctggcaaaacggcactgctctgttgtttttgttaagacactagacaaagacagcttctcagatgctgaaagcataaatgcgtcgacccacgcgtccgacttgagaaagcacgacatcccaatttggtccaatttgttggagctgtcacgcaaaatgtcccgatgatgattgtttcagagtaccatcaaaagggtgatttagccagttatattgagatgaaaggtcggctgaagcctcacaaagctataagatttgctcttgacattgcgaggggactgaattatctccatgagtgcaagcctgagccaatcattcatggaaatttgtcgccaaaaaacatcattcgggacgatgaaggacaacttaaggtggctggttttggatcactgagtttgagtaaagtttctgaagataaagtacaaatggctcagccagttacaaaatttgacaatgtatacatcgctcccgaggtctacaaaaacgaaccatttgacagaagtgtagatgtatttgcatttggtctcattctttatgagatgattgaaggagctcctgcttttcacccaaagccacaagaggaagcagctaagatgatttgcttagaggggctgagaccaccattcaagaataaaccgaaatactaccccagtgatgtgaaagagttgatacaagaatgctgggatccgatgccttccgtcaggccaacattcgcggagataattgtgcgcctgaacaagatacatgcgagctgtgctaagcagggtagctggagagacaccttcaagcttccatggaaacaaactggagagagataattgtaaagccccgcgaggctgccgtgtcaagatttcgccccttcccttcagcaagtgtgagtaaacacgagtcaagaaacgtacagagttacaaacagaaaggcaaagttcctatttagttcaggtttcagaccacagtttgtgctttgtagcctgtatgactgtatctaggcttatgccaccggcccaatttctcttgagctatcttcatccaaacgggaacaacagagtattaatcagtattctgaacattcagggcgtgcctattccttttgaactcctacgtgaacgttgtaaattctgcacgatttcctttcgtgccttttgtgtacgttgtgctgaaaaacaaaaaaaaaaaaaaaaaaa

SEQ ID NO: 39814 - DNA, 704 bp, Zea mays
  Clone ID: MRT4577_136310C.1
cattgggtacctcgaggccggccgggaagaatttaagctatagtggtcagtgcggactgtaaagggtcatccccaaacatatgaccgccggtgtcgaactgcctttaccaatccaatcaactcccgctcatatgctggcaatttttggtgatgaagggacaccggcctgatgaagaaggctatggcaccatcgccttggtgcatgactgctccaaatccggaggcgaaggcatcacagtcaatgaaaaaccttttgttgaaatccggtaactagagacgtcagcaaggcttgtttgagttgacaaaaagcatcagttgtttactctgtccagtggaatgcatctcttttcagaagggctgtaagaggagctgccactgacccataacctgctataaacttgcggtaataccctgtgagtcccaggaaactgcggagtgctcgaatggtcctaggtatgggccatgattcaactgcatccaccatggaacggtccatggcgaccccctgcgcaaagacaatgtgtccaaggtaagtgactgcagatttaccaaatgagcacttggacttcttaagaacaaggtcattatcccgcagtaattagaacacttgcttcacatgttgtaagtgctctgtccatgacgagctatatataagaatgtcatcaaagaataccagggtgaacttccggatgaacggcttcagt

SEQ ID NO: 39815 - DNA, 112 bp, Zea mays
  Clone ID: MRT4577_136311C.1
aggattggctgtctagacaaaatgaaagctgtctttaccaacttgctggagtggagcactactataactgtattgctctgctctggtataagctaccatttggaccaggagc

SEQ ID NO: 39816 - DNA, 354 bp, Zea mays
  Clone ID: MRT4577_136312C.1
tcttgtcatagacggtgttgccggtcgaggcgtgcgatgtccttagcggcgaggtctgctaggagcggtaccaggacggagtttactaggagctggcgcacgcgtgaaaactctgatccatccatttctggacacgacactatggacctgtgtgtagcagatggtttacatttacgtgttgtagacctgagagctcgagaaactgggtagagagcttactgaataacatgcgccacacgaagccgagggtgtgtatatgataagagtgccttgagttgagtcagtagctactgtatgtatagtttaaacccaaaggaaatggttctgatggtgacaatccgagttttaccatac

SEQ ID NO: 39817 - DNA, 554 bp, Zea mays
  Clone ID: MRT4577_136313C.1
acaaatgtaaagtcttagaaatccgtcttttgatcgatggtacgactatagacctttaacatattgtagattgcaatgaaagtttatttgtgtgttgaactgaactcaacatgctcgggctgcaaaccccttgagcaagtaaatgcatgttgcaaatgttaaaggtctatatgtttctatttcacttggtaaacttgatccgatattgtaatggaaattgaaggggacatctttaacagtagccgctttagagttatctttgaatgcattcactttgatgaaattaaaagcagaaaacagataatatctatgatcaaatatgacaatgcaacatttttttccagctgtttacttgttgtatgcatgattaattaatgttctacaacatgacagatgaaagatatgcttgatttgttcatttttcctgctctatgcctaaactttaaggattttaatgcatgacagatatcaagattcggaaatttgtctaaatatgacacctaagatgtcattgaaaatatttcctccatgttaagtatcatagacaataatcg

SEQ ID NO: 39818 - DNA, 260 bp, Zea mays
  Clone ID: MRT4577_136314C.1
acgcgtggaccgctcacctacaacctactagaaggcgaacacaaccgtacattcacttctcatcgcatccgtacgacacgcgcaggatcagtacagaccgaggcgcccgcggttcagcattccttccatgcaccgtacaagagacaatttgctggagtcttcgacacgatcagggttccgatggcccagcaatggatgatcctgccgttcctcgggccggtagaacctgcggtggctgctctggtcacgctcccggtgcc

SEQ ID NO: 39819 - DNA, 423 bp, Zea mays
  Clone ID: MRT4577_136315C.1
tcgccacagcgtcctctcacggatcgcactttcttcatgcgcagcgactgccgctagttgcggcccgtgagggcacaacgagcaccgtcggcttcgagcttggcgtgtgggcagaaaagcaacgccaccgctgacacttctatatgcgctgcttcttcaggaagccatgggtgatcgccgtgctttagtctctgcatctgatggcatgcgggcccgtcgagcgccgctacgagggtgagcaggcgtgccattgacactctgcgggcgagcctccactggcgggcgaactggctgccgccgctgcaccgatcgggcgagtggaagggagtgctagcgggagcagggccacatatttggtttcttcaaggaaactgttcttattgtcgtatgacttacaccaacagtaaatcgcagattcacttg

SEQ ID NO: 39820 - DNA, 1873 bp, Zea mays
  Clone ID: MRT4577_136316C.1
agccctaaatcttcttatattcaaaacccatggaaatatccagatccagttgctggaaacacatggcaaatcttttccgcatcagccttagaaatgcgctgatccctgacgtttactgatgtcaccaggtagtggccataagcccataggccattgtcgtgccacctactagacaccccaccagcttgggcctcgtgcagttctgcttcgtgggctgccccatcgccatcacgggcagccaatattggccgcggatttctgaaaatattctatgatttgaaaataagtataatttgtagaatttaggtcaccaacaaaatatcctgcttcaacggcaaaactctaactctagatatttaagtcacttgatgtccactggggtgtaggatatcctgcaaacagtcacttggttaccatctggctcgagtatatataacatctgattgaatgactgtgtattttgcatgcatagagtaacatatttctccgagctccaccaaaacaaaattttttttttgctattaggttgccgtcgatgatacggagtatgtaattatgtatggcttgaacgccttattccaaacttatatgtcaatcgggttaagaaaaccagacgatggcctgcatcttgacatgttgcaaacttgcgacaagctagcagagcactgtgtgagatcagtcaaaaaagcagtccctgtgcgagatcagacaaaaagcaactacgcaggcactgctcaaataccaacagtaatgaccctggcccgttccgtttttccagtacgtttccgtcgtacgtttcccttcagttcaccgacgatgatgtcccggacaaaggctcgtgcacgacgacgtcggtagagacgaagacggggctgtcgttcagcctcagcatgatggccctaaggatttctgtgagcgacttcttgaactccgcttcatccactgcctttccttcttcgacgcccgctgtcttgatcgactcttccacgacagcatccacctctttcacagcaccgtaatatggcaggcttgcagcatcggccatcttgtcaagcgcggctatgaggcaccccttggacgccttgttcttatcttctgctgccaaacctttccaaacagaatccagcagcttgtccaactcgaatttgttggccagcagcctcttgacgccactcccgtcatagtggttctcggtgtgcgcgacgatcacaggctgctcctggagtcgatcagcgacggcgcccagcagcttcttcagctgctggaacaggtcatcgcgggaggccggctgctgcccaggctgatcggcaggaagaagctgctgcaacgccggctccacgatgtgcttcgcgacccaggcatctgaagccgggggcactccgtggtcgacggacagcttctgtagagcggccaacacgcattggcgcggtgacgcgacttcggaaccgagatcgacgacctgcgagaaaacggcggcagctgtgggctcgtatctgctgccggcggcgaagtccctgaggtcctcgccgtgcatgcgcagtatcacgagggggtccctcttgagccccgccgccggcccgaggagtatgtccgacagggcctcctggaactcggccttgctcacctcgccctgggatgtcccatgagtcaactcgctcaccacctctgagcagacatggtcggcgttgggcgacgccccctccgcgggcaggccgagcgcggcgccgatgtctgccacggcggggcgcaggtcccccacggagagcatgccgtcgccgtcggcgtcgagctgccggaacttggtgtccacgagcatcccgaacgcctcccggtcctccaccagctcccggatctccgacccgtccaccaccac

SEQ ID NO: 39821 - DNA, 310 bp, Zea mays
  Clone ID: MRT4577_136317C.1
aggacaggctcactccgtctcaacacagaaaaactgtagtcgtcgcctacgatccggcctcctaagtaagaacgatcgaatcagaccctccgccgacatgaaggcgaatccccacaggcactgatgctcacaccggaagtgtcgcaatgcgaactttcactgcgtcgccgtcctctgttcgccacgtgctcatgtacgccgacctgtccacgctattctccgctctcaagaacaacgtgggttccttatagatcacgatggacgaatatcagcacggcgtacgcggcacctaccaaggtcgtgtgggtaa

SEQ ID NO: 39822 - DNA, 887 bp, Zea mays
  unsure (1)..(887): unsure at all n locations
  Clone ID: MRT4577_136318C.1
gcccgcttcgagccggccgggccgggnaagtctccctccccttccctccctccccccgccgccgccacccacaaaccctagaaaccctagcaccccctcgcccgaggcagccatggcggagcacgacctgacggcgagcgtggcggcgtggatggacccccacctggtgctcccggtgctggagttcctccaggagcgcggggtctacgccgacgaggagatcctgcggggcaagatccgcctcctcggcggcaccaacatggtcgactacgccatggacatccacaagtcgctccacggcaccgacgacgtccccgccgacatggtcgcccgccgctccgaggtcgtcgagaggctccgggccctccaggaggccgtcgcgcccatcgtcgccttcctctccagcccgcagctcgtgcaggagctccacgccgacaagcagtacaacctccacatgctccaggagcgccaccagatcggcccggaccagatcgaggccctctaccagtacgccaagttccagtacgagtgcgggatgtactcggacgccgccgatttcctgtcccagtaccgcgctctgtgcaccaacagcgagaggagcctcagcgccctgtgggggaagctggcggccgagatactgatgcagaactgggatgtcgcgcaggaggagctcaacaggctcaaggagatgattgactccagcagcttcacctcgtcgcctgtcaaccagctccacagcaagatttggctcatgcattggagcctcttcatcttcttcaaccatgagaatggaaggaacgggatcatcgacctcttcttccaggacaggtacctcaatgctatccagaccaacgctccccatcttctgaggtaccttgctgctgcag

SEQ ID NO: 39823 - DNA, 356 bp, Zea mays
  unsure (1)..(356): unsure at all n locations
  Clone ID: MRT4577_136319C.1
atcgaccgcacgcgtccgcatggcagcagcacaagcaagaaccacactttctcccttctcctgcgaacangncgnctgggtgccggggcaagttcaggtgcggctccagctgctcctgccgcagctgatgcatctgctgcggtatgtaccctgacgtgtagaccgacttccccaccttcgtcaagaccactgtcctcgctcagctgccgcctctattcaggatccaatctttcttacgcgtgcttgcaactttatattttttctatattcttacataaatttaatttattggccttcattttatatcctttttactggtaataccctatcgttattctgcttttatattcttttct

SEQ ID NO: 39824 - DNA, 683 bp, Zea mays
  unsure (1)..(683): unsure at all n locations
  Clone ID: MRT4577_13631C.1
aatttgttggagctgcacgcaaaagtcccgatgatgattgtttcagagtccatcaaagggtgatttagccagttatattgagatgaaaggtcggctgaagcctcacaaagctataagatttgctcttgacattgcgaggggactgaattatctccatgagtgcaagcctgagccaatcattcatggaaatttgtcgccaaagtaagctcattaagcattattccgtcgttgaattcgtgcaagacttttagatataagtggctacatgtatgctgtacgctatgatactttggtaaggttgcagaaacatcattcgggacgatgaaggacaacttaaggtggctggttttggatcactgagtttgagtaaagtttctgaagataaagtacaaatggctcagccagttacaaaatttgacaatgtatacatcgctcccgaggtctacaaaaacgaaccatttgacagaagtgtagatgtatttgcatttggtctcattctttatgagatgattgaaggagctcctgcttttcacccaaagccacaagaggaagcagctaagatgatttgcttagaggggctgagaccaccattcaagaataaaccgaaacactaccccagtgatgtngaaagagttgatacaagaatgnnctggatccgatgccttccgtcaggccaacattcg

SEQ ID NO: 39825 - DNA, 509 bp, Zea mays
  Clone ID: MRT4577_136320C.1
tttcttatttctgggaagccacaaacctcaaacaaaaaactttattattgaactgtactcataagaaatctaaaataggcaccgccaatgatgggttgttggtataacactgctgggtttgtcaaagcaagttggttgaatgggaacaattgttgcagttgtaagagggtgccagcgttaggcgcagcgtgctggtagaacggcaacaactgtggttgtgtcaagaaggcatcatggctcacaccagctagctggctaaatggtagtagttgttgctgctgtaaataagcacgagagttcaatgctgccagccgcatgaatggaagaaactgctgggggttggcagtaactatctggctcaatggcaactgctgcagttgcaaatattaaaccaacttactgcaactaacctcgctgaatggtacaaactgatgatgctgagagtatgccccatggtttgctagcacaagttgacgtagcagttgtgccctgatgttttgtgcacctgc

SEQ ID NO: 39826 - DNA, 1553 bp, Zea mays
  Clone ID: MRT4577_136322C.1
gcgcatatgccccaaagcgaaagcaaaacgttacccgttcgcttagcgcttcagcgtgcgcttaccgccgcttgttgaaccctgctcattctcaaaggtctatacagtttgcccagcaatcaatctagagtacctgtgttcaaccaaacccaccagcagcagcatgaagatggcccaaaatcaacctttataacggcttatatgttaggatctatgttttggagaaatttgcaatttcgccacctagagtgttgctctcttgctattatgccatgccacctgtgtctatgatctgtggacctgtctgtctatgatttgtggatccgatggcaaattagcgatgcccagcgttttgagtggaaaaattgcaaatgcctctatgttttgcttttcatcttgttattttttttcttttttatgacagtaaaacacctcatccccaaatgaagcacatattcaagattgctgcaatactggtagcaatctctgctatctggattgctctccttgaaacctccactgttcctcgaagttatacttggctgcttcccatctacttggtagtggctcttggatgctatggcctttttatggttggatttggacttatgttcttcccaacttgtcctcgagaagctgttctactgcatcaggttagctattttaatgtgaggctaaactgcagaaccctcgaaacttcttgagctgtatttgcagtacatctcatggatcatacagatcatgacaaagaaatcaatgccaaatgatattctttttttttgggggctgtttgagtatgatcataccctggtttattctcatttgtccgagattggcgtattatgcaggatattgtggaggcaaaggaattcttaggaaagaggggtgttgatgtgggctctgagtgagatcaattttaagtggttgacatacatgtctgttttgaaggatcaccattctgttccttggaataggttgcttttttgggtactgtagataggaaacatataattccactatgttcagctattactaacacggtttttgtgagttggcatgttatagttctgcttttgtcaatgatggggctcacattgacttgccggtgtttttcaagttttaaagactgaactgttctaggaatatttggtttctatcttgatttcccgtcagtggaccatttaccaaaaaaaaatttgcggccgcctccgggattgagaagaccgactggtacccttttaaaacagcgatggtgctattaatgctattgtcaacagtcctgctgttgtagctgcaagccaaggtaggtcgattggtggagttcgaaaacttcaatgaccagtggaacctacattttcgtgcacgccatcatcttgttagccctctccggcagtcttactcattgcaaacggggtgcacatcaccaaggactagccgaatagccccatagccgggaccgggatctttcttcgatacagtctgcctgtatatacatatatacatacatgctcagtacgtacgccaaaaaaaaaaaaaaaaaacccggggcccta

SEQ ID NO: 39827 - DNA, 126 bp, Zea mays
  unsure (1)..(126): unsure at all n locations
  Clone ID: MRT4577_136323C.1
acgatttctagganncngactcagaggcggggagtcataatgccggcacacgggggctctccaccactggcttctcaaccaagcgcgatgaccaattgtgtgaatcaacggttcctctcgtactag

SEQ ID NO: 39828 - DNA, 370 bp, Zea mays
  Clone ID: MRT4577_136324C.1
aaaaaaaaaggcaaagagctttttttgacaaccatgtttgtccttacagacccgacgacgatggaacatttaagaccctggtggggcttttgacatttttaaaacctttttttaacatatttggaggacccgtcctggtggtgaaaccaaactaaagttggggcaggtagaccccgatcgcagggacaagcctggtcgtcgcgcgtccataaaatcccacgatgcttttgccgatgggcgcggggatgcaaaaacgggggccgtttttgatgccccatggcccccaagctttggggggggtggggacaatcctgaacgagggaagggtagtcccacctttaaatgcgccgtacgttccaaaaacttcctt

SEQ ID NO: 39829 - DNA, 817 bp, Zea mays
  Clone ID: MRT4577_136325C.1
cgggaccccgcttccagttctgggcacgcagcccaaaccccccctcccctcccaaatcccatccagatttggccgccccaccgccgctgccccgccgccagatcggagcgcggccccggtccgatcccgctccgccctccccagggacatgggaatggaggtcgtcggagctgaagctgcaccagcacaggttaaagtagctgatgaggaagtgaccctttttcaagacaaggaaagccaagcaactgcaaaggagcgggaggaagcagctgtttttggttcagacaatggcaaagctgcggcaaatgacatggcacctccaaaggacgcagcggaggagtggcctgaacctaagcaaacttataccttctactttgtcaaggtccgctcatttgaggaccctaagctgagagcaaaactctagcaggctgagaaggacttccaaaataagatccaagctcgggccaggattattgatgctataaaagctaaaaagactgagcgtgctgctgttctcgcggagctaaggccattgagtgctgagaacaggcagtacaatgaagcttttaatgagaagttggaggagatgaaaccttacagaaaccgtttaggcaagttccgtgatgaaaataatgccatgcgggcggagagtgcaggcttgtgctcttcgctcgaagagcttgagcatgagatcaagagattgaatcaccgcataagtcatgagagcatatctttagatgaggagaaacggctgatcaaagaaattagacccttgaaaaaacagacccgaagtcagtttcaatgctgctaaacgagc

SEQ ID NO: 39830 - DNA, 485 bp, Zea mays
  Clone ID: MRT4577_136326C.1
cggaacccaaagggtttaagggggaaaggggccaaaaaacccccccttttaccagaaccaaaaaaaaaggggggggtaacaacaaggacaaattttttttaagcagggaaggacaaacagaaggggggacccccctggggcggacaaaaaaggatggaacccaacccgggggggagaaccatcagggctttccagggacaaaggttggttcaaaaagaggaccgttacaacagggaaaaccttgacaaagggaagaaaaaacaggggtctaggaaaaattccagagacttcctaggccatgggccataaaagcagggttactcaaagcctcaaacggataaattttctaaaaaaggaaaaaaaaaaacttttttcacccctttttttattttcaaggtccccaacaggggcgtttaggaaccccccccccactagcaactaagccccatttttttaccaggggatttttaaaggttctttacata

SEQ ID NO: 39831 - DNA, 519 bp, Zea mays
  Clone ID: MRT4577_136327C.1
cggcgccaaaggaggaggaggcgggggacgggctgtggcggaaggagatcatgatgggggagcggtgccagccgctggacttctccggggtcatctactacgacgcccaaggccgccgcctcgcgcaggcgccgccgccgcgctcgccgctgcgcagcccgctgccggcctccgtcaagctcgccgccaacgccgcgtactagctagggatgggactgggaggagtcctccgttttcttccctgctgctagtgctagctagtgacagtgtaaatggttttccttgccgcttgccgtctgcttctcctcctccttgacgttggtactacttacttgctattaataataggtttcccttgtcctttggcccccgtgtagcgaatttgcgattaaacgagggcatcccctacagtttcgagatgcttatgcttagcatgcatatgttggcccttcgccctcatcacaaacactgtggtgttttctcgtttcataggtggtcctacactcactgctatttaaa

SEQ ID NO: 39832 - DNA, 462 bp, Zea mays
  Clone ID: MRT4577_136328C.1
acaagccaccgaactttttttataattaattttaaaaaaccacccaaccctaatgggaaaaggggggaaaaaaagaaaaaaacactaatggggaaaaggggggccccgcggaaaaaacaaaaagaaggggaaccaccccccccacggagggccaaaaagaagggcccccggaaccccgcgggggggataaaatgaccaacctgggaacgggggggaaaccaacggggggccaaaaccaaggggggggggaaacggcgggggcccccaaacaaattttggggagccggggccataaaaaaagagcaaacttcataaagcggggaaacaaaagggacggggcacaaggactaaactctctggaaaagaagggccccccccggggttaaaaccccggaaggggaacccccccccttgttaaaaaaccccaaaagtctgagcccaaatgccataagggggcccccc

SEQ ID NO: 39833 - DNA, 255 bp, Zea mays
  Clone ID: MRT4577_136329C.1
ggaaaacgtccaagctacctggtgctacaatatttaagactcagctgacatacaaaaggcgacgcagacagacatttgaggattttccacaatcagcgctgaacatgatcgagatactacttgcaattaatccagcagatcggttaacagcgacttctgcattaagaagcgatttctttacacctgaaccttttgcatgtgaaccatcgagtcttccaaaatatcctccaagcaaagaaatagatgtgaaaagaa

SEQ ID NO: 39834 - DNA, 312 bp, Zea mays
  Clone ID: MRT4577_13632C.1
cggccgaatccgggccgacccacgcgtcgccacgctcgccacgcgtcgccactctccccaaggaggtgcgacagaggaacgaaacctccgcgacgaagccgcggagtcagactgacctaccggccacttgcggctaagggcttaaggacctgctccgggatgcgccggctctcggatgcatacctggctctgggttccgtcatcttacgacacgctggatgggcgggagattacacggaccccaggggcaacgccaatctggcgtaacgaaggtcgagtcggcgttcgctgtactaactggtattctaggtc

SEQ ID NO: 39835 - DNA, 257 bp, Zea mays
  Clone ID: MRT4577_136330C.1
ctgtctgttccttatccctactgtttttatcatggtggttactgttgttcatcttattttttggctgagtcttagcttcggaaaaaaggaggggccgagaaaaaaatttaggccaaagccaaaaaatctttatgcccccataaaatagggggggatggcggcgccaaagacccagggtgagaagggggggggcccccccgagtttaaaaataagccaaaatgccctaccccccatataaacggttaagggggagaag

SEQ ID NO: 39836 - DNA, 741 bp, Zea mays
  unsure (1)..(741): unsure at all n locations
  Clone ID: MRT4577_136331C.1
ggttactcgcaacagaaaccatgaagagtaccatatgtagctctgaacaccaaaacaaagatatgtgtggcatgttgcctttaaaaggtctaaacaacatacaagacaatttcaacataaagaagatgtgaaacatgtaatccttcaatttcactttgtcacagagggcgacaaggagataatggcccccatcaccatgtggcacaattctaaactcgctggcaatgcgcaacctatcatcatccggaagtggggcgctttcaagggacggtgactccgggtcgcctttgtcgtacaaacttgccgaccaagatgatgaaatccacaagctgattaagtgcatagaaactttgatcttgcaaaagaatccgaacattttccaatcactcatcatgtttattcaattgttgtggtcaaagtctcaacatctggaggcaactcctcccctttttcttcctcatccttcacctccatagaaatgatgcaatgcgaatatatgtgtatccattgctttgacacaaaccaatcacaagattcgtcatgatctgcaacattgaatggcatgggtgggatctagcacagggaattgnnggcttnncttcttaaaaaaacctgacgagccttaggtttagcatcgtgcangagccgagctaagaatcatcaatcttggagtggatgttaaattaaaaacaaacacacacatgataacaaaaccagcaccaaaatactgtccacaaacaa

SEQ ID NO: 39837 - DNA, 263 bp, Zea mays
  Clone ID: MRT4577_136332C.1
gtattatattgttccgatttttttattaggggtacggtgtctcattgacctgtcatatttgagccattaatgcttaacctcctccttggttcacctaacttgaccccccacccccccccccctttttgtccccaaaaacccccttcccccccccagggggacccccccggggggggggggggcgccccccccaaaaggggggcgggccccccccccccccccccccccccgcgggtggggccaccccgccgaagcttcccccc

SEQ ID NO: 39838 - DNA, 124 bp, Zea mays
  Clone ID: MRT4577_136333C.1
ttggccacattttatatggagggtacggttgatttaaaatagcggcgggggcactcgagacagacagaacatttgcactttatcaaacgggaaggacgctgatgtcgaggattataggattcgg

SEQ ID NO: 39839 - DNA, 1553 bp, Zea mays
  Clone ID: MRT4577_136334C.1
aattcggcacgaggaccgcgcccgcaacccccccgatctccgtcgtctcccccctctggcgtgtgttaaaccgacgtgacggctgtcatccgcgtgcggcaaccgtgctcatacatactgtgtcgcccccacccccctcgccgcatgatgcccgcaacgtccgtggccgtcgcgcccgcccctccccccacctcgagagcggcacccggcaaccaccccactgtcaagatcaccgtgtccatataaggatggatcccctcacccgagaaccactcacgtcgagactaacgcatcccaagccagataaggatggatcccctcacatctccgattatttcgccgtccaaacacatgatttcctggttcaccctcctcccctttggcgtcctccagatcttgccttcgcccgcatcgacgtaggcgacgggggcatgacaggtcggttggtggagcggggctagaggccatcgatggtggttgtggcgacgtgctgctgggaagacgaggcaactctctcctccagcacaccctgtggtggagacttgccatacatatgacgcagctgaagctgcagagggcgcgcctgtgccgacgacggaagcaaagaagctggcgtcctctgtcacgaggtccaagcaggagatcacagaggacttctcgtcgattggcgggacatggcccccacggccgcccaagaagagaccaggtgcaacgacaactcaatatcacaaagaagatccgaaaggcgagaggatttcatttcccggatcgacttacttctaccctccggttgtttgtggacagtattttggtgctggttttgttatcatgtgttgtgtttgttttattttaacatcactccagatttgatgaatcttagctcggcttctgcacgatgctaaccctaggctcgtcaggtttttttaagaaggaagccccaattcctgtgctagatccaccatgccattcaatgttgcagatcatgacgaatcttgtgattggaggtgaaggatgaggaagaaaaaggggaggagttgcctccagatgttgagactttgaccacaacaattgaataaacatgatgagtgattggaaaatgttcggattcttttgcaagatcaaagtttctatgcacttaatcagcttgtggatttcatcatcttggtcggcaagtttgtacgacaaaggcgacccggagtcaccgtcccttgaaagcgccccacttccggatgatgataggttgcgcattgccagcgagtttagaattgtgccacatggtgatgggggccattatctccttgtcgccctctgtgacaaagtgaaattgaaggattacatgtttcacatcttctttatgttgaaattgtcttgtatgttgtttagaccttttaaaggcaacatgccacacatatctttgttttggtgttcagagctacatatggtactcttcatggtttctgttgcgagtaacagggatatcaggtttttgtacttacctatatggtcatatctgaacctataaactgttgttaggataaaaaaaaaaaaaaaaa

SEQ ID NO: 39840 - DNA, 1309 bp, Zea mays
  Clone ID: MRT4577_136335C.1
cccacgcgtccgcccacgcgtccgcgcatcccaagccagataaggatggatcccctcacatctccgattatttcgccgtgcaaacacacgatttcctggttcaccctcctcccctttggcttcctccagatcttgcctttgcccgcatcgacgtgtgctgcagcgtaggcgacgggggcatgacaggtcggttggtggagcggggctagaggccatcgatggtggttgtggcgacgtgctgctgggaagacgaggcaactctctcctccagcacaccctgtggtggagacttgccatacatatgacgcagctgaagctgcagagggcgcgcctgtgccgacgacggaagcaaagaagctggcgtcctctgtcacgaggtccaagcaggagatcacagaggacttctcgtcgattggcgggacatggcccccacggccgcccaagaagagaccagatcacaaagaagatccgaaaggcgagaggatttcatttcccggatcgacttacttctaccctccggttgtttgtggacagtattttggtgctggttttgttatcatgtgttgtgtttgttttattttaacatcactccagatttgatgaatcttagctcggcttctgcacgatgctaaccctaggctcgtcaggtttttttaagaaggaagccccaattcctgtgctagatccaccatgccattcaatgttgcagatcatgacgaatcttgtgattggtttgtgtcaaagcaatggatacacatatattcgcattgcatcatttctatggtttgttgtctcatttgatcgattgacgacagtgattatacattaccagttcttttgatgtatcctatgatggaaagggaaaattaatggttgaatttcttaatatgagtaggaggtgaaggatgaggaagaaaaaggggaggagttgcctccagatgttgagactttgaccacaacaattgaataaacatgatgagtgattggaaaatgttcggattcttttgcaagatcaaagtttctatgcacttaatcagcttgtggatttcatcatcttggtcggcaagtttgtacgacaaaggcgacccggagtcaccgtcccttgaaagcgccccacttccggatgatgataggttgcgcattgccagcgagtttagaattgtgccacatggtgatgggggccattatctccttgtcgccctctgtgacaaagtgaaattgaaggattacatgtttcacatcttctttatgttgaaattgtcttgtatgttgtttagaccttttaaaggcaacatgccacacatatctt

SEQ ID NO: 39841 - DNA, 1027 bp, Zea mays
  Clone ID: MRT4577_136336C.1
agccggcgggcgggttaaaaacctcgccttttgtactcttgcgtctctgccctcgcgttatcgccttcgtcacgctcgctcgcctggctggcttgtgccttgccttgctcggcgtacgcgaacgcagcgagagggaggagcaaggaaatagagagagacagagagagagagagaaaaaatcaagtcatccccctttcctctgagctcgttccatggagaactcttctcacaagcgggcgcgggaggcgggcgacctcgtcgccggcggctgcggagaggagggctcgccgcaggccgacgccaagaggctgcggccgcaggacctgctcgacatgctggaggacgacaccgacgcggccgcggccggcgacctagcgtcggtcatgcggagcctggaggaggagatagccagcttcgacgaggccgcggaggcgccggcgccggcgccggagctgggcttcctgctcgaggcctcggacgacgagctggggctgccgcccgcctcctcttcggaggaggaggaggccgggcgcgcgggggcgccgttcccgcccgcgctcgacggccagatctggggcttcgaggacgagatcgtggacggaggcggcttcggcggctactcgccggaggctgcggccgcggccgccgcgggaccgccgtggctgtcggacgacggcttcggcgccggcctcttcgcgttcggcggcgacgacgcgtgtggcccgtcggatctcgcggccctgcgccacgagaccatgcccgccgtctgatgacgatccccccgggcccaggcagccgcagccagtcgattagccttccttttttttatttttattatttttacctttgttggctaaccttagcgagcgggcacccatttttttgacctggatgtaaagtttttagaagggtaaaaaaacagggggcgtggaaaaaacttgggaggaaggttcagagcaaggggagaagaagaaaaaaatctggagatggattcttccttttaaaaaaaaaaaaaaaatttgcggcc

SEQ ID NO: 39842 - DNA, 557 bp, Zea mays
  unsure (1)..(557): unsure at all n locations
  Clone ID: MRT4577_136337C.1
cacgnncgtccgnactaccccttatcgcttcacatttatcaccgcattgtaactaggaaggcgactccgaaggcgcagcccggagcgccacggatcgagcgacggctggggcccctgctacggccgctgctctggagcaggtaatcaaccacatgatgttcaacgggttgaatctccgcttccatcaccagagcgccacaccttagctgcaccatgactttctccatgtacctgtccatgtacctggcgtccaaccttgccgtgctgctctggctgttggacttgatctgcaccgtcaagaattccatcataaattccatcacccagcgcgccgccgatggccacggcattgccctcggggtacctgtcacctccccacgcaccttaaatattgaatgaaagttagacagatatgattacagtgatgatgccggtgtttattccaatgccacatatgatgacaggaaaaactggcgcatgtattactacatggataacgaacttgcaaaagatctaagcgataactttggacatctcttcacgcaacaggcatcaat

SEQ ID NO: 39843 - DNA, 180 bp, Zea mays
  Clone ID: MRT4577_136338C.1
cggacgatacatcatgatagaacggacattagtgtaccaacacagccagcaaaatattcagcttctaatgctcaacgactcatgaagcagggtcgataccgaaactactttactagactgctgaactaatcgaactgacactattgatcgaggatacctttcacctaccttttcaagaac

SEQ ID NO: 39844 - DNA, 236 bp, Zea mays
  Clone ID: MRT4577_136339C.1
gacagcctccggccacaccgatttgcgaagcaagggacgggagaggaacccgaagaaggcgaaactgatctaccgcaactggtcgctgctctcagacacagtcctcatttggggcggcgtagccaccgccggcctctccagtatcccctcattagagcgggaaagagaaattcaaaggttatctgtgccgataaagctataagcttaagcagcaagacagacccactatgggccaa

SEQ ID NO: 39845 - DNA, 1585 bp, Zea mays
  unsure (1)..(1585): unsure at all n locations
  Clone ID: MRT4577_13633C.1
ngttgaatctggatccctcctccacctccacgcgagcggacgacacgaagcggccatagccgcacgttgggatcccctccgctacgcctcttgatggtctccgccagcgcgccgccgccgcaggcccagtccgacgcggccgggtcgggggaggaagtgagcaagaaggtgcggaagccgtacacaatcaccaagtcccgggagagctggacggagcaggagcacgacaagttcctcgaggccctgcagctctttgatcgtgactggaagaagatagaggcttttgttggctccaagactgtcatccagattaggagccatgcacagaagtaccttttgaaggttcagaaaaatggaaccagcgaacatgtcccacctccacgaccaaagcgaaaagctgcccatccatatcctcagaaggcttccaagaatgattcatcttccatccataggaactctggcatgaacgtgcctgtttcttcatgggctcatagttccatcccacaagctgttgcttcatcaatggtgaaagaagatttaggtgctggaacaccaggttcaaacaatttttgctcaagtagtactgaaggccttccaagaacttggcaacctggtgaaacaaatgatccaataaatcaaattccgtcactccgccgtctgtacctcatgatatttctgatatcatcttgtagtgcaaaatacttactccgattctgtccatctctactatttatgccagattttgcgggagtgtacagcttcttaggtagtgttttcgatccaagtcggggtacaagtggtcatctgcagaaacttaaggagatgaatccaattgacgttgagacggcactgttgttgatgaggaatctctccatcaatttaaccagtcctgattttgaagatcaagtcttgccaattcgtgatgccagtactcagcagagcaggcctgaagtccgaaccactatcttatagcatagactcttatctcctgacacccacaaagggatgaaagtgaggaagttgttgtccttatacagcgcttctgatggacctgggctagggagctcaagaagttcagctctagcgacgagcgcgcctttcatgtaaggaagcgtgcacccttcctggcctttcctatccccaagctcggccatctaggctcgtgaaatgctgcttcagatcaaggctgtccttggaaatgggaagatgaaaggagaatctgggtaatgccggttgctccctttcccattctttgttgagttcagctttctgattggtttctggtggccctcttgatacggaacttgtgcgctccgtctgagaaagcatgtgtgcaaagtttcatttgaggagttgaggcgatcatggcgctgtaaaatgcggcttatcttcccccttcaggggctggtttggtggaccaaccctcaaacatttgcaattcctatgtacgtctgtagtgcatcaggtgttgttgcccacgtgtaaaaggaaaataaattcacaatgtanagggagacttgtgcgttagcactaccatttgaatttatngaatgtcnaagcagccccagcgagtttgtacttgcng

SEQ ID NO: 39846 - DNA, 610 bp, Zea mays
  Clone ID: MRT4577_136340C.1
gccgacaattttaacaaagatttcattcctttcttgtttacatggcatcttagaaatacaaatatgatacctacccactgagaaccaatgagaatagcctaagggtcttgtggattttgaaaaggttgttgtgagttgtggattgtggaaaacaagggcggactcatggcctagcgagcgtgggcacttgcccaggctcatccattagtgcaaatagacttatatatgtgtaccaagcaataaaatgcaactaaacaaaggcaaaaactgggcaagacgatatctttatagtatgagtattatattttcttaggcttttgaagatttctgggtcttccactggtggaaaagtagtcgtgggttatggaatgtgcgaaagttaagaatcgtttggttcaatagttgtggcttctaaaaaactgccgttagcctcgctcagtgacaagtggaccctgtctgtcttgtcttcttcctccggatagatccttgaccaaagtcgtgctttctcgcgatggtggacccaagctcgcttgctatggcagaagtcatgctcgcccttggcgaccaaccgaagtggtgggagcgctagacaaggagcttggttgcatga

SEQ ID NO: 39847 - DNA, 230 bp, Zea mays
  unsure (1)..(230): unsure at all n locations
  Clone ID: MRT4577_136341C.1
gatctgtatggtgattgtaagatcgataattaggttcagtgagcgcgatngactcgattgtttgactggctcgaatttcgataatttgcataagcctgacgtaatacccgcctaccttccgcgctgaatacgcggcgaaaaaaagggaaacacacacgagtaccccccgcaccccccggttagccgcagtcgccatcattatgcaaatagcatgtaaagctgcctgtacc

SEQ ID NO: 39848 - DNA, 471 bp, Zea mays
  Clone ID: MRT4577_136342C.1
aaaacttccaattctaactccacattttatttcggtggccacgccaagataacgaacggacacagccggccatacgggccccaagtgaccacacaccatacccagccacaccgtctggccagaaggcgcttgtccggccaaagcgatttggcctcccattctgcggcggaaaacacttggggcataggggaactgcctcggtgaacactgggggacccaaaggaaaaccctaacagctaaccagctgctttgcagcaaaaaacagacggagccggaactcttgaggggaacatgcctgacaagttccacatgctgccttgtttggggaccaatttcccaagaccgtgattaggcccagccattgccaacttggagcggcgctcggggctagctaaggatcatcgacagggcggcaaaccgaaccgggcttagggactccgtagaaaagcccaggtttctctgaaagaagga

SEQ ID NO: 39849 - DNA, 585 bp, Zea mays
  Clone ID: MRT4577_136343C.1
tgagacttgccgtctttatagataagatagaagaaagggcttacaagagaggataggttagggacacctgcacgcacaggcgcacacgcacactgcacacactaacaactaaaacaaaaactacagattacagcacaataaagaacagactctatcctacctccctaagagcatcagctaggcccaagtattgaaaatttttggagttaagtttttaaaactgtgaaagtagtgcaatatagtcaaaactgcagttttgaaaacatatcttttgaagagtctaccaaaaactgtattagaaaaaaggttttttaagctggtgttctaggttttgctggtgtcctcacttttacagttagtcgtgttttttctctcaattttacccttctcaaatactacagtattatctaaaaaacagagaaaatactccacttctaaaaaggcctttactgactagctgaagactctaatcgactgtccgccccgcagccagttgcgggcctaggattttagtgctgggtattccaaccgcagggttcaaaaaagcggcagtgtgcgctaaacgagcatgaggcgataggcggt

SEQ ID NO: 39850 - DNA, 454 bp, Zea mays
  Clone ID: MRT4577_136344C.1
tcgagtttttttttttttttttttttttttttttttttttttttttttttttttttttttttttaaaaaaaacaaaaccttaaaagaaaggggttaaccccaaggggattttttttccaaaaaatttgggattttaaaaaacaagaggcggaccctaaagcaaagctttttggccgggaaacaaaaaaaaaacagatcccccattttggggatatggggcccaagtttttttaagtttgggggctggtttttaaaaaaatggcccgggaaaaaccctttcaaaatcaacataaccccttattggcccgaacacccaaacgggccaagggggttcggaatcccaaatttaacccctttggccaagtttaaggggggggggggggggaataaaatttttttgccacaaatgggggggcttcagctcaatggggaccaaaaccatcatacccggggg

SEQ ID NO: 39851 - DNA, 357 bp, Zea mays
  Clone ID: MRT4577_136345C.1
aaggtatacacagggtccccttattacatggtttctggaaaacaagttgatgggtacaaaagtttcagatcttagccacattccaagatcttatgccttttcatccaagatcagagacggggactacaaaccttggtttttttttttctttcccatccacacccattttttacctagttaacctgccatgcgttcatgttcttgggggaagcaaaaagtttcataatttaaaagacaagtttcaggttcttttaaagatgggtgaaaagtttttttaaaatccggccattctttttgcaagcccagatttgggtatgtggtttatgtggggcccctgggagcctataaacctatttt

SEQ ID NO: 39852 - DNA, 294 bp, Zea mays
  Clone ID: MRT4577_136346C.1
tccattctcgtgttcttggagtggtccatcgatcgagctccgtgagagagagagagagagagagagagagagagagagggagagagagagagcaagctatggcgacagcaggtaacgtgatcaagtgcatactcgccctgctcctcctcgccgtaactcatctgcatttctctgtcgtctacctccgctctcctcctattcactcctacgtcctctccctttattggctccctctactcaacctaccgctccatacacctgcgcttcccttccccctggaacattttttttttt

SEQ ID NO: 39853 - DNA, 1163 bp, Zea mays
  unsure (1)..(1163): unsure at all n locations
  Clone ID: MRT4577_136347C.1
agcaaaggtcccgcttcagagatcggaatcgaacacctgccgctcttcagtttgttgacgcaactcctctcctatcttctatctccctcgctccctcctcggcgtcgcgttggcaccgagccctcccgccatggcaaggccgctgcaggaagcgatcgataccttcatcagcatcacgggggcggacgaggccgtcgccgtacgcaagctcgaggaacatggtggtgaccttaatcgagcaataaattcgcatttcaatgatggagacagcatattgaatgggatcagtcaaaacaccatgcccactagtcatgatgatatgatggacctggatggaccccttgataatacatttcaaagatctttgttcccagagaattttcgtgacccttttgctctaatggatccaaattttcagcaccaattttttgacagggttggctccactgatggtgtcactcgtggaccgctagtttcacaccctagagaggtgagggagattcctatagaagttaaggatagtgatcctcaaacaagtccatctggccaggcccctgttattgaggatgttactggacatgagtcttcaaatggccttgaagttcatgaaactatcataattgatgatgaggacagcggattgttatctgcgccatctgctccacatgctagtgttcctagcaatacatcttctgagcccactgctcctccactggttcatgttaatgactatgatgatgacatagaagaggaaatgattagggcagcaattgaagcttcaaagaaggattctgaaggactggcaaatatagcagagcaaggagaccagcatcaagagggagtgaatttgggggaacattcttctgataaagcagtcatgagaaccacagatggaatagttgagaggcaagtactagcttcaggaaaggctggaacatctaggcaaccaatagatgaagagagcttccaagaggagactgaagatgtagaagaacaaccgctagttagacngtcgttctcggcgtgccccctctgagacaccgagctagcacaaatgccgcacccaggagctagccctgttctgaacatcccagtctagtggaggtgattccatctgagtgggtggcattcttctgagacatgatgagctgttatgcttgagt

SEQ ID NO: 39854 - DNA, 268 bp, Zea mays
  Clone ID: MRT4577_136348C.1
gaattcaccgggtacgagcccagcgcgtcacgcgaaaaagtcccgcttcgagccttccactcgtctcctctccgctttccccgtgccggcggtgccgtggtacgggccgaaccatgaacgcccggcttgctcagtctaatgcgcgcccggatcctcgcgcccgctggccgacagccccggccccagcgtcgtcgtcgtcgcctactcccaacttctcgcgtcgtcacggagcaacaaacgcaggatagcaccaggcctcgcgctcgcc

SEQ ID NO: 39855 - DNA, 953 bp, Zea mays
  Clone ID: MRT4577_136349C.1
ttttccagtgacccaccccgtactgatcttccaaaggtatcaatgccaaaagtgccatctcgagacatgattaaggcacaagcaggaggggttgtggcacctcgcacggtaaagatcccgtggcgaaggataatattcagcctacctgtttgggcaatagttgtgaacaacttcacgttccactatgccctctatgttcttatgaactggctccctacctattttgagctaggccttaagcttagcctccaggatatgggttcctcaaagatgcttccctatttcaacatgttcattttctccaatatcggcggtgtggttgctgatcacttgattacaaggaggattctatctgttaccaagacaaggaagcttctgaacaccatcgggttcatcgtctcagcgtttgcactcatggcccttcctttgttcagcacaccgtcaggcactgtaatgtgttcagcgatatccctcggttttcttgctctaggaagagcagggtttgccgtgaaccatatggatgttgctccgaagtttgcagggatagtgatgggagtctcaaacacggcggggacactggccggaatcgtcggtgtcggcctcacgggcaatattctggaggcggcaaaggcttctaacaaggatctaacggactcggaaacctggaaaacagtcttcttcgttccagcatacctttgtattttcagttccgtcatttttttgatcttttcgacaggcgaaaagatcttcgaataaagggtggctattactttttttgccaattcttttcttacttacggtgaggcaggattgtgaaacgggaatcttacatgtatctgtagcatttgttacaaaattttcagattttagactgcatcacatacactcgatcagaggctatgtcaggagatcttgcattttagttatgatgaagactcggtacattggcagtc

SEQ ID NO: 39856 - DNA, 1667 bp, Zea mays
  Clone ID: MRT4577_13634C.1
ctccacgcgagcggacgacacgaagcggccatagccgcacgttgggatcccctccgctacgcctctcgatggtctccgccagcgcgccgccgccgcaggcccagtccgacgcggccgggtcgggggaggaagtgagcaagaaggtgcggaagccgtacacaatcaccaagtcccgggagagctggacggagcaggagcacgacaagttcctcgaggccctgcagctctttgatcgtgactggaagaagatagaggcttttgttggctccaagactgtcatccagattcatcttccatccataggaactctggcatgaacgtgcctgtttcttcatgggctcatagttccatcccacaagctgttgcttcatcaatggtgaaagatttaggtgctggaacaccaggttcaaacaatttttgctcaagtagtactgaaggccttccaagaacttggcaacctggtgaaacaaatgatccaataaatcaaattccgtcactccgccttatgccagattttgcgggagtgacagcttcttaggtagtgttttcgatccaagtacaagtggtcatctgcagaaacttaaggagatgaatccaattgacgttgagacggcactgttgttgatgaggaatctctccatcaatttaaccagtcctgattttgaagatcaacgcttctgatggacctgggctagggagctcaagaagttcagctctagcgacgagcgcgcctttcatgtaaggaagcgtgcacccttcctggcctttcctatccccaaaagctcggccatctaggctcgtgaaatgctgcttcagatcaaggctgtccttggaaatgggaagatgaaaggagaatctgggtaatgccggttgctccctttcccattctttgttgagttcagctttctgattggtttctggtggccctcttgatacggaacttgtgcgctccgtctgagaaagcatgtgtgcaaagtttcatttgaggagttgaggcgatcatggcgctgtaaaatgcggcttatcttcccccttcagggctggtttggtggaccaaccctcaaacatttgcaattcctatgtacgtctgtagtgcgtcaggtgttgttgcccacgtgtaaaaggaaaataaattcacaatgtaaaggagacttgtgcgttagcactaccatttgaatttatgaaatgtcaaagcagcctagcgagtttgtacttgccaaaaaaaaaaaaaaaaaaaaaaaaaaaaaaaaaaaaaaaaaaaaaaaaaaaaaaaaaaaaaaaaaaaaaaaaaaaaaaaaaaaaaaaaaaaaaaaaaaaaaaaaaaaaaaaaaaaaaaaaaaaaaaaaaaaaaaaaaaaaaaaaaaagggggggcttctttttaagggacccgggataaaacacccttgtggggggaaaaaacttttttttacggggcaaaattttttaatatgcggggtcggtaaaaacaaagggggcgaccgaaaaaaaaggcttgggaaaaaaaactaaatttcccaagtgggaaaaacccctttaaagaagtgggaagcattatggatgggggcattacgccctcctttaccgataaattcgccccctttatagcgaaaacaaaccccccttttagggccctataaatccgcatggggggggttttttcgcgaaa

SEQ ID NO: 39857 - DNA, 1434 bp, Zea mays
  Clone ID: MRT4577_136350C.1
aaccgaacaaacacagattttatactaaaatagagttagaaattgtgattgaacaaatagagagttcaatacgtaaatctgcagaaaataaaataaacaaaataagaaagacgctcgtggcctattttggccgagtcagcccatgtaggcgaggtggcccatcgattacaagtcaaggtggtttagggattttaatcgccttcctttccgtctagcgccgccgccaccaggaaactgcttgcccgtcgagtacgcctgcgcacgcaggagccgtttcttccgggctaggcctcgccagggggcgccggcctgcgcctttgctagcctgcaccgaggctgggccgcccgcccgcgaggctgcggggtgctcgcgcgaggctggggctgccggggccggcacgcccactaggctgtggcttgcctgcgcgcccgcgaggctgtgtgggtggcctgcctgcgcgcccgtgtggccgcggctacccacgtcggaggcgcgcatccggctctcacctgcgctggagcgtgcctgcacgcgtcgtggctcccgtgccgaaacgctgtcatggccggggctacgcctggccggagtgctagccgagcccgcgctagtgcccgtagccaaccaaagtcacgccatccgagagcgcctccgcgtcgtgcgcctgaccggatccgccaaggactgcgcgctagtgtcgtgcccgcggccaggtcgcgttgccgcgcccgcgtcgagccaggttcggccgcgtcgggtctccgcgctcaggaggccgagcgcccctgcccgccagggcttccaagcgcctgcacgccgccagggcgcggatccagcccacgtcaagccgctcccagcgcttgcgcgctgccagggcggagcggatccgaccgtgctgaggacccacgctgggggtcgcgctcgcggccagcagcccgcggccggtcgggcatcccgctgtccttgcgcgcgctaggtcgccgaggcccacgctgccatggcctggggccgccgtggccggcgtccgcgccgctggagacgcacgcacgtggccgacgctctagtgccgaccgtccagggccgcatccgcgcgccgccaggccggggccgcgatgcgcctgcgccagagtgcgcctcgccggtgctgcacccgtgcctgcggtacgccaaggccgcctcttcccttggctctccaaagtggcgaaaagtaggttgtacgagtgtatggtgaagacgatggagatctcaccttgtcttcccctctcgaatcctacatgaacactcgatgtccagcagcagcagtgtcccgatgccgagcgtcatcaccgtagaggagaaccgccagcgcgccatcgccgctaacaccaaccgctcggtggagagagactcgtgctgatcctcgtgccgaatttactcagtgataatcagattgagag

SEQ ID NO: 39858 - DNA, 1588 bp, Zea mays
  Clone ID: MRT4577_136351C.1
cctgccgggcaccgcgcgcgccccgcctccccaccggtctcgcagtccctcggccgctcgtcccgggagagcagtcgcagcacgatggtgaccaacgtggtggacctccggtcggacacggtcaccaagccgtccgacgccatgcgcgccgccatggccgcggccgacgtcgacgacgacgttctgggcgcggaccccaccgcacgccggaagaccctaggtggtggaatcgaggaggagagggcggcgctcatgggcaaggaggccgcgctcttcgtcccgtcggggaccatggccaacgtccactccaaggctaaagcctgcgacatacgggacagaataaaatcgcacagttccgactcgcacatccacctctacgagaacggcggcatctccaccctcggcggcgtgcaccctaagaccgtcagaaacaactccgacggcaccatggacatcgacagcatcgtcgctgcaatcaggcctcccggcgggggcctgtattatccgaccaccaggctcatctgcttggagaacacacatgggaattccggagggaagtgtttatccgcagaatacactgaaaaggttggcgaaattgccaagagtcatggcctgaagcttcatatcgatggagctcgcattttcaacgcctctgtggcacttggagttcctgtggacagacttgtgagagctgcagattcagtttcggtatgcatttctaaaggtttaggcgcccccgttggatcagttattgttggctcgaaggccttcatcgacaaggccaaaattctccggaagaccctaggtggtggaatgaggcaggttggagttctctgtgctgctgctcatgttgccgttcgtgacaatgtgggaaagcttgcagatgaccacagaaaggctaaagctttggcagacggactgaataaaatcgaacagttcagagtggattcagcatcagtccagaccaatatggtattcttggacatcgtggattcacgcatatcatctaacaagctgtgccaggttctgggaacgcacaatgtgctcgcaagtccaaggagtccaaaaagtgtcaggcttgtccttcattaccaaatttcggatgatgatgttcaatatgcactgacgtgttttaagaaagctgctgaacagctactaatgggcagtactgaactcgagcatttggctgaacagctactgatgggcactaccaagaactcgtacgggcaatagggcaccctgatgcacataagctcggtgtggtcttatctgtaatcagctcgaaatattgtagccgcaccaaacctttgctgaacaactgttgcttctcacttgtttcttggatgtgttcgttcctgtgctttgacttgtttggtttagcttttctctgaccggtttttctgagaatctggttgtgcgaagaatcctgctatagagagaatctagtatcatggagattacgagtggaggaagatgaaggtgtccatagggttcaggatctagaaagtgatgaatttctactattgcaaagactcggctgattatgtgtttatgtcaaaaaaaaaaaaaaaaaaaaactcgagcccgg

SEQ ID NO: 39859 - DNA, 288 bp, Zea mays
  unsure (1)..(288): unsure at all n locations
  Clone ID: MRT4577_136352C.1
tgtagatcgtgagcgggcggcctttttttttttatttcggggaactacaatatcaccncggggggtatcaggagggcgagtttgctttcacggacttaaagcccttcggttaagcacacaccaactttatcgcacgcaatcagttaacaataagagctatgcagtgaggattacacacccagacctagtaaaaggatatgggccactccatcgtagccatgaacggtcggtactttgtaggacgtcttatcttcgtggtgcctgtaccagccggcggcggacatggac

SEQ ID NO: 39860 - DNA, 378 bp, Zea mays
  Clone ID: MRT4577_136353C.1
tgcctctcgagccttgatgcatttctccccttggtttaccatgtccttgggttatttacagatgctacaagggtcctgaactacttgtggatttgttagattatgattactcattggatttgtggagtcttggttgcatgttcgcagcaatggtaagtggaaagaccatgatcaattagttatcttggctaatagacctatgttgatgtgctatatggtattgacagatattccgagtggaccctttctttagtggccaggataattatgatcaattagtgaaaatagctgaggtatgtttgaagctgctctgtgttgaaacgtcctgtcatcgagttttcctatgtcacttaatctagtgctctaaatggcataatg

SEQ ID NO: 39861 - DNA, 423 bp, Zea mays
  Clone ID: MRT4577_136354C.1
ctgggaacgcacaatgtgctcgcaagtccaaggagtccaaaaagtgtcaggcttgtccttcattaccaaatttcagaagatgatgttcaatatgcactgacgtgttttaagaaagctgctgaacagctactaatgggcagtactgaactcgagcatttggctgaacagctactgatgggcactaccaagaactcgtacgggtaataggacaccctgagagctgatttggtgattagggatccctaggggatccatggggaggaatccccttgcaattcgattttgaatagcaagatgatttcttcccctcgagatccccggtcaccaaatcagccctgatgcataagctcggtggtcttgtctgtaatcagctcgaaatattgtagccgcaccaaacctttgctgaataactgttgcttctcc

SEQ ID NO: 39862 - DNA, 334 bp, Zea mays
  Clone ID: MRT4577_136355C.1
ctcgcggcggcgcccccgcaccgcagacagcccagttcactcttcagggcgccgcctgcgcctctcgttctctatataaaacaccgccgccccgcgtccgcgaaggccaccgcgcgcgccccgcctccccaccggtctcgcagtccctcggccgctcgtcccggcagagcagtcgcagcacgatggtgaccaacgtggtggacctccggggggacacggtcaccaagccgtccgacgccatgcgcgccgccatggccgcggccgacgtcgacgacgacgttctgggcgcggtccccaccgcgcgccgtttcttggtggttatggccgccctcct

SEQ ID NO: 39863 - DNA, 711 bp, Zea mays
  Clone ID: MRT4577_136357C.1
atttctcacgtacacgaacccaaacctagcaacctaacggcgaagctctcgagctctcggcggccatggagatcggcgacgacgactgccctcccctcgctgtcgagctcccgccgcagacggcctctcctccgtttcccgcttcctcctccgcctccgcctccgcgccggtcggcgtcaccgtcatcaccggctacctcggcgccggcaagtccacgttagtcaactacattttgagtggacaacatgggaaaagaatagcagtaatactgaatgagttcggagaggaaattggagtagaaagagcaatgatcaatgaggggcaaggtggtgccgttgttgaggagtgggtggagctagcaaatggatgcgtttgttgcactgtaaaacacagcctggttcaagcacttgagcaacttgtgcagactaaggagagaatggatcatatattattggagacaactggtttggctgatcctgcaccacttgtatccattctctggctggacgatcaattggagtcatcaatcagactagactctatcattacggttattgatgcaaaaaacttcaggcggcaaattgatgaacacacgaactcttcctcatttcctgaagcatttcaccaaatcgcgtttgcggatgttgtgatattaaacaaaattgatttagtaaaagacgatctcgaggatttggaaaggcaaattcatg

SEQ ID NO: 39864 - DNA, 1358 bp, Zea mays
  Clone ID: MRT4577_136358C.1
cggaaagtacctaccgaacttacaaatcaactcattatgagctgattgtgacggaacctcccaagtaattaggcccacctacagttgtccttgtctaacagacatcagacaccctatagatgttcctaagtcacttgacaagttcggtatctttccttaccttaccaggaacgtttcacccgtcttgcagacattacagaacatcggagataaagaaatgcggaagctattacataaacttacatttatttagaaagtaagatcaagttacttattacagaccagagctataaacgagtgttgagtagtacacatttcaagggaggcaaaaactcctcccgatagctttaaacaaaagtcctatatggaggaccacgtcctcccgcatcttcactcttgtttttcttcatttgataccaccttggagcaaaagcaacaaaaatttgtcgcttcctcacctaaaaacaacggggaataaaaccctgagtatggaattactcagcaagtcttacccgactaaaggaaagactctcaagggtatgctggttataagggagtcaaggtaaggcttctcaataatcaaagactctgttttgcagaaatgcttactaaagtggatccttaaaaatccagttttatttgtcaagttaagtaaaattacctgcaactcgacttctttctaccctagttcaatcacttgacatacactagccaatttcttaacaaaaccatcatctttagtggattgctacgtatagggcaatgaccaagtcttcataactgcgaaggtacggtgatccgaatcgattatactcaacttaggatctccaatcacacgacatatgtagcacttaacccttgcatatgtcaacccgccaccggggttcttaagaccagatcaggttcacacaaaccgagagcacagatacaccaccgtccagcctcttgccacggagggtacatgctactctcgccaccgctccacgcccatttcgtgttatcttattctggccttagtctgcccgaggcaaggcttacccatgacgaggcatgtgaccagttaaagggtcctcggtcagcaagcctacatcgagacggtccttaatcgactcagacgaagacactacaccgagactcttctcgtgcaagtcacccgccctgtctcagcttactcattaaacccaaaaacttggtaccaggcagaggtacatcttttccgatgttgaatccatcacggccgtgatggattcaccatcaagttttatttttaaaacaaccctcccactttgccaaacatcttttgtaaaacaaatccttttgtttttctagagcaacactaagcatagtcccggaagaga

SEQ ID NO: 39865 - DNA, 128 bp, Zea mays
  Clone ID: MRT4577_136359C.1
aggtgagcttttctcccagactcccaggcgcgctccgaattccgcaccgccgaccatcgccatgggaggcagcatgaccgacgctcttcttgctcaccctccccgacgtcttcccatcgacagaccga

SEQ ID NO: 39866 - DNA, 1481 bp, Zea mays
  Clone ID: MRT4577_13635C.1
cattgggtacctcgaggccggccgggctccacgcgagcggacgacacgaagcggccatagccgcacgttgggatcccctccgctacgcctcttgatggtctccgccagcgcgccgccgccgcaggcccagtccgacgcggccgggtcgggggaggaagtgagcaagaaggtgcggaagccgtacacaatcaccaagtcccgggagagctggacggagcaggagcacgacaagttcctcgaggccctgcagctctttgatcgtgactggaagaagatagaggcttttgttggctccaagactgtcatccagattaggagccatgcacagaagtaccttttgaaggttcagaaaaatggaaccagcgaacatgtcccacctccacgaccaaagcgaaaagctgcccatccatatcctcagaaggcttccaagaatggaactctggcatgaacgtgcctgtttcttcatgggctcatagttccatcccacaagctgttgcttcatcaatggtgaaagaagatttaggtgctggaacaccaggttcaaacaatttttgctcaagtagtactgaaggccttccaagaacttggcaacctggtgaaacaaatgatccaataaatcaaattccgtcactccgccgtctgtacctcatgatatttctgataatcatcttgtagtgcaaaatacttactccgattctgtccatctctactatttctaagaattatgtcttaaccatcctcctgtgcatcttttcttgtgaatttgtaagcttcaatctcaaatccgctggccccttcttttagaatgaaccgaacctccaatattctcttgatgatgcttaacatacagagaaacggtgtaacacaaaacagcacaatccatttctttgtactgtttctttttcaaatattttactgttttcaatattgaatctatgtcttgaatgaattgctagcttatctaattcatatttacattcttgacatttcaattatgtctttccaatgtttgatatagttatgccagattttgcgggagtgtacagcttcttaggtagtgttttcgatccaagtacaagtggtcatctgcagaaacttaaggagatgaatccaattgacgttgagacggcactgttgttgatgaggaatctctccatcaatttaaccagtcctgattttgaagatcaagtgtctggtactctggttcatgtttcagtgttttgctgtttgcatcatttctctatgaggaagttgttgtccttatacagcgcttctgatggacctttagggagctcaagaagttcagctctagcgacgagcgcgcctttcatgtaaggtctctcggcatataatttcagttcgacagacctcagaggtgcctgccctgttcaccgatggatgaaagtttgcttttcttctcgctagcagttcaaacatgtcttcagattatgcctctactaaatcgtttgccactaattgac

SEQ ID NO: 39867 - DNA, 1928 bp, Zea mays
  Clone ID: MRT4577_136360C.1
gcggaagcgattacataaacttacatttatttagaaattaagatcaagttacttattacagaccagagctataaacgagtgctgagtagtattattacacatatcaagggagacaaaaactcctcccgaaagctttaaaacaaaaagatcctatatggaggaccacgtcctcccgcatcttcacttttgtttttcttcatttgataccaccttggagcaaaagcaacaaaaatttgtcgcttcctcacctaaaaacaacaaagggataaaccctgagtatggaattactcagcaagtcttacccgactaaggaaaagactctcaagggtatgctggataaataggagtcaaggagaggctttagcaaaaatcaacttatacttttgcagaagtagcttactaaagtgagtccttactttcaatcttttaatgccatattaagtattaatagactctatttgcatctagtctaatttcaacatctcatcaatacaacatcatttttatccatagtgttcacatcctgactttaggttgcagggaagtgaccaattcttcataaccgcgaaggtacgggcgatccgaatcgattatactcagctgaggatctccaatcacacgacatatgtagcacttaacccttgcatatgtcaacccgccaccggggttcttaagaccagatcaggttcacgcaaaccgagagcacagatacaccaccgtccagcctcttgccacggagggtacacgctactctcgccaccgctccacgcccatttcgtgttatcttattctggccttagtctgcccgaggcaaggcttacccatgacgaggcatgtgaccagttaaagggtcctcgatcatcaagcctacatcgagacggtccttaatcgactcagacggagacactacaccgagactctctttctcgtgcaagtcacccgcccggtctcagcttaatctttttaacccaaaaacttggtacctggcagaggtacatcttttccgatgttgaatccatcagggccctgatggatccaccatcaaattttattttcgaaaacaaccctcccaccttttgccaaacatcttttgtaaaacaaatccttttgtttttctaaagcaatactaagcatagtaaaacctttttgtaaaaacagggtttcaaggagggtaatcaaaatcaaggaaggtaatgcaggaattgtttaacaatcaactcctataacttaatgcagcaagcaagtgagaaagattttaaaaacatcaagggaggtggcaaatgcaccggggcttgccttcgttaataggtgattcaggctcggatccacaaatgtcgaagtagaaactattcctggcctgagtgtccaaaggtggttgcacttgctcttcggggacttctacctcttcttcacgttctactcataaccatacataagtataagaatggatgccatgggatgctcatgaggatgcaaagataacataaacttattagttatatcttgaatacaacttgccttcacggagttccgggaacttagggtttccggagtcggtaaaggagttcatagggcagggggggtgttttggggtttggtgatcaaacaaggtccaaatcaattcaaactctacccaaggcttctaaatattatataacactcatataaaaattttgggcattttaggacttatcaattattttctaaaaatctataaccaagacttttaactactttaaataccctaaaatttcttactttcactaaaaatcaccaacttatttttattaaatactatggaaaataacaaacctaggaaaattagtttcacaattttagcatttttctacatttttctacacatttctaaagttttcctgaaaaaaaaaaaaaaaaaaaaaaaagtactctgcgttgttaccactgct

SEQ ID NO: 39868 - DNA, 162 bp, Zea mays
  Clone ID: MRT4577_136361C.1
cgctgctgtacctgtgtggtggggacgactgaagggcttggcatggtggattgcccagaagtggccctacctgtgccccaacctaatgttctagagaatcagcctgccactaatggacccctgaactcctccctgtgaagatgacgacagatctgccgaccc

SEQ ID NO: 39869 - DNA, 316 bp, Zea mays
  Clone ID: MRT4577_136362C.1
aacggaaaaacattttttatttttttattccaaaaaacctcacaaccccacccccttgggaacccggggggccttttatttccccggacccccccccaaaaaaagagggggttgtttttcttgaatcaagacccccaaagtttttaccggccggccaggggggccctggcaacatggggccctgcgtggacaatagggtttgggccgggcccatgttttacgggtaacctttttttgggagggcccccaccctctgttacatgcgggcccttggttgaaagcccttgatttcccccgcccccaggagattgcctga

SEQ ID NO: 39870 - DNA, 362 bp, Zea mays
  Clone ID: MRT4577_136363C.1
tttttttttttttttttcttcttttcgggtgggctttattaaatttttgggggtgtttttcctctttttgtaggccgcggaaaaaaattgtttattacaaaggggttaccgggtagaaccatttacaggttatccccggattgcaatttttaccctcggggggggttaccaaaaaaattggttcaaaaggttcacaagtggaaaggataaaacatttataggtgaaaaaaaccaggccggctaagggggccaccccgaatagggagcctaaaggggggattaacctatataaaagggccggccccacgggcacttacccccatcccaaaaaaaacaaaattacaacctggaaaacacccggg

SEQ ID NO: 39871 - DNA, 284 bp, Zea mays
  Clone ID: MRT4577_136364C.1
ggcgggaacacttacatcgcagtcacgcgtttggttcctgtgctgacttcaattgtacacacacgaaaccagacaggatgactactaacgtgacacttacgcacgcagaggatcacatcacatggatgggaaccaagcgttaatacaatccggaggccgggttctgagttaagctaccggacaatcaacatcgccctgaccacaatggaagccagacactcgtcggcatccttaatgaaagcacaccacaagctcgaagacggctttactgcctcaaaaagcta

SEQ ID NO: 39872 - DNA, 527 bp, Zea mays
  Clone ID: MRT4577_136365C.1
tttttttttttttttttttttttttttttttttttttttttttttttttttttaaaaggggggctttaccgatttccattccacaccctggggggcaaaaaggggcactggcttttctccagcccttgaaataggggccgccaaagtttaactgttttttgggcccagttaaacacctaggctttccttacgggccccataagaacgaaaataatgggacgggggtgccccctgttaaaacagggggacccaaatgggctaaaaggttttttattaaactgcaaaacaattttttttttcttgggaaaagggttgtaaatgaactatgcagttgtttccttcagggccccgatgagatcagcacgctcctggggttttttcagcccagggaaaaccattttggttccagaaatgtcctttttagggttaagcaggtcctcatacaaagggtttttttcccaaactacaaccttgtttttgtctcccgcaaaaaaggagtagcctgcagtgggccccgactgtctccc

SEQ ID NO: 39873 - DNA, 305 bp, Zea mays
  Clone ID: MRT4577_136366C.1
gttttgtagcgtgagttatcatggctacaatttgttctgaaactagtggtcactaatcttaatttacacagttcagtcaatttaaaaaaaaaaaaaaaaaaaaaaaaaaaaaaaaaaaaaaaaaagaaaaaaaaaaaaaaaaaaaaaaaaaaataaaaaaaggaaaataaaattggaataataaaaaatacttgggtgtaaatgaaggagcgattgggatctaattttttatatagcaaaaaaaggggcgtgaatgagaaagaaaaaattaataaaacggtggttgaaacggaacataatttttt

SEQ ID NO: 39874 - DNA, 982 bp, Zea mays
  Clone ID: MRT4577_136367C.1
cgttaagtttccggcccaacaacctttccgactggcccaaaccaactcccaagtcccatcccaaccgaggcgacgcagccgccgccggctgaacctaaacccctcgacgcagccgccgccggcgtaggggagaggggcacgggcacggcacggggacggaaatggcggaggggaacggcggcagtcgcgccgaggctggcgtccgcgagtcctccgagccctcgccgaagcgctcctcgatccccgccatgccgcacgaagaatgcgtcgagggcatccgctccgcgctcaaacatcccacggtgcggttcctgagggagcggatggagagtgccgggtgcctggtgtggccgcgcctcatccgggcggcgacctgctcctccgccggcggctacgctagccagcaagggatacaagtttgctgcaatcacatgacctgtcaagatgagataactcaggtcatgattcatgaactgatacatgcttatgatgactgtgttgccaaaaatctgaactggacgaattgtgctcaccatgcttgctctgagattcgagccaatcaccttagtggtgattgccattacaaacgtgaattgttgcgtggtttcatgaagataaagggtcatgagcctgaatgtgtcaaaaggcgggctctgatgtctgtgaaaaacaacccatactgctcagagggtgctgcaaaagatgcaattgatgctgtatgggatatatgctacaatgacacacgcccatttgatagagccccatgaaatattttcagaacctgggatacattagctattttgtgcacacctgcattgatattctgagccccttcagaaacttgtatttcagcaacctgtgtcagcaaagtacagaaattttctgctgtagccaaggcgtgctgcatccggcgatgattctgcacacactgtaacgatttaattcgtgtaattcaattcttttacacgatatcccgacaaag

SEQ ID NO: 39875 - DNA, 322 bp, Zea mays
  Clone ID: MRT4577_136368C.1
ccgtccggcctactctttcttggataattgactctggatgattgacacagacaagcacacagctcaagctgcaggcatgttgtgcgtgcatactatcgtgctgaactattctgaacaatatctgagataataactaacaaagaaccagacctacaacagagcttacaaaatagcgttgagtgctgtgaacagtgctaagaacctgattatgatatgaagtatgacttcatgtaagactacaacggacctgatgctggacgatatgcagctggatgggcttgtggcgatcctcatgaacatcctgatgtacgcacagattgag

SEQ ID NO: 39876 - DNA, 1455 bp, Zea mays
  Clone ID: MRT4577_136369C.1
cgaatctcagagcaagcatggtgagcacaattcttccagttcagattcgagccaatcaccttagtggtgattgccattacaaacgtgaattgttgcgtggtttcatgaagataaagggtcatgagcctgaatgtgtcaaaaggcgggctctgatgtctgtgaaaaacaacccatactgctcagagggtgctgcaaaagatgcaattgatgctgtatgggatatatgctacaatgacacacgcccatttgatagagccccatgaaatcttttcagaacctgggatacattagctattttgtgcacacctgcattgatgttctgatcccttcagaaactccaagtttccggcccaacaacctttccgactggcccaaaccaactcccaagtcccatcccaaccgaggcgacgcagccgccgccggctgaacctaaacccctcgacgcagccgccgccggcgtaggggagaggggcacgggcacggcacggggacggaaatggcggaggggaacggcggcagtcgcgccgaggctggcgtccgcgagtcctccgagccctcgccgaagcgctcctcgatccccgccatgccgcacgaagaatgcgtcgagggcatccgctccgcgctcaaacgtacgcgcgccccgagcaccaccaccaccacggattctcttatcccacggtgcggttcctgagggagcggatggagagtgccgggtgcctggtgtggccgcgcctcatccgggcggcgacctgctcctccgccggcggctacgctagccagcaagggatacaagtttgctgcaatcacatgacttgtcaagatgagataactcaggtcatgattcatgaactgatacatgcttatgatgactgtgttgccaaaaatctgaactggaagaattgtgctcaccatgcttgctctgagattcgagccaatcaccttagtggtgattgccattacaaacgtgaattgttgcgtggtttcatgaagataaagggtcatgagcctgaatgtgtcaaaaggcgggctctgatgtctgtgaaaaacaacccatactgctcagagggtgctgcaaaagatgcaattgatgctgtatgggatatatgctacaatgacacacgcccatttgatagagccccatgaaatcttttcagaacctgggatacattagctattttgtgcacacctgcattgatattctgagccccttcagaaacttgtatttcagcaacctgtgtcagcaaagtacagaaattttctgctgtagccaaggcgtgctgcatggcgcgatgagtctgcacacactgtaacgatttaatttgtgcaattcaattcttttgcacgatatcccgacagattttaataaatcataaacgtaaagtttgttggtggcgtgcataaaaaaaaaaaaaaaaaaaaaaaaaaaaaaaaaagggcggccgccaccgcggtgga

SEQ ID NO: 39877 - DNA, 775 bp, Zea mays
  unsure (1)..(775): unsure at all n locations
  Clone ID: MRT4577_13636C.1
ggacccccgggtcggccggattctgaagtgaaccaacttgacctaaaaagattatcttccatcataggaactctggcatgaacgtgcctgtttcttatgggctcatagttcatcccacaagctgttgcttcatcaatggtgaaagatttaggtgctggaacaccaggttcaaacaatttttgctcaagtagtactgaaggccttccaagaacttggcaacctggtgaaacaaatgatccaataaatcaaattccgtcactccgccttatgccagattttgcgggagtgtacagcttcttaggtagtgttttcgatccaagtacaagtggtcatctgcagaaacttaaggagatgaatccaattgacgttgagacggcactgttgttgatgaggaatctctccatcaatttaaccagtcctgattttgaagatcaagaagcgtgcacccttcctggcctttcctatccccaaaagctcggccatctaggctcgtgaaatgctgcttgagatcaaggctgtccttggaaatgggaagatgtaaggttttatctgggnaatgccggnnnaaatcagggggggcnnngngagaacagctctctgattgttttttggaggccctcttgatacggaacttgtgcgctccgtctgagaaagcatgtgtgcaaagtttcatttgaggagttgaggcgatcatggcgctgtaaatgcggcttatcttccccttcagggctggtttggtggaccaaccctcaacatttgcattcctattgtcgta

SEQ ID NO: 39878 - DNA, 224 bp, Zea mays
  Clone ID: MRT4577_136370C.1
gctggatgttccagtagacaagtatgctaactacaactttgttggtcgtttattggggccgcgaggtaactccctgaaaagggttgaagcttcaacccaatgtagagtttacattcgaggacggggttctgtgaaagactctgttaagagtttccagcagatatggttgatgtgcgtcttaatcaagctgtgtccatcctagaagatcttcttaaaccaattga

SEQ ID NO: 39879 - DNA, 1358 bp, Zea mays
  Clone ID: MRT4577_136371C.1
ccgggttgctcccggagacgcagaaattggccccatttgtgcaagttcttcctttctgtaccgggctcttgaaccaagagattttgcgcgcatcgtacatggcgcctaaccataactttgttgatcctgagagaattgagcatggtagcccattaaggttacctggccacccagtgaatggtcagccgatggatctggagggctggtcagggattcaaacagaggcttctcagcatatgggggttctacaagcatcatcaatgggctggaatggtgctcctgtacttgctgccactcctgttgtcaagaaagtcatgaggctggatgttccagtagacaagtatcctaactacaactttgttggtcgtttattggggccgcgaggtaactccctgaaaagggttgaagcttcaacccaatgtagagtttacattcgaggacggggttctgtgaaagactctgttaaggaagacaagctgagggataaacctgggtatgaacaccttaatgaacaactgcatgtgcttgtggaagcagagtttccagcagatatggttgatgtgcgtcttaatcaagctgtgtccatcctagaggatcttcttaaaccaattgacgagtccatggactactacaagaagcagcagctgagggagctggcgattctaaatggcacactgagagaggaaagtccaagccctcacctcagccctagtgtgtcccccttcaactccaccgggatgaagcgcgcaaaaacagggcggtaatctctgttctgaaagccttcatccccccaaatcaatcatggttcaatgcccaattattacacaagctactgctggagatgattggtgatgcatatgctgggatcatcagtgatggcctatgcctgtcatgatctgtgcgctttatcgacaggcacaaaaacatgcctgtgctgtgcttggacgaatggtctccgggcttgttgtttgactctactattatttattctttgtgcttctgactgcctaagtattattaacattattggtttgggaaagttaacaaggcccggttggccagtcgctgtagaagcttggggagaggaggggggtgtcaatgtgacggacaataataaggtttcgttggtgtaccagagatagttgtaatatgtcatgtgctgatgcttttgtgtggtgctagtacaagacaaccagacagctatagttgaggcaatgattattttgcgttcataaaatgaatgtcggtgtgctttcttcatggttcatgtaccggaaccagtctcaaaaaaaaaaaaaaaaaaaaaaaaaaaaaaaaaaaaaaaaaaaaaaaaactcgagagggagggcgccggtacc

SEQ ID NO: 39880 - DNA, 367 bp, Zea mays
  Clone ID: MRT4577_136372C.1
cctcgaggttttttttttttttttttttttttttttttttttttttttttttttttttttttttttttttttttttttttttttttggaattttcccccagggggtcttaaccttttttaaaatttaaaaccttttcccattttttccaaggggggggtgcttcctccacggaaaatatgttaaaacacttttttccccattggcccggggccaaaagtttttcccccaggaaaacccgttttttttcctttttcctggccgggggccaagggtttttcccctgttaattgttcccctaaaaagaagggtgggccctttttattgccccatttaggggcttttaaaaaggaaattttggggcggaaa

SEQ ID NO: 39881 - DNA, 294 bp, Zea mays
  unsure (1)..(294): unsure at all n locations
  Clone ID: MRT4577_136373C.1
agctggccatcgagatcactaacgcacgtacagagacctcatcacgtctttccagttcacaggccgttgtcaagaatgaaggtgaagcccggcacggagccagccaccggcgtccccgtcggcggcgcacccggcgcccctaccgcctggtcctccaccggcgtccccgtcggcggcgcacccggcgcccccaccgcttggtcctccggcctcttcgactgcttcgacgactgcggcctctgttgcttgacttgctgctgcccgngcatcacgntcggcaaggaagcggagatc

SEQ ID NO: 39882 - DNA, 215 bp, Zea mays
  Clone ID: MRT4577_136374C.1
gccactcgtacggaaggaggacatgacgattcacgggacttgaaacaacatcgcgtacgtaataaatcaaactttcttgccaggtcaggttattatatataagatctaaagagcagcatatctatctggctctgtactacacgcttgcttagtacggcgactgtatggtaaatctttctcccataaataatatagccccatccctagctgtatgc

SEQ ID NO: 39883 - DNA, 113 bp, Zea mays
  Clone ID: MRT4577_136375C.1
cttcggcaaacgttccgggttatagaccgagggcggccgtttaggaggttccaagttacgcgccgcgtgcttgcaaggtaatagttcttctatagggtaacctaaattcaatt

SEQ ID NO: 39884 - DNA, 206 bp, Zea mays
  Clone ID: MRT4577_136376C.1
ctgcactgtcttgttctaggcctagctagctagccctccagctcgcacacatgccatggcgctgtcgtggtcgcccgccgtcgtcgtcttcctcctcctcctgttgctcctccctgccccatggccccgcgcggccgcccaggccggccggtaccacgccgtgtcggtgtccagggcaggaggccagctgtccgcgcggttggagc

SEQ ID NO: 39885 - DNA, 401 bp, Zea mays
  Clone ID: MRT4577_136377C.1
gtcagcgcacagctcgagcccaccgactgacataacttaccaaatccggcggacgtgcagcggatatccatctgagcagcgtggatccgatcttcgatagaggctctcgggctcactgctactaagcggcggcgagccgaccacgtcccactacagcagtcagcgaccgctcgacgcggtcggacctgtactcattagttgctatcaccgagtggactcggggcaccacatgtctaaccgaccagtggtgtagaggaccgaagactcgctgctatggagtgtacgccgcgtgtttacgatgacggagggccccgacacaaaaaagggacttgttaagagacaacatgcgctgcttggcgtgacggaggtgttcgacctgttggtgccggaccacacgattg

SEQ ID NO: 39886 - DNA, 828 bp, Zea mays
  Clone ID: MRT4577_136378C.1
ttttttttttttttttttttttgcagagccgtcgcgctctaggcaagcaggtgcgagtgcgatcgggcgatttgcacaccagcaaaatgctacaaacaaattgcgtagtggcaacggattgggtctggccctttccagaagatttgttgcccttatgcaagggaacatctggctggaaagcgaaggcgtagggaagggctgtaccgcaacgttctttgtgaagctaggactatctgatgcaaatctccggaggatggtgcctcctgtccagccaaaacatggaaatgcagatccagatgtatcatcaataatcaacggcgacatggcgattcttccgcgttgttaccagtcgatgatatgacaaggaactgcaggaggagcctgatcttgtgatatcatgatttgaaggtggattcacggggttaaggatgctgtgtgtagagattgctctccccgttttttttttttttgcagagccgtcgcgctctaggcaagcaggtgcgagtgcgatcgggcgaatccaaaatagcgggacgcctctactagggaattaacagcgcagggagagcggtgcggtgttttaagaaattataagttgtgagatgagtggcgtgtttgttagacgtcatttagggttttctagtgttgtactagtatagtcttggtagagagaagcagaaagaagctgatctgtacacgaggcaaatgaaatgctgatgactacttataaggcttctactgtttgtacagtatttttttgtctacataaattgcaacagtataagggggtgtttgggtctctatgaattgaatttgaattgcaggtcg

SEQ ID NO: 39887 - DNA, 312 bp, Zea mays
  Clone ID: MRT4577_136379C.1
cgagaccgtcgcagctgcagcgcccgccacacgttcccttctcctcaagcatcaccagctaagcttcgtgcccccatctcgacgttgcgtccgtccgtccgccctggttgactgccattactagttaaacacaggagagtacacgacacaccgattacctccctcctctgcgggcttcaacatcatacataacgtctactgcacacacaaacacacacacgaacactacacgccacttggattcgatctactcgctgtcaaatactttttgtttcgttacaccatttgttcatgttgattaagttgattggc

SEQ ID NO: 39888 - DNA, 1356 bp, Zea mays
  Clone ID: MRT4577_13637C.1
ctcgaggccggccgggacctccttccgagcggacgacacgaagcggccatattcgcacgttgggatcccctccgctacgcctcttgatggtctccgccagcgcgccgccgccgcaggcccagtccgacgcggccgggtcgggggaggaagcgagcaagaaggtgcggaagccgtacacaatcaccaagtcccgggagagctggacggagcaggagcacgacaagttcctcgaggccctgcagctctttgatcgtgactggaagaagatagaggcttttgttggctccaagactgtcatccagattaggagccatgcacagaagtaccttttgaaggttcagaaaaatggaaccagcgaacatgtcccacctccacgaccaaagcgaaaagctgcccatccatatcctcagaaggcttccaagaatgattcatcttccatccataggaactctggcatgaacgtgcctgtttcttcatgggctcatagttccatcccacaagctgttgcttcatcaatggtgaaagaagatttaggtgctggaacaccaggttcaaacaatttttgctcaagtagtactgaaggccttccaagaacttggcaacctggtgaaacaaatgatccaataaatcaaattccgtcactccgccgtctgtacctcatgatatttctgataatcatcttgtagtgcaaaatacttactccgattctgtccatctctactatttctaagaattatgtcttaaccatcctcctgtgcatcttttcttgtgaatttgtaagcttcaatctcaaatccgctggccccttcttttagaatgaaccgaacctccaatattctcttgatgatgcttaacatacagagaaacggtgtaacacaaaacagcacaatccatttctttgtactgtttctttttcaaatattttactgttttcaatattgaatctatgtcttgaatgaattgctagcttatctaattcatatttacattcttgacatttcaattatgtctttccaatgtttgatatagttatgccagattttgcgggagtgtacagcttcttaggtagtgttttcgatccaagtacaagtggtcatctgcagaaacttaaggagatgaatccaattgacgttgagacggcactgttgttgatgaggaatctctccatcaatttaaccagtcctgattttgaagatcaagtcttgccaattcgtgatgccagccctcaccagagcaggcctgaagtccgaaccactatcttatagcatagactcttatctcctgacacccacaaagggatgaaagtggtaatccgaactgttagaacaaatttaatattttaaaatagatatgcat

SEQ ID NO: 39889 - DNA, 151 bp, Zea mays
  Clone ID: MRT4577_136380C.1
gaaatgttgccattttaatgagatgattttcttcatctcataattaaaatacctgactttagagagagtaaaatgtgccaggagccataggaatatctgtatgttggatgactttaatgctacattttaaaaaaagaaaataaagtaataa

SEQ ID NO: 39890 - DNA, 171 bp, Zea mays
  Clone ID: MRT4577_136381C.1
acgtccgcgatctacaactagtggacgcgtgtgctaagttatttgtggacacatcaccaatagaaaggctacgagtaaatgttgatactttctaaacgaattaaactgtttttaagctattgggtgatcttggagtttcttggggaaaagagttcgagcacttttaataat

SEQ ID NO: 39891 - DNA, 218 bp, Zea mays
  Clone ID: MRT4577_136382C.1
ccccaaaaaaataaaggcgattaaacatcctggggggtacctttccgtttttcaacacaagatgggcattttaaaatagggcccttataacccccaaaaacctttgaatttcttttcccacaaaccaatgtaggaccccctaaaaaaaaccgttgggattcgcatcccccttaaagaaacggtttgggggaaagctttccaggggccccccttttaaa

SEQ ID NO: 39892 - DNA, 1980 bp, Zea mays
  Clone ID: MRT4577_136383C.1
aggcaatcgtacgtgaacaagtgaatcatccagtttggggagcatatgctcagcgacttctaaatcctgaagcaagactttggaggaatcccagtaatggtggtcatgatgacaaggcacatcctcctattcatccaaccaaattttcagaaggtgaaagaaactggagtccagaccacactagattgtatgagtttgttgtccgacatttccttgcatgttgctctcaaccggctgttggagctgaaacaactgtggaaattgacatagctggtgaacagtttaatgcatcagggcgtgtcatacttgctaaaaattatctggatgtttaccgctttgactcatggggtggaacgttacttccaacatacaacattgggcagcagtttgttccgacaactttaacacttgattctggagtgactcggccaccgcctcttctggctgaagccgaccttcttagctgtatggataaagcaggaattggcactgatgcaaccatgcatgatcacataaaaaagttgcttgaccgttgttatgcaaccaaagatgaaaacacacgtttctccccgacaaatcttggtgaggcattggtgatgggttatgatgaaatggggtatgagctttggaagccttatttaagatcaatgatggaagctgatatgaaatcagttagcgtgggtactaagagtaaatcagaagtacttgagagttgtttgcagcagatgaaggcctgttttcttgacgcaagggtgaagaaagcaaaactccttgatgcaatggggacattctttgcaaggtctaataggcctataaatgaaactcaaaatccagtagaggttgtgaggccttgtggtgcatgcaatggatctgaaatgttgcttaagcgaagggcgagtggtgaatttatggttgggtgccgaagttatccacaatgtagaaacgtggtatggctcccaggatctctttcagaagcggctgtaactaatcaagtttgtcctatctgcgcaccaggccctgtttataagattcaattcaagttccgtcggagggatattccaccaaatttcgatgttgatcacctaggttgtgttggtggttgtgatgatatcctcaaagaccttatggagataagtaggtttggaagtcgcagccaggctgcaacaccagcaagaggaccaactccaaatggtgtgggtcaggggactccaagacaggatttacatactatttttcgtccggcaagccagcttaataatgataacccatcggttatgcattctcaaggtttccgttcaacccatacccaaaatccaagtaatgcatcagatgcaggtcaagtgctgtgcacctcatgtggagcgctttgcatatcacgaattgctaatacagaggctaacagggggaggaggttctacaaatgtcaagatcctggctgtggcttcttcaaatgggaagacgaagtggacaatggtacggggagaggccgccgtgggcgcggcagcagcaggcaggcgtctgcgtctgcgtctgcatctgcaggacggagaggcggaggccggagaggcagaggccgtaacgctgacggcgggatgttcgtttcagcgacgggcgacaccgtgctcggctgctgctttaactgcggcgatccttcccacttcgcaaacgcctgcccgaaccggagatagttatcagggagctgctcgctatgcgtgtacagagactggcagcgtccgccaaacgatgaagccttcggatgggtttcgtgtactgaggtgcatataagtgcacctgacaagctcattttctagacaattactaatatttttaaacaaaatgcagctattaggctgatgctagttcagcaaatctgacggcacttatttacaaaagttagggcggtaccagaaaaaactgacaaaggaagagatatggaaacacgagctgattcactaaggtttcgataacaagtttctactc

SEQ ID NO: 39893 - DNA, 267 bp, Zea mays
  Clone ID: MRT4577_136384C.1
gccgcccaaggagcacatttctaccattgtagcactgtcccaagcctctgagtccgtccgtggagctcaagccgactccgggcacgtacactcctagccccaaactcactcctccgacttacactccaagcctcaagcctactacacactcgacgctcaaacctacctctccgacattcaccctttccccatatcctattactcctaaacctaccccaccgacttacactcattcatcaaagccttctactcctaatcctcctacac

SEQ ID NO: 39894 - DNA, 460 bp, Zea mays
  unsure (1)..(460): unsure at all n locations
  Clone ID: MRT4577_136385C.1
attatgtacacatgtacctgttgtattataataaatggcaacctcgcggcagtatacactgtatatgatatcacagtacctgagttccaccttccacttgtatccatggcaatactatatctaaannnacatttcagttgataaaggcgtctatacgtcancttgcatatagtggaaggcttacacgaaaggaaacaataattctcggtaatggccntgaaagtgaaaagagcacagnnnggatatattcttttaccatggggcgtanncctcttgtgtaataaggtgtccccgcaacctcatgaagtcttcatggctcgggaaaattggtagtttggtcaccggaaccacagggattagcttcaatcatgcttcttcagnctcagcaaagcattatattgtctttgcagattttgtatcaccataccttcgagaagctgctcattttccctaaaaattc

SEQ ID NO: 39895 - DNA, 415 bp, Zea mays
  unsure (1)..(415): unsure at all n locations
  Clone ID: MRT4577_136386C.1
cccacgcgtccgtccacacatggtggcacacatggcgcgagaaatgcagaaggtggcctcccgcgaagcagtggccccaccgccctggccaagggttcacaattttggtatgaaattcctgaaattcccttgaattcagggtccgaaaggaatatgttttccgaaattgacgttgtttaatataaattatagcatttttgttttaaaaatattaaatttatttgattttgacgtaaaatgcctgaaatttcggaatttcctgcttttctgtggagccaatttttttccttttcagaaactgtgaaccctgcctcacttaggtgctctagccttcgccgncggaatccatccagattataagtgttcccgatctcgctatcttaccctatgttttacccacttaaaagaaactatt

SEQ ID NO: 39896 - DNA, 267 bp, Zea mays
  Clone ID: MRT4577_136387C.1
ggggaaaaagaaacaggcaagacttatatttttttgcgaatgaataatggacatttcaatagggcatattcctaataccattaccaaatctaccagggccccctaataatgtttgcaaagcaaactggcatggaagagcccaaagagggcctggaacccattaaagaatttaaagggtacagaactaagtggtttgttaaaacaaaatttctgcccatgtcccctggaaaaaatattgggggaacttttatccaccttaatggcaaa

SEQ ID NO: 39897 - DNA, 1258 bp, Zea mays
  unsure (1)..(1258): unsure at all n locations
  Clone ID: MRT4577_136388C.1
ccgtcgagcagggcgctggcgatggcggggccgccgctgcggcgagaacaagctcctgatgacggcgaagcggcacagcagcaaggaggagctgatgaagcacatgcgccggtgcagcggccagctcagcccctcgcttttcgtctgggaggggtgcatcgcaacctcctcctgaacgccgcaccgcagcccagcccacgcgcccgccatcgcccatccgttccgttccatgcatgctttcgacctgctgctgtttgtttgctctgttggttttgtaacgttcgtaacgtagtgctgtcgttgttgctcgtaagtgatgatcgtcacgtcacgtgattggcttagctgtgtgtgtgagagaggtgagggagggacggagagctagcactattggtttggcatgccaccttgtgcgtgccctgcttattgcatctactagactactactctaccaccatttgccacgcttgcatttgcacgctgctgctgctcctgctgctgctcgtgaccgcagctcccggtgaagatggtgaagcccccgaggcgcgccactgggtccaccaccacagcggtcgcggcactgctggcagcggcctcagcgctgagcgcgaccgccngcccgccgagcaatggcgacgacgccgtccccggcgccacgtgcggcgagaacaaactcctcgtgacggcgaacggcacagcagcagggaggagctgatgatgcacatgcgccggtgcagcggccagctcagcccgtcgcttttcgtttgggaagggaccaagggtgcatcgcaattcgcaacctcctcatgaacgcgccactgccgatgacccattccatatttccatgcatgctttcgacgagtgctctgtttgtttgcagcagccggtgctgctctaacgtccgtaactccgtaagtaaagacaaaacaaatgtatcaggcttcaggcatgtgttcatgagcttgctccgcttactcgtatgattattttttgtttaagaattttgaccctcttctattgagatattgatattgattctattcacggtttaatggctgtaaggttttatagacagtaatggaaattggaatagaggaagacaagaatgattctgagtgctggcatcgtcccccaaaagccgtaccttggcgaccaaacagaactgattaccgttgcagaaagtaacgaaaaggtgtggagaggaacatcactgtgtgtttccctagtccgtagtcttgatcacgtacacatctactac

SEQ ID NO: 39898 - DNA, 723 bp, Zea mays
  Clone ID: MRT4577_136389C.1
atgcaggggagctacggctacgacggggcggcgtcacgggaccccaagccgcggctgcgctggacgccggacctccaccagcgcttcgtcgacgccgtcaccaagctgggcggaccggacagagcaacacccaagtcggtgctcagattgatgggcatgaaagacctcactctttaccagttaaaaagccacctccagtacttcgctcacagggcttcggttcaaccacagcgcatcctcctccaggtgttcctgatcaagggaagaacacaagaccatgtactattggactgcgagtatgggactgtagaggtgcaaaagaagctgcagatgcgaattgaggcccaagggaagtacttaaagacaatactagagaaagctcagacaaatatttcctttcacacaaatgcatccaatggcatagaatcaaccagatcacagctcatggacttcaacctagatggtttcatgaacaatgcaactcaagtatgcaaagaacatagggagcaattggtgaaagctatgtccgatgaaaacgataaagatagtctaggccttcagctctaccatctaggaagtcaggaggctaaggaagtcaaatgcacaccaaaaactgaagactcgctcctactagacttaaatattaaaggaggatatgacctctcttctagaggaatgcaagcatgtgaactagaattgaaaataaatcagcagatagtataa

SEQ ID NO: 39899 - DNA, 607 bp, Zea mays
  Clone ID: MRT4577_13638C.1
ctcggcatataatttcagttcgacagacctcaggaggatagtgcctgccctggcgtagtagcaccgatgagtgatgaaggaggcgtttgcaccttttgtgcttctcgctagctccatgccttcggctgacgattgtgaagcgtgcacccttcctggcctttcctatccccaaaagctcggccatctaggctcgtgaaatgctgcttcagatcaaggctgtccttggaaatgggaagatgaaaggagaatctgggtaatgccggttgctccctttcccattctttgttgagttcagctttctgattggtttctggtggccctcttgatacggaacttgtgcgctccgtctgagaaagcatgtgtgcaaagtttcatttgaggagttgaggcgatcatggcgctgtaaaatgcggcttatcttcccccttcagggctggtttggtggaccaaccctcaaacatttgcaattcctatgtacgtctgtagtgcatcaggtgttgttgcccacgtgtaaaaggaaaataaattcacaatgtaaaggagacttgtgcgttagcactaccatttgaatttatgaaatgtcaaagcagcccagcgagtttgtact

SEQ ID NO: 39900 - DNA, 805 bp, Zea mays
  Clone ID: MRT4577_136390C.1
ggagcttgatttcgacgagctggatattgagaccctatgggagctcgatcgatttgtggtcaatgggaggaaagctctaaagaagagccagcggaattctacgatgaatggtgatgctgctgtgatgaatgcagatgccatcgatgtgacaattgttccggatgatgatgatgacagggtcgaggttgctgtcaatccatctgtggtggttgaaattggagagtcggagactgacgttccagagaagattgaagtggaggctgagatgggtgacgagtatgtggatatcggtgatgagatgccgacgatgaattaccagtcggtggagatccagagggattccctggccgccagcagctcaagcggaccaggaagtggctcgtcttcatcaactgattcggacttggaccctgaatctgatggggataatgcaagcgccccgcactaggtggttgctcttttatctgactgtagtaggattagggacgtgtaggtgacccatttggcgagtcattttgaaggattagggacgtgcaaattggaggtgcaaattggaggtcatgtaagtctttgttgtcatgtgtggtcgtttgtgtatgtgggtgcagcttaggttgtcggtacttagtgaattggtagatgcttgtgtagatttggagactcctgtaaagaagggaatataatttggaacaaagtggaaaagtagcaatcccttggcatttcttgtcaaaaaaaaaaaaaaaaaaaaaaaaaaaaaaaaaaaaaaaaaaaaaaaaaagaaaaaaaaaaaaaaaaaaggccccta

SEQ ID NO: 39901 - DNA, 1112 bp, Zea mays
  Clone ID: MRT4577_136391C.1
ccggccgggaacgtacattcattctctcttggcaagagctcgtctcactcgagcctagattagccgtgtctttggccaccggatagctaggaagcggcgatcgccaggaaggaacgacgatgcaggggagctacggctacgacggggcggcgtcacgggaccccaagccgcggctgcgctggacgccggacctccaccagcgcttcgtcgacgccgtcaccaagctgggcggaccggacagagcaacacccaagtcggtgctcagattgatgggcatgaaagacctcactctttaccagttaaaaagccacctccagaagtatagactggggatacagggcaagaaaagcacaggcctggaacctgccagcggcggcgtacttcgctcacagggcttcggttcaaccacagcgcatcctcctccaggtgttcctgatcaagggaagaacacaagagaaatagcacttagcgatgcactaaggtatcaaattcaagtccaaaggaaactacaagaacaaactgaggtgcaaaagaagctgcagatgcgaattgaggcccaagggaagtacttaaagacaatactagagaaagctcagacaaatatttcctttcacacaaatgcatccaatggcatagaatcaaccagatcacagctcatggacttcaacctagatggtttcatgaacaatgcaactcaagtatgcaaagaacatagggagcaattggtgaaagctatgtccgatgaaaacgataaagatagtctaggccttcagctctaccatctaggaagtcaggaggctaaggaagtcaaatgcacaccaaaaactgaagactcgctcctactagacttaaatattaaaggaggatatgacctctcttctagaggaatgcaagcatgtgaactagaattgaaaataaatcagcagatagtataaatttgttcacaaagctgacagttttgggaagttcactctttgctattagattactatttttcccctgtggctcctgagcatgcttgtccaatgcccacaagctcacaagttttatttactatctgctcatgttatatttgctgaaagaagcttttgaataaatgtgggcattgtttt

SEQ ID NO: 39902 - DNA, 467 bp, Zea mays
  Clone ID: MRT4577_136392C.1
cattgggtacctcgaggccggccggggaagcccggccgggctcctcttcgtccctcccacccgcaaccgcacagagaaaggggaggaggctctctacccagcgcagcccgagcacccctcagccccggatcgggacccctgctctgcgcaatccacccatggcggaggaatcaggccgccccttgccaaagtttggcgattgggatgttaatgatccagcttccgcagacggattcactgtcttctatacatactatccataagacaatgtaggggtacccagggctccaggatgggctatctcgtaaaactcttgcgtgcgtgtatgtatggtgtgagagaattcacaaagtggacttctggttgtaattcttagtcgtctctctctctctttttgggttggtcacggttctatgatccagcaatccactgaactgtttgggaaaaaaaaaaaaaaaaaagcggcc

SEQ ID NO: 39903 - DNA, 954 bp, Zea mays
  Clone ID: MRT4577_136393C.1
ctaaaaacctaaatccccaacccgcccacacgactctcttctttcttgcccactgcacgtaccgcgcgcaatcctccaccgcaccgccgccagccaccgcgctcgccacgcctccaccaccgctcctccacctcgcgcgccgccaccaccgcgcccaactgcgcccgccgagccgtcgccagacccgtgcccaaccgcgcccgtcacgcccaaccgcggccgccgcgtcgccgccagacccaccgctcctccaccgttctcagcacaaagcgggccgcatcgccaaagacgatctcgctcccctcctctcgttcctcccactctagcacggcgagccagctccaccccgtctcccgcagcaaccgagcgctccatcttctcatcgtgctttactccccgtccacgccgcggccgcggccgcgactgaggcgtaggaccagcctccctcccgcccgcgcggggctcatcctggtggagcccaaggcgcgcatcctggtggccggcggcgacatcggcggcctggccttcgcgctcgccgccaggcggaaggggttcgaggtgctggtgctggagcgggacgtgagcgtcgtctgcggggaagggaggtatcgcggcccgatccagctgcagagcaacgcgctcgccgagatcgccgcgctcaaggctcgggtgcgcctccccgctcgccgccctcgcttctctggcttctgcaccgccgtcggccagggagacacagccgacctccctctccgccaggtgacctctcaattccttctgcccgctagtgaggctcaagaggccattggtgacagaagctgcagcatccatggttattagatcgttgccagagaaaccatcgaaggtgaactcacctgatctatcataagcataggcggacagcagcagaggcacgaggatgaggaggagatactgtagaaagcaaggttgatgcat

SEQ ID NO: 39904 - DNA, 959 bp, Zea mays
  Clone ID: MRT4577_136394C.1
ccttttctttttaattctcccagcgattcgtctcctctgctcttatctccgctgtgcctgacttttcctcctcttcgtcccctcccacccgcaaccgcacagagaaaggggaggaggctctctctacccagcgcagcccgagcacccctccaccccggatcgggacccctgctctgcgcaatccacccatggcggaggaatcagggggccccttgccaaaggggggtgattgcgatgtcaatgatccagcttctgcagacggattcactgtcatattcaacaaagccagagacgagaagaagggcgggaacggacaagacactgaggcaccttccaaggacaccaggactgagccggtggcgggtaaaaaaaaaaaaaaaaaaaaaaaaaaaaaaaaaaaaaatgtgacaacccctcccccccggatcgggacccctgctctgcgcaatccacccatggcggaggaatcaggccgccccttgccaaagtttggcgattgggatgttaatgatccagcttctgcagacggattcactgtcatattcaacaaagccagagatgagaagaagggtgggaacggacaagacactgagtcaccttccaaggacaccaggactgagagggtggaatcttatgctgcaaagccaagcacgaagaaatggttttgttgtgtgacagccagccctacgcaatcctgaggaagacaactgcatgcgctttggaaatactgtccctttaattttctatacatactatccataagacaatgtaggggtacccaggcctctccgggctccaggatgggctatctcggaaaactcttgcgtgcgtgtatgtatggtgtgagagaattcgcaaagtggacttctggttgtaattcttaggggagtctctctctctctctttgggagggacacggttgtatgatccacgtatccactgaacttgttgtgtctgcg

SEQ ID NO: 39905 - DNA, 754 bp, Zea mays
  Clone ID: MRT4577_136395C.1
ttgggtacctcgaggccggccgggtcgctgctattccgccgggcgtgtcggtactactagctagcaggcagcaagatccgccaggcagcgcagcaggcttggcaggcaggacgcaggagcgagagatctctcggttcccctgcccacgtgccaaaatgcagctcttccaaggagagaagccggcccacgatttcctctcgctccacaccggaggaggcccgtcgtcgcccgtgcagcagcagcatcccgcccaaggatacgaatcgggggcgcacagttcgctgaagcccatgaaactggacaggcggcggcgcggcggcggcggcggcggagcgatcgacatggcaccgtcgtcgggcttggagtcggactccgaggagcacgtcttgccgggcggcgtcgggacgttcagcatcaggcaggtggcatctgcgactcgatcgaggggagaagccgccggccatggcgtcgtcagcggcgcctttccacctgccgttcatgtgtccagaacggaggagggcccgccgcatggagcagaatcgggagccagggctcacagcggcccgctcgcgatgtggcaagattctggcgtcgaccaaagatccagaggcgcgagaggaggggaggggagaagcagcggcagcagcgccgatcaggggcccagcacaccgagatccaagcattccgctaccgagcagcggagacggggacaagataacgacaggttggaaatacttcgggaactcctgccgca

SEQ ID NO: 39906 - DNA, 1602 bp, Zea mays
  Clone ID: MRT4577_136396C.1
gtgcggcgctcgaggcggccgggtccgaacggtcggcgcccactcgcctcctctctctcccagcgcccctctcctctccctccctctataaatggcgagtctcgcatccgtggatccggtccccggccaccgagctcgatccccgcgtcccctcctcgctgcttgccgaccagagcgccgccggagcccctgctcgctgccaggagccgcgtcgccgtccggagttcgccaacgaccttcccagcgacgccctctgctcctccccgtcgacccccgccgccggagtccggcccttccgctcggtcgaccacccgccagcctctcccctgctcgtcgacctctctgcgcagagaacaaaggatccagtgaggagagaagctgatttcgtggtagagaacccaaatacgtttgaagacgacccgcaggacgattttgtgcaagaagaagatgaggaagactttggcgaagagtttgacgagttctaagtctagcgacgctccggtcatcttcctgtgggagatcgcctatgttatttccgctttactttgattatgatactgtttaagacttttatgtctggatgatgtaataaaattattatactctcttttacgccttattgcattgtcttttgataaagccggccgggttccggactcagtacaagttgccaagttctccgtcaccagctttccttttccttttcaattctccacagcgattcgtctcctctgctcttatctccgctgtgcctgtgcctgacttttcctcctcttcgtccctcccacccagcgcagccccggatcgggacccctgctctgcgcaatccacccatggcggaggaatcaggccgccccttgccaaagtttggcgattgggatgttaatgatccagcttctgcagacggattcactgtcatattcaacaaagccagagacgagaagaagggtgggaacggccaagacactgagtcaccttccaaggacaccaggactgagagggtggaatcttatgctgcaaagccaagcacgaagaaatggttttgttgtgtgacagccagccctacgcaatcctgaggaagacaactgcatgcgttttggaaatactgtccctttaattttctatacatactatccataagacaatgtaggggtacccagggctccaggatgggctatctcgtaaaactcttgcgtgcgtgtatgtatggtgtgagagaattcacaaagtggacttctggttgtaattcttagtcgtctctctctctctttttgggttggtcacggttctatgatccagcaatccactgaactgtttggtactgcttctcagatagcttttagaagctgtttgtgtgatgcatcgcagataggttagggagaatgggagatgctgctccgtgcatgaagacagcacactggcgcagggcgtcaaggcgggagggatggggccgcgacggggaggcccagctggagaattggcgcgggctgtgacgacgaggcatctctaagcgcgggcgtgggcctccttcgtggctccatgggcgtgggtacggccgcacggaagcgagtcggagataggctgatccgggagacgggaaaa

SEQ ID NO: 39907 - DNA, 992 bp, Zea mays
  unsure (1)..(992): unsure at all n locations
  Clone ID: MRT4577_136397C.1
gcacgaggaactagtctcgagttttttttttttttttttaagaattacaaccagaagtccactttgcgaattctctcacaccatacatacacgcacgcaagagttttacgagatagcccggagagccctgggtacccctacattgtcttatggatagtatgtatagaaaattaaagggacagtatttccaaagcgcatgcgattgtcttcctcaggattgcgtagggctggctgtcacacaacaaaaccatttctttgtgcttggctttgcagcataagattccaccctctctacccagcgcagcccgagcacccctccccccccggatcgggacccctgctctgcgcaatccacccatggcgctatggcaagtctgaaagccaaatggacggagatggacgactatggagaaacgctcatgaatatacatgcgggattatgcacgtatgcaggccaatggtcactcaaagaggaggaatcaggccgccccttgccaaagtttggcgattgggatgttaatgatccagcttctgcagacggattcactgtcatattcaacaaagccagagatgagaagaagggtgggaacggacaagacactgagtcaccttccaaggacaccaggactgagagggtggaatcttatgctgcaaagccaagcacgaagaaatggttttgttgtgtgacagccagccctacgcaatcctgaggaagacaactgcatgcgctttggaaatactgtccctttaattttctatacatactatccataagacaatgtaggggtacccaggcctctccgggctccaggatgggctatctcgtaaaactcttgcgtgcgtgtatgtatggtgtgagagaattcgcaaagtgaacttctggttgtaaaacttatacgtctctctctctctctctttttctcgttcacggttctatgatccagcaatccactggaactgtttggtactanaaaaaaaaaaaaaaagcggcc

SEQ ID NO: 39908 - DNA, 291 bp, Zea mays
  Clone ID: MRT4577_136398C.1
aggctgctttccggactgttctcttcacaggtgtccggatgccgcactgcagcgtagccgcttaggaccggcggccagtggcgactacagcagggactggctgccaacccctccggctacgggccccttaccgagctcccagactggtcatatgcggatggccgccctgctcccccaatgaaaggccagcttcgaagaaaagctgaaagggacacgtttgcaagacgagttgtactgctgtcacaggaaatggacgctggagtacaagcatggcagctcaggcagcagaag

SEQ ID NO: 39909 - DNA, 2076 bp, Zea mays
  Clone ID: MRT4577_136399C.1
cattgggtacctcgaggccggccgggaccacaccaacttttaagcagaaatttttcatcgaaactcgtcaattttctatcggatataggggtaacacgtcgcgagaaatcgatttacgccaactctaacgtgtgcagccctctcgttgaggtgctagaggaggtattgtcgattttctcgtgacgtgttcaaaatgcgaaaatcttcgaaaacgcacggatcgccccgatgactaatagagagaccaccatacgaaaacaaaaacaatcgaaaaacaataaaagaaacaaaaactacttaaatgccaagatagccgttgctcgctaggcactatatctaaacgccaggacagctactacgcgctgggcaccatatccaaacgccgaagaagcccccgctcgctcggcaccaaatccaaacgctgatacagagattggttacctctgtagaagcacccagtcaaaacgccgatacagagattggttacctctgttgaagcacccagtcaaaacgccaaagaagcccccgctcgctcggcaccaaatccaagcgctgatacagagattggttacctctgtagaagcacccagtcaaaacgccgatacagagattggttacctctgttgaagcacccagtcaaaacgccaaagaagcccccgctcgctcggcaccaaatccaaccgctgatacagcgatttgtctgctctgtagcggcacccaggcagggcgctgatacagagattggttacctctgtagaagcacccagtcaaaacgccgatacagagattggttacctctgttgaagcacccagtcaaaacgccaaagaagccctcgctcgctcggcaccaaatccaaacgctaatacagagattacctctgtagaagcacccagtcaaaacgccaaagaagccctcgctcgctcggcaccaaatccaaacgccgatacagagatttgttacctctgtagaagcaccaagtcaaaacgctagaataggagttgttaactgtactagcaaaaatacttaaacgctaaggtagcctccgcccgctataatagcacctagcagaacgagagagttactcattaaaacttgagaggaagactcactaaaagtgaacgagagagctactcattaaaatagagagagttactctataaaactaaacaagctgaaaatatttcctttccccttaagagagctcgctggaaggcagcctagctgccctacatctctccctgttaccaaactgctctttagcaccaggcgtctagaaagctagcactagcttaactagacaaaggccgaagcaccatagtcacgcaatacagcacaacgtaccaaattgtaactagtcagatagaacggcctttggccaaagtcttacatagccaacggctgatacaggactataatggaataataatatgcacttagaaaaaaaaaaaaaaaaaaaaaaaaaaaaaaaaaaaaaaaaaaaaaagggctcttcgtccctcccacccgcaaccgcacagagaaaggggaggaggctctctctacccagcgcagcccgagcacccctccaccccggatcgggacccctgctctgcgcaatccacccatggcggaggaatcaggccgccccttgccaaagtttggtgattgggatgttaatgatccagcttctgcagacggattcactgtcatattcaacaaagccagagacgagaagaagggtgggaacggacaagacactgagtcaccttccaaggacaccaggactgagagggtggaatcttatgctgcaaagccaagcacgaaatggttttgttgtgtgacagccagccctacgcaatcctgaggaagacaactgcatgcgctttggaaatactgtccctttaattttctatacatactatccataagacaatgtaggggtacccaggcctctccgggctccaggatgggctatctcgtaaaactcttgcgtgcgtgtatgtatggtgtgagagaattcgcaaagtggacttttggttgtaattcttagtcgtctctctctctttttgggttggtcaaggttctatgatccaaaa

SEQ ID NO: 39910 - DNA, 1877 bp, Zea mays
  Clone ID: MRT4577_13639C.1
catggcatacctcgagaccggccgggggaagcgccggaacgaacgaacgcgcggcgccaccacccacatcactgccctgccgtcgtagcccagccccacccacccagcgccgcccgcccacgccaccacgcggaccgcagccgcgccgcagctgctcacacacacagggcaacagacgcctcctccatccccacgcgagcggacgacacgacgcggccatcgccgcacgttgagatcccctccgctcctcctctcgatggtctccgccagcgcgccgccgccgccgccgcaggcccagtccgacgcggccgggtcgggggaggaagccagcaagaaggtgcggaagccgtacaccatcaccaagtcgcgggagagctggacggagcaggagcacgacaagttcctcgaggccctgcagctctttgaccgtgactggaagaagatagaggcttttgttggctccaagaccgtcatccagattaggagtcacgcacaaaagtactttttgaaggttcagaaaaatggaaccagtgaacatgtcccacctccacgaccaaagcgaaaagctgcccatccatatcctcagaaagcttccaagaatgaaccaaactatggtctcaagacagattcatcttccatacataggaactctggcatgaatgtgtctgtttcttcatggcctcataggtctatcccgcaagctgttgcttcatcgatggtgaaagatttaggtgctggaacaccaggtccaaacaatttttgctcaagcagtactgaaggccctccaagaacttggcaacctggtgaaacaaatggtccaataaatcaaattccgtcactccgccttatgccggattttgcgggagtgtacagcttcttaggtagtgttttcgatccaagcacaagtgatcatctgcagaaactgaaggagatgaatccaattgatgttgagacggcgctgttgttgatgaggaatctctccatcaatttgaccagtcctgattttgaagatcaaaggaaattgttgtctttatatagcgcttctgatggacctgagctagggagctccaggagttcagctctagcaactagtgcacctttcatgtaaggattaagggtggatagtgtggccaggtctgtccgcatataatttcagttggacagacctcaggatggtgccctggcgtagcaccgatgagtgacgaaggaggcgcctggaccttttcgcttctcgctagcttcaggactgctgattgtgtaagggtgcggccatgaaaggtgagattggtctgcggtcatgaaaggtgagattggtctgcggcctgatgtgtatataaaatttttgccacgaaggaggcgcctgcacctatcccaaaagctcggccatctagggcattggatgctgcttcagttcagataatcaaggctgtccttggaaatgggacgagaggaaagatcccttccccattcgttgagttcagttctctgattggtttcttgctgccctcttgatacggggacctgtgcgccatgtggccgtctcgctgtttatgtgggcaagtttcacttgaggagttgagagggcttgaggcgatcgtggttttgtagagcaacgagtgcaccttccgaatattccttgttcctgtgtgaatcgtctatattgcatcaggcgtcgttgccattgtgtaaaagggaaataaaatcacaatgtaaaggatacactaccatttgaattgtattcagtatcgaagccctgtagtgcatcaggtgttgttgcccacgtgtaaaaggaaaataaattcacaatgtaaaggagacttgtgcgttagcactaccatttgaatttatgaaatgtcaaagcaaaaaaaaaaaaaaaa

SEQ ID NO: 39911 - DNA, 833 bp, Zea mays
  unsure (1)..(833): unsure at all n locations
  Clone ID: MRT4577_1363C.1
gggtacctcgaggccggccgggatcattattcttgttacacaanncgacgccaattgaaaacaaacatacaatttccagtccaacatcgctgcgcgtgagttgacgcctgtttgctctctccgtccaacaccaacacaaaacatgccttccaattcgccatttccagatgtgaaaatcccagatgtcgacctatggggattcatgtttgagcggaaagacagggacttctcagatgacaaagtcatttaccgtgcaatcaactctgatcgaaaatatacatttgcccaagtaaaagacctggcgaaagtattcggcgagggactcctggatctctggggttggcagaaagatgacgttttggcactgtatgtgccaaacgatgtcgatgtcccgccagttatatacggcaccttttatgcaggtggaattgttacgcctgcaaatccagggtattccaaagatgaattggcctaccagctggagaactctggcgccaaggcactcgtgaccacaaaagcgtttttgacaacagcgttggaggctgcaaacaaagtcggcatcccaaacgatcgagtcattttgttgggacctgaaagagatgattctttcaagcacaagcactggtccagtattcggaaggcatccatcttagaacggtatcgcagaaggaaagccaaccccgaagacctgtcgttccttgcctacagctctggtacaactgggctgccaaagggcgtgatgctcagccatcgaaacatcatcgcagatctccttatntctanaggggngtgtaggccactggtactcatcagcagaagacaagttcctaggc

SEQ ID NO: 39912 - DNA, 261 bp, Zea mays
  Clone ID: MRT4577_136400C.1
gtttttgatcgcgagcggccgcccctctttcggggggttgttttagtctcgccgggagcagcacagagtatttttatgtctgcaccaagtgcttttgccacaatttgatccaaggatatgtggagactccaacctttggtctcccaaaccggaacatctgaggggccgagattatgccacaatttagggttctgagcatccattttcagcgatacactctgcccaaatgatgttctgggaacatagatttctcaacacatg

SEQ ID NO: 39913 - DNA, 348 bp, Zea mays
  Clone ID: MRT4577_136401C.1
cccacccgtccgcggacgcgtggtggtataaaagttgcttcctactaattttcaactttaacatgtattcctcgagagatcgtgtataatgttgctaaaatccaccttctacatcttccacggatcatcgaaggtgctacagatggaaagggcacaggaagacacggtatcatcacagctaggacatgcaacgatattttgattgctcttgctgccgtataaccaataactcacaagcgtcttattgagaaggagctcgaaggatttgccattatgttgaacaaaacaccacccactttgacttttataacaaaggacaagggtggaatcaacttctcatcaacagtg

SEQ ID NO: 39914 - DNA, 555 bp, Zea mays
  unsure (1)..(555): unsure at all n locations
  Clone ID: MRT4577_136402C.1
tcgctccaacacaccacatccaagtgcacttcactctgtgcgaggggcgggagagtgagcagcagacagcagcagctgctgccatggaggcgtggagatctctcctcgcgagcgtcgtgctcgccgtgctggccgcgcaggccttggggggcgtgggcgagtccaggaccggtcccgtggagcaggggagcgggggggaccacgtgaagaagccggactgcgtgccggggatggaccctcgctcgttcccggggaccgggggggggcacgggatcacgcccgtgacgccatcgcacgggaggctccagctccccgacgccgtgccacgggggcgggggggggtacgttccaacgccgtgggatggggggacgctgcctttcccgtgccacggggggtccgggtccgggtcctctccgacgtggccctccaccggggggggggcgtacgggggggntncgtgcacccccggggggggcgcgtacgggggggcttcttcgtgcacccccagcgggcggggggcgtatggggggggtncgtgtactcccagggggggg

SEQ ID NO: 39915 - DNA, 322 bp, Zea mays
  unsure (1)..(322): unsure at all n locations
  Clone ID: MRT4577_136403C.1
ccattcacagaggggggtgcccttggggccgcccgccatagcttctgacggaagctctggctgaagaacacggatgatctgcacggttcttgtccatgacacagacgctatggccaccgcttagaggggtgtccgactggtgcacaacagaagcacctccatccatcatattggatcatccttgggcactgatccgtgggcacctagtggcctatacacatctcgattgacgaggtacgaactaattccgcatggtgtaatctgggaccgtccaaactaatacttggcactcacagtagcttggncatgagctgaccgctat

SEQ ID NO: 39916 - DNA, 413 bp, Zea mays
  Clone ID: MRT4577_136404C.1
ggccgggctatgcctagtggggaaaggcgccttcgtactcacctctctccgcgcaaccgaaccttcgccctcctccttccccatttcgccagcggcgcaggccagcaaccacccccacccgccgccatgagggagtgcatccagatccacatgcgggcatgcgtgatccaggtgggtgaacgcgtgctagggcgatccattgccccgaacatggcagtcagcctgatggccatctgcccgacgacacgaccgttgggggaagagatgatgcttatgacacattcttgtgcgagaccggagcagggaatgacgtcccccgtgctgccatgcgacatctcgagcccattgggactgaggaggcgaggactgtcgataaccagcaaatgttccagccggagcagctaatcagcgtg

SEQ ID NO: 39917 - DNA, 266 bp, Zea mays
  Clone ID: MRT4577_136405C.1
tcccggtcccaagcacgcgtccgttcacgcctctttccagatggttttctattcttggcacacaccattttattagtcacgaaagtgagcttatgctaacatctacagctattctccttattatcattatgttattccccttcatgaattttataccatttagttgtacacacacgctagtaatacatacttatcctgcattgccatctgttaatacacacaaaaaacgggtctaagtataaaaaaataaaaaactgtaaacactt

SEQ ID NO: 39918 - DNA, 331 bp, Zea mays
  Clone ID: MRT4577_136406C.1
aaaaatgctaatgtacttgttgtgaagtaattgatttgatgtaatcacactcttggccactgtgggctgactacctctaatgtgctgaaaactaactgcatcctgtggctcagtatagtgttcgtcacaatactgtgtacaccacaactgaacatgttatcatgtggtctccgaacccaacggtgtcagtcgatctcctgcatcagctggaaggattctgtgcacgtaacgctagtccttactagttcaatggctagggaatgttgccattcacaaccttgcagatggtacagttagctgtcatacgacgttcacatgaaccatcatttgt

SEQ ID NO: 39919 - DNA, 408 bp, Zea mays
  Clone ID: MRT4577_136407C.1
gcgcagagaatccccaagcaaacaaacagggttgagggagaggagaggacaggagaggagaggttgggtctgctacggcatggcgtccgatgaagctgtacggtgcggtgatgtcatgtaacgtgactaggtgcgcaacggcgctggacgaggctgtctccgactactacatcgtgcccatcaacttcgtcaccgcctagcacatgagccccgagcacctagtccgctacccgtttggtcaggtatcagctctgcaagatggtgacttgtacctcttcgaatcacgagcaatctgcaagttctctgctcgcaaaatcaagccatagctgttgaaggaaggtaacctcgatgaggcagcaatggtggatgtttggatcgaagtcgaagctaaccagtacaaccgtgcac

SEQ ID NO: 39920 - DNA, 569 bp, Zea mays
  Clone ID: MRT4577_136408C.1
ttttttttttttttttacgggtatttggtctcattttattcgattttaatttttaaattgataaatacaaaaactaaaatacaagtatttaacaatttagaaaatcaaataaaacaaaatagaggaactaaaaaattagtctaaaaaaccaaatactctcatatgctagtagcatgcgaaaaaccccaatcctcatatgagtgtatgtttctatgtcacatggtttttctagcgagtttcagatctgaggcagaagtggctcagcatctgtgatacaatggccgagctggggatgccagctaccaggactcgacctagagcagcttaatttgcgaatttcatcagaacagcagagacagggagcacagacgacggacctgtcgttgccatggcacgagtggcgggcagcggaggaagctcagctgtggcctgtggccatggacatggtttaccgacgccgccttgatgacctccggctcccgtgggtactgcagctagcagaccggcgagcaaggcacggagagtagcgagatgcggaagcaagctctgctcatatgagccaacgcacg

SEQ ID NO: 39921 - DNA, 744 bp, Zea mays
  unsure (1)..(744): unsure at all n locations
  Clone ID: MRT4577_136409C.1
cattgggtacctcgaggccggccgggatcggccgccgcgggcggcatctcccttgggccttggccttccccctccactttgctcgctgcttgttcgcttgcgtgcgcgctttttactgttccgcagtcagtcgccaccacctccattctccgtcttcttcctcgcccgccgacccctgaccctgagcccctgaccaccgccgctgcgcccgctgacatttgtctccccggtcgccgaagaggcgaacgtttacgttgctggattcgcgtttatcttcccccgcattacttaccgttgctcctggagcccgcttggcttgtcttggctagttggcttgggctttcgcagcgctgctggctgttgctacgtcccctcgctcttcctctcctctgctctgctctcagggtcgcttcctctgcccagattgattgctctcgaggctcagatcttggacttggaccctttcgtcggatactcagagttccagaacccgacccgcgcttgctccagcagattcagagatggccgaggtgaagcctgaggacatggtgcatcatctgcccatggaccagctccagggactggagtactgcatcgactccaatccttcatggggcgaagggatcgctttgggcttcaacactacatactgtccttgggcactgctgtcatgatccccacgctgctggntccctctatgggtggaaatgatgatgaccaggccaagggtggtcaaacgctgct

SEQ ID NO: 39922 - DNA, 487 bp, Zea mays
  unsure (1)..(487): unsure at all n locations
  Clone ID: MRT4577_13640C.1
cccacgcgtccgatgactgcgtcaacatccatgtgaaagaatggagagctagagagacgggctatatcagctggtaatttttgtgggtttttgcgtacgtgtcctccaaattacaagccccttttttgttgagattgtcgtctggtagtcagtaaacccgaataaaaaatgtatatattgttttggaatttgggaagtgaacaaaaaccttttgttcaaaaaaaaaaaaaaaaaaaaaaaaaaaaaaaaaaaaaaaaaaaaaaaaaaaaaacaaaataaaaaaaaaaaaaaaaacaaaaaaaaaaaaataaaataaattntgggggggccccttttaaagaatcaaattttccgcccgggggctggaaagatcttattttttttttggggcccccaaattcaattcctgggccgcgggtttaaaaacgtggaaacggaaaaaccctggggtttcccaattttattcccttggccaacattccccttt

SEQ ID NO: 39923 - DNA, 1778 bp, Zea mays
  Clone ID: MRT4577_136410C.1
agtaaatggcagcgaatattgtgaaaggaatggaggcaaaaagtgctccaaattttccaagaatggagaagaagatcatgaacccagcagaaatttgtatcactcttctgctaccaaccctcgttgatcctaggagaccaacgttctcaacagaaacagtagaaccagtcccagtgccaaacaggccatctagtagggtgccaatgccctgccacccaatgcctctgctcaggacatatgctggtgggggtgtcgcactagccaatcgtgcagcagctttgaatgctcccgtggtctctattaaagaaaccatcaccgctgccatcataccaaatgcatggtctgcactgaatgttggtgcaccccattgtaaagggtatggaatgcttatccattgtgatgaagatatgagattggcacggtctgtccgacagttgatctgggtgacaagtgtattgtacttgtatgcaccactttctgtgaggatgtgggcatatacccatacaagagtgatgcacatcagcaatgagaacctctcgaaaacaggaacatgacgaatatgcacgtgcttgagatactgggaaagcgcgacaaataggataagcatggaagaccaatctccacgcatttcccaacccctgggaatcctctctcgaaaagtccaagccccaccagtgcaaccacgggaaccatcccaagtgggctgaagaacctagaacatatagcccacaactggctatatccaagaattatttggatgcttgaggatacaatcagtgaaccttgtacggccctcatagtctgcaggaatctagtgtggccatcagctatacgcgcgaacgaggggtcacggactatggagaggattggaaccacgtaagcgtatgaacctcccatgactgtgggaagacgagtgccgaatagcgtctggagcagcgtcttgatcccagtaacgaacagcagcgtttgaaccaccttggccttgtcatcatcatttccacccataagaggaaccagcagcgtggggatcatgacagcagtgcccaaggacagtatgtagtgttggaagcccaaagcgatcccttcgccccatgaaggattggagtcgatgcagtactccagtccctggagctggtccatgggcagatgatgcaccatgtcctcaggcttcacctcggccatctctgaatctgctggaacaagcgcgggacgggttctggaactctgagtagccgacgaaagggtccaagtccaagatctgaacctggtggagaggctcggtttctggaagtgagagggggaaacgggaaagggtaatcaagcgcagcaggcaggcagcatcgtgcgtgcgtacctcgagaacaatcaatctgggcagaggaaggaagcgaccctgagagcagagcagaggagaggaagagcgaggggacgtagcaacagccagcagcgctgcgaaagcccaagtcaagagaagccaagcaggctccaggagcggaacgagatcctctgacgtggggcaacggtaagtaatgcgggggaagataaacgcgaatccagcaacgtaaacgttcgcctcttcggcgaccggggagacaaatgtcagcgggcgcagcggcggtggtcagggcctcagggtcaggggtcggcgggcgaggaagaagacggagaatggatgtggtggcgactgactgcggaacagtaaaaagcgcgcacgcaagcgaacaagcagcgagcaaagtggagggggggaagccaagggagatgccgccccggccggc

SEQ ID NO: 39924 - DNA, 223 bp, Zea mays
  Clone ID: MRT4577_136411C.1
aaaaaaaaaaaaaaaaaaaaaaaaaaaaaaaaataaaaaaaaaaaaaaaaaaagaaaatcatataaaaagaataaaaataataaatccataaaaaaaaaaaactcagagcggtggccgatgatcagggggttccggttcaggtgccggcgttttccctcatcctcctcgaccgctgtgtcgccctctccgttttcggtcgtcattttcttctccgcgcctttc

SEQ ID NO: 39925 - DNA, 201 bp, Zea mays
  Clone ID: MRT4577_136412C.1
atctcatgaactggccagcgacgccacagttgctttgagctgaagttgaattgatggaattgaactaatcactttttgtagttactggtactatcttatcgtaccagttccttatcgttgggatacttgctgtcaccaccttatttgcgggaggagatattacaggatatgcattcgagattagatccttcaacacacatt

SEQ ID NO: 39926 - DNA, 268 bp, Zea mays
  Clone ID: MRT4577_136413C.1
ccctgccaaggctagtgccggctggcgggaggagatggcctgttgtcggcaacgtgaacacggtccgtgcctgctgagagctggcgctctagaccatactctatggcggcgatcggccacaacattgatcgccgggaactgactaccccgttatccgcgacgcatgtgacgcccatgctttttgccaactgaaaagcaagcgctagtgctacaaccgtgagaagcctgtaaagacatacttggacagaagagtacatgaagctataca

SEQ ID NO: 39927 - DNA, 226 bp, Zea mays
  Clone ID: MRT4577_136414C.1
aataggcatccggataataacggggatcgtgacgccgttccgctatatctcagccatcatgggtgcaaatgatgctgaaatgcacactgggttcccgactgatctaactcaagtagtacatactggatgagatcgacctcgatccacgaacaacaccaacactaacaacaccaagaccactactggacagacacctaactggatgaaagattaccactcggcaccg

SEQ ID NO: 39928 - DNA, 314 bp, Zea mays
  Clone ID: MRT4577_136415C.1
ggctagcaccatacatagtgaagtccactagcagcatggtagcaccaatggcagccaagatttttgccatccttgcgctcctttcccttcagtgagcgcaacaactgcattcattattccacaatgctcacttgctcctaatgccattattccacaggtgctcccatcagttacatcaatgggcatcgaacaccctattgtgcaagcctatatgctacaacaagcgcttgcggcgagcagtctacaacaaccgtttgcccaattacaacaacaatccttggcacatctaaccatacataccatcgcaacacaac

SEQ ID NO: 39929 - DNA, 179 bp, Zea mays
  Clone ID: MRT4577_136416C.1
cccttcacgggcccgtactactatccccgctcccgttagccgccgcgctgctcatctgttggcggctcgcctccctcctcccagacgccgccgtcggctcctcctctagcttgctccttaccccgagctttcaagctcgggctacctggctacctatctcgggggagtagacagagaga

SEQ ID NO: 39930 - DNA, 472 bp, Zea mays
  Clone ID: MRT4577_136417C.1
ggaagcacgcccgcctgcaggagccgggccggtatatagagccggaccgaccatgttgtctagtaggcgggcggcctcacccttcactcagtcttagtctcttattagctaaaggaatctagatagcccagccactccttaaagtggccatcaggcgaatcattggcaccaatggccactgacgaggtccagaccccaaccgacatggtggacgcggaagcggcctggggggagaccccgactgcggccggggcgcacgaggatgtctgccccgccgagagctcgatgtcgacgcacgaggctgctgctcctgatgatacagaggagctcgacagggactagcagctagcagccggcgtggcggcggccgaggctcctgctgatgcagaggggcccgtcgaggccgaaccgaccgacaggaaaaggctggtgatactgctatgtccgaggagactagagtactcgagcacga

SEQ ID NO: 39931 - DNA, 308 bp, Zea mays
  Clone ID: MRT4577_136418C.1
ggtgtttctcaagcagctcaagtctggcctgctccttatctctggtgagccacgcttggttcgctgcctctgatcacagcataagttttgagttgaatgttagatgtaaatctttacgcgctggttggctcaatctgtgaactatattatttgtagagtttttaaagaatccgaattcagtctggactataggacctgcatgcgtgatataagggcatccgggctttggtgacaagggaattggaggggattgaaggggaggaaagttcatgctattcaaaattgaatagcaagggatttcctcccct

SEQ ID NO: 39932 - DNA, 289 bp, Zea mays
  Clone ID: MRT4577_136419C.1
tttttgaaaagctatcggaaagaataaaaccaggggcagatgcatacagctagcatcaatatctttactgataactgctatccctgctgatctgcattattttcgacccctaattaacggggaaatcacaattagtacatttatgcgagtatttactctctcccctctactgtaaccagctgacgcgtattgcgtattgaattcactgtcctggactgctcaaagactagatctgcaatgcagaactcaaagaaactaaccactttagagggttaataatcataataac

SEQ ID NO: 39933 - DNA, 444 bp, Zea mays
  Clone ID: MRT4577_13641C.1
gttgaacaaaaacatgctgaaaacctagctcatattattaatacagtaaggtgactaccaccttatggtccatatgatcggacaaacgagttcaagcatcaagcatcaagcatagaccttttgtccaacagcagccgaacggcccatcaattgcaaatctattgcgtgaccgtacgcatatcctgccgatgggcaagaccactgacttcttcccagactgactatagatgagctccagataaggtatatgtaaacctaaccaaaccccaaataggaaaactaggagtgagactcattgtacttgacaaaaaaagccagattatacgctattgattctctcgaagggagagggaaaacaatgtttctgagcaagggttcataacttgtgagataaagaaagcgctgcttatcaccactaaaaagagccttgaacttaaatttgtc

SEQ ID NO: 39934 - DNA, 375 bp, Zea mays
  Clone ID: MRT4577_136420C.1
atttttacctattcaattttttaggggggggtttaataaactatcccgtcctcgccaccccaaagggttaaaaaaactgggggggggcaaagaaaaaaaaaacccccgtgaaccgggaaatttttttttttttaaaagtcatgataacctttaaccatataccgggaccgggaggggaaagccccctacctgtttggcccccggaacccccttgacggggagcaaaaaaacaggttcccttaggtgggggggctttccctgggccgggaacccgttccccgggcggccccctcttggggggaggaggggggggatacctggccctccacatcaaagacggactttagccttccggccacggtaaaaagatttttt

SEQ ID NO: 39935 - DNA, 520 bp, Zea mays
  Clone ID: MRT4577_136421C.1
ttgtttttttttttttttttttttttttttttttttttttttttttttttttttttttttttttttttttttaaggggaaaaaattttgggtggggggggttggccccccacgggaatcgtttacagtttagccaaaccaaacaaaaaggagggggaaaaaattcccctgttaacgggttttgaccctaaaggaacaacccaaacgggccctttttgctccccccccccccccccaagttgcctcaaaaaaaaacccccgggggggggaaaatttgaaaaaaaaggactttgcccggggctacaaaggggagggggggcccccccggggttgttgttttgaagggagcttcccccgggggggggggcatttttttggggccttaaggggacccttgaggcccggggggaaaaaaaggggaccgaatacgggccaccccgttttggttttttttttaaaaaaaaaggggcaggtgagttttggttctttagaaacctctttaaaaggttaaggaggcccct

SEQ ID NO: 39936 - DNA, 519 bp, Zea mays
  Clone ID: MRT4577_136422C.1
ctcgaggccggccggggaaattgtgtgcattccgctattcttgtacgccaatagcgagatgagtgaattctttccggtacgatcccttactcccgcgtatctctcctcgcgatacatcagaggagtggcgaggaaccctgtgcggtctcgggaatggagtgcgtatgtgtgcgtggttcgtccgcgacttcgcgctggcggcggacgacacctccgccgcgcatagtattctcgtacacaagaccgaagaagactcgcgatggtgctctcactctcaaaagatgatgggtgcttcgggcgagcctggtgatctgtcgctatttacggagctcttactcaatagcctccacctgtaccagttccggaacaccatcccgctctcaaccgacgacgccgacaacttcacacgcgaagcaactcgacacagctcttcgcaagaatacatatatgctcgatattattgcttgaaggatatgataaggatgatgatgcttccctgtactacatcgactacattgc

SEQ ID NO: 39937 - DNA, 176 bp, Zea mays
  Clone ID: MRT4577_136423C.1
ctgcaaatgcatacattattctacattgattactagctgctaaatacattattccacaccatgtgggagcatgctacttgaatgtcctttaacactctctgtgcagcctatatctaaaaaccgatgcggtgggtttaacaaccatggaatgaacacatgtggaattaaataaacca

SEQ ID NO: 39938 - DNA, 155 bp, Zea mays
  Clone ID: MRT4577_136424C.1
gcgatcccaatatgcacctttagctcatcaggttgaaatcaacacacatagtgtgagggattgctgcattcattcaaccagacgccgtgtttacaggtgcataggtatgtcggacactactgtgatcacatcactcacatctggctgctaacgaa

SEQ ID NO: 39939 - DNA, 581 bp, Zea mays
  Clone ID: MRT4577_136425C.1
actcttgtgaatcatataccactcagtcacgaaacgttggcagtgcctttcctcctgctgtcctgcacgatggcggcggctcagcaggtcatggcagcacccgttcatgacaataacaattgctcaaaggaggagaagaaccgtggcatcacccaagacatgcccttcaccgaggcggaggaacaagctcctgatgcaaaggtgcgtgacaacggcgactccaaggacgaggaggtcacgatcgcggttgataccgatgaggggcgaggcttagcacaggaagtcgaagccaagctcgtcgtcgagcctgcagaaggtggagcaaaggaaaccaaggaaggaaggccccgcgtggcgaagaagactgagaaagcggccgccaagggggcggtcgtccccgtcgacgaccacactgatgatgaggctgctgagccgaaaggggcaaagaaggcccagaaagcggcggccaagtgggcggtagtccccatcgacgacgacactgaagatgaggccgctgcgccgggggcagcgcatgttgctcctggggaggcggcggaggcagctggcgaggaagcggccga

SEQ ID NO: 39940 - DNA, 707 bp, Zea mays
  unsure (1)..(707): unsure at all n locations
  Clone ID: MRT4577_136426C.1
tcctgcaaagctactcttgtgaatcatataccactcagtcacgaaacgttggcagtgcctttcctcctgctgtcctgcacgatggcggcggctcaggtttttatagctacctgcatcttcttgatcagtctctgatattgtgttgcatatgtactaatcaatgaacacacaactaatggtgccatgcatatatacatgagctatttgacttagtacgtggtagattattgttggtttgatgtcggatgatagtcacttttgtgtctcacttttcgatcgaatgttcagcaggtcatggcagcacccgttcatgacaataacaattgctcaaaggaggagaagaaccgtggcatcacccaagacatgcccttcaccgaggcggaggaacaagctcctgatgcaaaggtgcgtgacaacggcgactccaaggacgaggaggtcacgatcgcggttgataccgatgaggggcgaggcttagcacaggaagtcgaagccaagctcgtcgtcgagcctgcagaaggtggagcaaaggaaaccaaggaaggaaggccccgcgtggcgaagaagactgagaaagtggccgccaaagggggcggtcgtccccgtcgacgaccacactgatgatgaggctgctgagccgaaaggngcaaagaaggcccagaaagcggcggccaagtgggcggtagtccccatcgacgacgacactg

SEQ ID NO: 39941 - DNA, 170 bp, Zea mays
  Clone ID: MRT4577_136427C.1
ggtgcttccccctccgaagcaagcagatggggttcctacatcggattccggccgtttttgaacgttcggggtcatgaaaaaacccttctatgcaggtaacaaccttctggaggtccccaacggatcgttaaaataggccggacaggggctccccccgccccgcccctgat

SEQ ID NO: 39942 - DNA, 727 bp, Zea mays
  Clone ID: MRT4577_136428C.1
aggaattattgctcatgaaaaatcacggtcctcactgtccaaggtgattaggtcaatacctgtaacaatctcaatgatagaaaggtcgagctgagattacttggagaaaaagcagtcaagaggaaggactacaatggtgcgttggagctctactctgaggcgattgggctagactccttcgatgcaaccttgtattcaaataggagcctttgctatctaaaaattggtgaagcccagaaggctttgttagatgctgagacttgcataaacaaccgacctgattgggtcaaaggttactaccggaaaggagctgctcttatgttgctcaaggagcacaagagagcgttggatgcgtttttggatggactgaaagtggatcctaccagtgctgaaatggagaaagcaatgcgggaggcgcttgaggccgtgaaaatggagagtgttgctgttcaacgtcagtagatgatcctgcctcctgctgagtttggatgggatgatcctttacgtacagctttactccttttgctcaaaatgtcaccaccactctacttaatttggttgtatcccgtggcatgtttttttttaaaaaaattcgttgtttctgcctactttcatgacggtgtgtcctccttgcacaactcggaggatcacatcagacggtcggactagtcggttttccaaaccaaatatagcagaatacaaagtttggcacggcaagcttcagatc

SEQ ID NO: 39943 - DNA, 439 bp, Zea mays
  Clone ID: MRT4577_136429C.1
aaaaaataaaaaccacttttttttccttaaaaaggtggggggggccttccttttcccattttttacaagcccaaaattggtcttgggtcctttgacaaacccttttttccctgagaggggccatggccccgttaatgaaacccatttaaacaattttcttttccagccaaaccagaaaattaaaaacccccctgtatgttaaaatcaataaccccccccctttttttcctttgacccatttaaatttaaaggggggattcctgtgggtggcaaattttttaaaccaaatttttttgttttttgaaggccaaaaaacctttgccccaacacaaaggtcttaaagtttggttgttccaaaacctccatccaaaaaaatttgtatttgaaaccccccgccccaaaaaaccccccttttcccccccttttgtaatttttaaaa

SEQ ID NO: 39944 - DNA, 595 bp, Zea mays
  Clone ID: MRT4577_13642C.1
acccgcgtccgccccgcgtgcgcacagcggccgcccacgcgtacgagccaaaagcatgaccgacgcgaccacgatgggaggctgggtgcaagtcgggtcactctgatgcagccggccaagatcggcggccgggcgccctttggctcgctgccgtcccgcccgtggatgaaactcgcctggagggagttcggcgtcaacgccggcgccgccaggatcacgtgctgcctggaggacgtcaccagcaggtgcgtcgactccgggaagatcgccgggttcacgctcaacacgttggcgctcctcgagttggacgcgagcgcggagggcacgcccaaggaggctgacctacgacaagatccagagcaaaatgtacatggaggtgaagggcacgggcacggagaaccagtgccccaccatggacaggggggtggagtagctcccgttcaaggccggcaaggaccagatgaagaagctgagcctggagccgacgttcttcaccgtcaaggcggagggcatcgtcaagaacagcccgcacgagatccagaagaccaagctgatgacccgcctcacgtacactctggacgagatcgagggcccg

SEQ ID NO: 39945 - DNA, 1627 bp, Zea mays
  Clone ID: MRT4577_136430C.1
ggaggcccagaggtaaagagcggaggagattaggattgaagttattatatactactccataataaaaaaaatagaaaggaaaaataaaccaggggaaacgcgcagcgcacacaacacaatccgcgggccgcggcaggaagtgcagaggagaattcacagatcaaactcgtatgcaagtgcagatcaaaactcaaggagaatattggtgaagcaataacttgatatagggttctagaccaaagaagcaatggaaaaggaatcatctgccacatacgagccaaaaaggaacagtgaaataagggtttttgagagttcagatgagatttcaacggatcttgctgagtatatctcacaagtttcagaaatttctgtcaaagaaaggggatactttgccatcgccttatctggaggtcccctagtcagttttttggggaaactttgtgaagctccatacaacaagacactggattggtccaaatggtacatcttctggtctgatgaacgtgctgtggcaaaaaaccatgcagagagtaactataggttaacaaaagaaggattcctcgccaaggtacctattctgaatggccatgtctactccataaatgacaatgccacagtggaggatgcagcaacagactatgaattcatgatcaggcagctggttaaggtccgcattttaggagtctcagagagaaacgactgtcccaagttcgatctcatccttctcaccatgggctccgatgggcatgtggcctcgcttttcccgaaccaccctgccatggagctgaaagacgactgggtcacctacatcaccgactctccgcagcctcctcctgagaggatcaccttcactctcccagtgatcaactcagcatccaacatcgcaatagtgtccaccggtgatgacaaagcaaaggctgttcacatagcagtttctgacatggccgaaggtcttgatgctcctacatcgctgcctgctagaatggtccagccaacggacgggaagctggtatggtttctggacaaggcggcggcatcattccttgactccaagaacgacgatgacgacgcttgctacgagcgtcatgagtgactaactccgaggatccttggtcgttttgaagcgaatgaacggaggtgtgtgtaagtaggtggttgcgtatgatggaagacgcgctgttccccttttagctcgatgcatgggttaattttgttctgagggtttttagctccggaaatctgaaattgctcttggtccttttgcagtgaggtgatttaaaagcgatgaaatgtgtatgcgatgttgagtcgtcaaagaacaccggaatttaactgtggtcgtataatattatgtgctacattctatgctatggcagttagttttttttttttgtattaaaaaaaaaaaaaaaaaaaaaaaaaaaaaaaaaaaaaaaaaaaaaaaaaaaaaaaaaaaaaaaaaaaaaaaaaaaaaaaaaaaaaaaaaaaaaaaaaaaaaaaggggggggccgtttttaaaaggacccagattttacttcacccttgcttgcgaaagaaaaagttttttttttgggtgccccctaaatttaatttcattggcccgggtttttaaaacgtgcggaattgg

SEQ ID NO: 39946 - DNA, 356 bp, Zea mays
  Clone ID: MRT4577_136431C.1
gcagtattcatcaacaaatcgctgaatcgaagtatgtattatttgtagagcgccactacaactcggcagatacctgctgcctacgccgagcatatttaatcaaccaactgtggcattgaactgtctgattattacagcagcatcaactactatcattcaccagtagctaggtgagcaagtgctacgtttagatcaaccacagatgatgacgttctaccatgacgctgcgccttacgctggcacactcttacaactgctacaattgctgcgattcaaccaacttgctttgacgaacccagcagcgttctaccaacaacctatcattggtggtgccctgctttagatttctaatgagt

SEQ ID NO: 39947 - DNA, 553 bp, Zea mays
  Clone ID: MRT4577_136432C.1
tttttttttttttttttttttttttttttttttttttttttttttttttttttttttttttttttttttttttttttttttttttttttttttttttttttttttatataaattaatttttttttaaaacaaaaatataaaataaaaaaaacagaaaaaactaaacccaaaaaataaaaaattaaaaaaaaaaaaataaaaaaaaaaaaaaaatttaataaacagaaaacttgtggggagacccaaaaaaaaaaaaaaattgagaacccgaaacttaaggaccaccacctttaggtataccaagttttattatagataggcgtaataaagctcgttgctgttacctgtttaaattttttatgcgttaaaaatttcttcgctcaaaaaagcaaaaaacataaaacctggggggaaaggggagtaagccaagggcccaaaaaaaaaaaaaagaactcaccttaatggcaaggcccgaagtgcccaatgtgtagtggaaaaaaaaataatgaaagggacaaaaaaaaaagagaggcagacgggaaaaggggagtcc

SEQ ID NO: 39948 - DNA, 827 bp, Zea mays
  Clone ID: MRT4577_136433C.1
tgcgcacgctccaggcagatctggccacattcacatccgaccctgaggatgtcgactctgcatcgtcgctgaggacaggtcactactcgatcgtcgtaggtcggcggaggcaggggaggagacacaacgcacacacgccggtggcagggccgacccccacacgccgggtctaacccgatcctcgtcgtctgtggttacttcagtgtcatcacggccaccaccgtgcttctctgtgttgccgtcaacgtcgtctccgccacccagtccttccacgctggctatgacgtgcgtggaacgccccgcttgccctgttccattccagtgcaactttccctctcctggatccggctggttcggggaggtgcctcatagagcccccgcttgatctgtggtcgggatcggattagccgctatgcatctcatggtgtatgctgttgaagcctgtgaaattgttgtccacgtaatatgtcattcgatgtagttttcttttcagttcaagttgctcaggcacacgttcattttggagtcatatgggagcaaatagaacccacattcctaccattgactccagtacagtgtgctgtcgtggggtgaataaaagcagctaaacagaatgttttgtaagatctaagttggtaagatctgcagcttcaagtggattgcaccacaagttctaaatggaacaatctaatgcaaaaaaaaaaaaaaaaaaggggcggccctgatgagaagaagaaaaaggcttgcacacctgacaacagatgaagttaggttacctcagaagtcatcaacctgtgcatcagggtttcttatgtccgctgctgatt

SEQ ID NO: 39949 - DNA, 229 bp, Zea mays
  Clone ID: MRT4577_136434C.1
gcggtttcaggccatttgatatcaacactgatcacaggaaaacaagatgctctacacactggatacatgtggctgcagatgccaggattggaggggatattatccaccattgtgcatagcattggagatcccaagatagacaacaataaaatgagccggcctcatgagccagcatttacaaatgttgatggaatcatggatggactagttttgtcagcttcatactgta

SEQ ID NO: 39950 - DNA, 349 bp, Zea mays
  Clone ID: MRT4577_136435C.1
ccttaaagggcgccctttttgttttttttttgacaaagaaaaacctttaaagatgacggaactgattacagcaaccgagcttatagcaattagatacgtgcggaacttatgcatttgatgacagtaagggaatgacacagaagggggcatggaaaacccgattaagccgtcttcttattcttggatttgagcatgacaagggccacaaacacgctcaagaacgaaaggagaaccacgccgggcagtaccggaattaaaatcgcatactgttgaagcaggaagctcttgtgaaaaagaagtgcgttgcaaacacacagaaaatacaagaccgaaaaatagaaggttaaaa

SEQ ID NO: 39951 - DNA, 363 bp, Zea mays
  Clone ID: MRT4577_136436C.1
cccacgcgtttgtttaatggtcatatataatacagtagctgatgctgactattgcaacgataatgatctggttgtgcaaacattcattgcagctgcgggagacaccacccgctaatgcagaaggaggagcttacaaaatttgtcttgttgctgaacaatacaataacctctggggcgtataatactgaaagtacatgaacgtagatacgaggaaatgctctctggtgctagattgaaactgaccccctttatccgattaagaacctccttacgggcctagagggtcttctatatgacctgggaggtgagctccatgctgatgaaccccgcctgtaactgtgagggagcgaaatacacgccctc

SEQ ID NO: 39952 - DNA, 320 bp, Zea mays
  Clone ID: MRT4577_136437C.1
atccgtccacgcgtccgagctatatctgtgccattaacaacttcaaatttggatgtttgttcagggatcagctggcagtataactaaatcccatattgttttataagaatatgcaatgcacgtagtcactgttcacttgccgttactagaatagggtcactgagtgtttaatgccttgctgctaatattttttctcacctgcatgtgtggacgctcatgaactacgtctcctgaatagttaaatgtctgggttatggtgaagtagtgtgattcttgtgtacctatctacgtgctttcttatttttcaaaatgcttcgctt

SEQ ID NO: 39953 - DNA, 132 bp, Zea mays
  Clone ID: MRT4577_136438C.1
agaacatcgtgaggtttttagggtactgcttccaagaggaagggaggttcttcatctacgagtatgtgcttaacaacagccttaataaattttggtacaaagcatcttctcaatgccagaagctagagtggg

SEQ ID NO: 39954 - DNA, 1390 bp, Zea mays
  Clone ID: MRT4577_136439C.1
gagaaagatgaatttagcaggctgttgaaagcaaaaatcaatgagcttggcatgtcggacaggatcgagtgtacaccaaatgattcaccttcaggaaaattgactgtgcctgtgctgcaagagctcatttctgcccttgcaactgacatgagcacttcaatctcccaatgtagcaactactctggtgcatcagcacccttacgctgcaatggaaatgttgactgcatcaatccagcgcattgtatattctccaatgagcaatcacctgattttcagaaatgctatcagggtgaacaagatgttgattcttctgctacatcgctaaacaatgagcccaatcagccaagtccaacatcagtccttgaagcatccttctcaaatgatacttctttaggaagtccagttgaaaagaatgaaggaaaagacttcattgtgtcaattgagaacaagatggaagatctctttaatttggagtctgacatcgtcgatttagcaatgtcaattgacacaaggaaaactgatgctgaagaagcacaccatggcaatgacaagttatcatgtttacagaattttcttgcacatgatttcaatatcttggaatctaggctctgcagcattagagaagctatttcaaatgctgaactgcttctgggcattagcctcttgcatagcacaacatcaggtcttccactccatcctttcattgttgaaacgctagaaaatactatggatatgtttagtggaggagagtactcagattttactgaagataagaagtatcaacataccaacttcctgtttgactgcattatagagtcactggattcaaaattctgcaatcttggcaaatgtggatacaaggcttggctgaagttgcctcacagtttgagcaaagatctgttgaagcgccagctattggaaaacatcagcaactggagggagtcaagtgggactgctcttagacaagtttctgacaaagaagtggaccaagtgactgacaggtgggatgcaaaccttgaagcatttgatataagcattgcaatcgagaacgacattcttgaggcgcttgtcggtgagttcgcagttgacctatggtgaaacggcgtattgactgccctatatgtatatgagatattgacatgtttggacttctgctcgcatgattctggataaataagatactgcggatatgtttgtttttttttccctgcagcaaattttgtacagagccatgtaaggttgaagggcctccgtgtttgttttacccttcgtatgttataatggaaacatgctaaagcttaacaatgtctcctaatctttgtggccgtcgctccttttacccaactggtaacatcggatctgttatcaatagcattcgtataccatatgg

SEQ ID NO: 39955 - DNA, 343 bp, Zea mays
  Clone ID: MRT4577_13643C.1
aattcccgcctcgacgcacgcctcctaacgctcacatctacattctctatctgcgtttccgccgttaccgatcacgttctctaacgcacccttatacccatacctggcctccgatctctatccacaactagctacagaataatctacagatcattacacacacaatgcatacagtcctgtccatgatgttactgatacactgcacaacttaaactgatacaaatgtcatcactagccttgcaatatgatctaaattctacattatccctattcttgctattgctacacttactcttcttaactttaaccttacttccatgtacgacattgcttgagctcctct

SEQ ID NO: 39956 - DNA, 474 bp, Zea mays
  Clone ID: MRT4577_136440C.1
tgagatcggtgttctgtctgggtgcctacaataatgaactatgcgggcgggcatgtctcgtagcgaagcgtaacgctctatcaatcctgaaccgtagcagcaccgtaagagatccgaaagaccatactcacatagtggttgacatgcttaaactgttggagcatgactaatgcagcaaccagatacatgctctcactgacactaacggacggctgcaaaaaccgaataagcttaagctacaccagaacccaattgccatgccagcagaggacattgtcaacaagggcgttgatgctgtaaaagagtaccatgttaaggagtgggctcgacatattggtcgaggaagaacaaaggcgcatggctgaagagacccacagaattgctaacggctccttaagcttgtctgactcgcagcccttcatgcgtaactggacgtatcttagagttatggcagggtaccatgggtggggaaca

SEQ ID NO: 39957 - DNA, 111 bp, Zea mays
  Clone ID: MRT4577_136441C.1
ggctacgatcaaggtgagcttccggtctttatcaatctaatatcctgatatgtgcactatgtgttaacttggatattaagtacatttttggagaggggagagtcgatcacc

SEQ ID NO: 39958 - DNA, 211 bp, Zea mays
  Clone ID: MRT4577_136442C.1
aaactgagcactgttgcctttacgcaaccaagggactggggacaacaagcggggaaaaaacagacccgcggaagacgggccagacgccaaaagacgacaaggggatgcacaagaagaacatgcgggaacgagcaagggccaaagagaccacacacccggcaaaaaggagtcaaaaacccctaccgaaaccatggggagaaggaaacccgaa

SEQ ID NO: 39959 - DNA, 785 bp, Zea mays
  unsure (1)..(785): unsure at all n locations
  Clone ID: MRT4577_136443C.1
ggcaaaggctaccagttggcaaagttaaaaataacaaaactgaccgagtaaacagatgggtagctttcgagctaatcttagcatctgctaaacttttttttttttttttatcatcatcataggcagtcttattgatctagtgtactgaagaacagaaatgctaaaaccattgaagtaataacctgatagaaaacccgactcctgcttcaagactcccttggtaagcttgggggaaaaaaataaattgaattggatgaatctgtacagagccccacattcatcacttcgcggcaagcttggttcaggtctcctccgctgcagccggtgggaagttgagatcaagtaacccgtcggcgactgctgaatgctgctcctgatggtctgcgccggcgccggcgacatagtagagatcgacgccgttggactcgcaggacatcagatgcgaccgcttgtgctccaactccgcgtcgggcaccgcctcgtcgtccttgggcttgccgaagccgatggccaccgagtccggtgacgcggagggggacatcgtgttgaacgacgtgtacgtctcggtgcttggctccggcggcgcggaggacgcggcgggagtgatcttattcttaggggagctgcagctggcgttcatgcgcttgtggctcgcgcgatggccgccgagcgcctgatacgagctgaacagtttgcggnatcccggacactcgtaccgggtccgcttcggcgccacgggcacggaatcgtgttgattctttcgggaaagctggttcctggttttg

SEQ ID NO: 39960 - DNA, 395 bp, Zea mays
  unsure (1)..(395): unsure at all n locations
  Clone ID: MRT4577_136444C.1
aaaaacaatacttttttcttttaatttcaattgttcattcacctcattgctcacactaacactgccacccatggtcatgctttacacattattactcaatcatcgcccttaaatcactcaactagctagctagccagggggtatactacancacataatttattcactgcgggacacctcccacatcancttacggtcatagattcggctacttcacacctcacatccacctcagttgctgcgctatcttcgcccccaacagccccgcgacctggccgctttacggctgctgctgcaggatggactggaggaccaagcccaatatctcctggtaccggtgctgcggctccacctgcctgagctgctggcaacactgctgccgcaaccactggcac

SEQ ID NO: 39961 - DNA, 614 bp, Zea mays
  Clone ID: MRT4577_136445C.1
aaaacacatacatattaggaacggcgccgtacaaatgtgttctatatatgcttaattctttctcttattctgtgtagaattaatgttcgagcctttattcttggtgattacattcttgttctcacaagcattgatgcatatatgtagctgaatggtgccaagttaatgcccaaataaaggatgcatgcagtagtactactgttttagggctcctcattttttaagggatttcaatttccaaagaaaaattagtttattttttctttaaaaaatgaaaatctcttgtgaaaatggagttgccgaactagcggtaacttgttggcagggatatccaccagctggttttctattttcaccggccagaagtggggtagtacgtttgcgttcaacaattcatgtgcaatgtgacaggcactggtgtcctttttttttaaaaaaaaagaagagacacgtaatgctgcagtcctatatggatcactagtgtgacaagtttactgctgaagaccatgtctgtgcatgcaaaagaagtacaagcaagatcagcccgcatgcggccggccgggatttgtgttctcatatatggctgttttagcgctgtcactaaactgttgcca

SEQ ID NO: 39962 - DNA, 210 bp, Zea mays
  unsure (1)..(210): unsure at all n locations
  Clone ID: MRT4577_136446C.1
ggccggncaggcccggccccgacccacgcgcccgcacgtgcagctgtcgggagcaggcattggcgccggatctaagctgaactcacacgccgccgctcgagcccgtggagcgtacctgcccagcgtcggggaaccgagcctgctcgctgactgcttactaccaatagcgcgagcggaccagagtgcgacataactcattgatgagtagac

SEQ ID NO: 39963 - DNA, 2680 bp, Zea mays
  unsure (1)..(2680): unsure at all n locations
  Clone ID: MRT4577_136447C.1
ccggccggggacttctctagggtttagtcgcgccgccggcgccgccggagcagacatcgctctctcgatctcagccatggcggaggtggagcagccccaggacgcggtgaagctcttcaaccgctggaccttcgacgatgtccaggtgaacgatatctcgctgaacgactacctggctgtgactgcggcgaagcacgcgacattcctgccgcactccgcggggcgctactccaagaagcgggtccgcaaggcgcagtgcgccatcggcgagcgcctcaccaactcgctcatgatgcacgggcgcaacaacggcaagaaggtcatggccgtgcgcatcatgaagcacaccctggagatcatccacctgctcactgacgccaatcccatccagggggtcgtggacgccattatcaacagtggaccacgtgaggatgccacccgtattggttctgctggtgttgtgagaaggcaggctgtggatatctcacccctgagaagggtgaaccaggccatctacctcctcaccactggggccagggagagcggcattcggctcgaggaataacaacaagcggcccggccgggatgccccgtggtggtggcgtcatcgtgtctccccgatcccctctcgttcctccctcgtcgcctcatcaattcaagatccaatctttgctgctgccactcggcgatccgatcgttctcgagcaaggtcggtggccatggcacgctgccgccatcacctcctcctcctttccgtcttacttgccttggctgctgctgctgcgcggcaggcgcagagtcatggggaagcctccgccgtcttcatcgatgcctcgtcgcaccgctaccttcgggaccagcaagccgaccaccaggacgcttcaatgtcgttaaatgaagtttctgcggttgtttctgtcttgcttggtttcgcaccgtcaacatccctaccagctatttcttcttcgaagttgaacaaagttcttcttcctaatccatttgatagaccgcgtgctgttttcctcgtgcaaattgatgggttcaatgttcctagcttcgtatctgaaggcagcaacattttcaagaccaggattgaaggtgcaaacatcgctgatacagggcttacagataaggatgacttaattgtcattcattcagatgaatctctagatctctctcgatcagattatcttgataatgaactttccagcttggcaaactggttggagggatcttatcagaagtctaccggcaaactagtcattcccttggagaatggaaacagtcttactttgcaacttgataaggaagcagacaaggaattcatgtccagcttggcttcccttcttaagactattgaaagggcgatccaggttcatgaagatttctcaggtgtcgtgaaccctgcagagttattagaatgtcacttcacagggttgaaggctctggagaatgaatatggttctggtgaaattgttaagcagggaacagaaatagttcagagagctgtcaccaaatcattccagtccctacatgaagcatacaaagggaaaattgttgggctggtaatatccacaaatgaggctccatcatccttaggatccataattgacgcaccatcttcactgcacatttcaagacggctagaagaagcaagcaagactacagacatagcctctgtcgtacttgttcgaaagagcttggcatggattacagggatcatcctgcttgtttcaactctcataggggtttgcttgcttatgaacatgccacttaccagggacaccctcctgtactcgaatgtcaagatcgattagtttgaaggggtgttcgcggcagctactcttggggttcaactttggccttgtgtatttatgggatggatttcagatggtagagacgtatgcttgtgctgttcacaaaaccagtgtacaatgtgatactaggtgctacgtgcctttctttttttaatctgtgcttccatcttgcctgtatgggctgttttgttgttgggttcccggtaaataatccagagcagtggcacaaacgattagttgttgcagaatgctactgccttttctgaataaatctgtcattgtaatcgaatttcaacttgaataacagtgtgtatgctatgtttgtggcgcaaaaaaaaaaaaaaaaaaaaaaaaaaaaaaaaaaaaaatttttttaatctgtgctgcactcttgcctgtatgggctgttttgttgttgggttccggtaaataatccagagcagtggcacaaacgattagttgttgcagaatgctactgccttttctgaataaatctgtcattgtaatcgaatttcaacttgaataacaatgtgtatgctatgtttgtggccaggccgctgtggaggcatcactttcagatctcccagggnctcatttttgttgtggccagcaatgatagggaccgcgttgttgaagcaggggatgagcttcaccgnntgctgaatgaggatgagttacgtgatgctgngtngcttgtgtttgcctccaagcangatcttcccaatgctttgaatgccgctgngatcactggtnagcttggactgctttcacttcgccagcggctttggtccattccaagcacttgggctccancgggtgagggattgggtgaaggcctggactggctggcccgcnnccttgca

SEQ ID NO: 39964 - DNA, 727 bp, Zea mays
  unsure (1)..(727): unsure at all n locations
  Clone ID: MRT4577_136448C.1
tttttttttttttttttagtaagtaaaatattattattagaaattaaagataaattctatcgcgacccgtatctaactagactttggcagactgccctggcccttcttataaatcgccttcttcacatccttggtgagaccaacgcctccttcagagaccccatcaaagatctttctccatccaatcgcattaagaagccaaataacatacgcattcgctccccgccaaatatactcccccttgctcaaagccgtcttattcttcaacacatccttcaccaccaatcgtgcgaactcctcaggcttggtaccattcttcagatggagcctcgatctctcacggagaccttcctcagcatcgatgaagatactgtcgggggagaagagctttttgtctgatgatgtgagatgtgttgctactacgcccatgtagagagtgacgaccttgatgccaagaggtgcaagttcaagacgcagagtgtcggagtaggaagcgactgctgctttggtagcgtcgtactgggcggtaaagtagtaagggacccgcgctacgattgacgctgtgttgatgatggtaggtgtcgtttgcgagtcggcgactgatgcgaggagaagtggactgaaggcttggaccatgtcgaagaggccaaagacattggtgttgaacatgttctggacttgctctctgtctgcttcaatggcggnggcctcatacatcattccagca

SEQ ID NO: 39965 - DNA, 784 bp, Zea mays
  Clone ID: MRT4577_136449C.1
ttgcacttaaatacgttttaaatggtttcttgcaaacagattagatattgagtcgcttggatcaaagctttatgaagtaaacctagaccttagtctacaatttccatctatatgactggtaaaatccgatatgttttcgttttctagccagggccctagttgtggaaatcattcaaggagatctatgacgagatgctgcaagctgtattgctttgcaatagccgggagtgtggccaacaagagcacaaacttaagcgaaatttcctctccagctatgtaaaatagaccccttttcctgttatctgtgaactggtttcttcgtattttgtagagatcctagaacattcagatgggccagacaaaatgctgcttctttgtttggttcatactgtacctgggttccccggtcagaatctatggagaaaattgtcctctgtggatagtggtgatgcaggtaaactaccactgacttgtatggattttaactctccccatcggatcttttctaaataaaatgtgttgatccacaattaaatcctgcaggcttgcaatggctatagtctaatctgtgtcccactatatgataatgtaggtgagtgggaggccattaaatagtaggcccacgtcatagaatgtttcagatcaaataataaaatatatgggaacacacactcttttaataagaaatccaatgtaatactttagggaattcagagtcaatacctttccatgtcaaacaggtgcaggagatgttaactacatcattgatcatgttgagattgat

SEQ ID NO: 39966 - DNA, 699 bp, Zea mays
  Clone ID: MRT4577_13644C.1
ccggccgggagtttcttttcttccccgcaagaaagaaggcaagagttctcggcttctcgcgagtcgcgacagagaaagaggcggagttgcggagaagatgcagagcttcagcatgaagagggagatcagcgaggcccacgacaccattcgcttcggcatcaacgccggcgtcaaagccgacctcgccccgccgcacccgctccagtctaccatccaatcggagaccaagttctgggcggacaagaagaagttcgggacagatgccatatacggatccgccctcaacatccgcaaggatctcgatgcccaaatcctctccaggttccaaaggccccctggtgctttgccgtcatctctgcttggatacgaggcactgacaggttccttggatgattttggatttgaagattatcttaacatgcctcatgattctgacagtttccgtcaacctgacatgcaccatggaatggaggttcgccttggtttgtccaagggacctatctgtcctaacttcaattgaggcagtaatgtaattctgctgcaagttcacctctcagtccagtacttcagtcaatagaccatattaagatggtgaaatatgaaaactggtagcttgcatctgttcaatgttatgttttaatcaacgctgaatttaatatttgtcaagtttgaactttgacacccaattttcacaaagaa

SEQ ID NO: 39967 - DNA, 1277 bp, Zea mays
  Clone ID: MRT4577_136450C.1
cggacagctgtcggatcagaaaccctagcgggggaggctctcacctattattagaatccacctcgcaccccgcgagcggtgacttccctagggtttcgtcgcgccgccgccgccgccgaaacagcacatcgctctctcgatctcagccatggcggaggtggagcagccccaggacgcggtgaagctcttcaaccgctggaccttcgacgatgtccaggtgaacgatatctcgctgaacgactacctggctgtgactgcggcgaagcacgcgacattcctgccgcactccgcggggcgctactccaagaagcggttccgcaaggcgcagtgcgccatcgtcgagcgcctcaccaactcgctcatgatgcacgggcgcaacaacggcaagaaggtcatggccgtccgcatcatgaagcacaccctggagatcatccacctgctcactgacgccaatcccatccaggtggtcgtggacgccattatcaacagtggaccacgtgaggatgccacccgtattggttcagctggtgttgtgagaaggcaggctgtggatatctcacccctgagaagggtgaaccaggccatctacctcctcaccactggtgccagggagagcgctttcaggaacatcaaaaccattgctgagtgccttgcagatgagttgatcaacgctgccaagggctcttccaacagctacgccatcaagaagaaggacgagattgagcgtgttgccaaggccaaccgttgagtggagcttgtatcctggtgcacttgctctagaactacgtttctggcagtcgtatttttttcttgtgtttttacccatgtttagactttgagacctatatctaaggttttggttctcagtgaacaatgaaaattactgtgaaatgcagttgttttggtgcagaaatgcgcactgagatattctgcttgtgaatttgtgagtgctgttggcgtcgccgctggcttgccgatgtagtatttcttgtcactcagatgtcaccggttctatgttggcaatcttctgtaggttagacaattgatgatagcaggtgcaaatcaagctgctggtgcagattaggcaaaccaatacaagaatgggaagatcttttttttttaaaaaaaacatgtttcaaaccagcctttttcacccccaggatatttttagcttaccttgcttgcgttggtttgtaccaatagttttatctgcactgcacctctccgtgttattggttaggtgacacaattgtagctatggatctgtttgtttccat

SEQ ID NO: 39968 - DNA, 1042 bp, Zea mays
  Clone ID: MRT4577_136451C.1
ccggccggggacttccctagggtttagtcgcgccgccgccgccgccgccgaaacagcacatcgctctctcgatctcagccatggcggaggtggagcagccccaggacgcggtgaagctcttcaaccgctggaccttcgacgatgtccaggtgaacgatatctcgctgaacgactacctggctgtgactgcggcgaagcacgcgacattcctgccgcactccgcggggcgctactccaagaagcggttccgcaaggcgcagtgcgccatcgtcgagcgcctcaccaactcgctcatgatgcacgggcgcaacaacggcaagaaggtcatggccgtccgcatcatgaagcacaccctggagatcatccacctgctcactgacgccaatcccatccaggtggtcgtggacgcgattatcaacagtggaccacgtgaggatgccacccgtattggttccgctggtgttgtgagaaggcaggctgtggatatctcacccctgagaagggtgaaccaggccatctacctcctgaccactggtgccagggagagcgccttcaggaacatcaaaaccattgctgagtgccttgcagatgagttgatcaacgctgccaagggctcttccaacagctacgccatcaagaagaaggacgagattgagcgtgttgccaaggccaaccgttgagtggagcttgtatcctggtgcacttgcactagtactacgtttctggcagtcgtattttttcttgtgtttttacccatgtttagactttgagacctatatctaaggttttggttctcagtgaacaatgaaaattactgtgaaatgcagttgttttggtgcagaaatgcgcactgagatattctgcttgtgaatttgtgagtgcttgtggcgtccccgctggcttgccgatgtagttcttgtcacccagatgtcccctttttatgttgacaatcttctgtaggttagacaattgatgatagcaggtgcaaatcaagctgctggtgcagattaggcaaaccaatacaagaatgggaagatttttt

SEQ ID NO: 39969 - DNA, 1256 bp, Zea mays
  Clone ID: MRT4577_136452C.1
cctggccgggagaaaccctagcccgggaggctctcacctattattagaatccacctcgcaccccgcgagcggtgacttccctagggtttagtcgcgccgccgccgccgccgccgaaacagcacatcgctctctcgatctcagccatggcggaggtggagcagccccaggacgcggtgaagctcttcaaccgctggaccttcgacgatgtccaggtgaacgatatctcgctgaacgactacctggctgtgactgcggcgaagcacgcgacattcctgccgcactccgcggggcgctactccaagaagcggttccgcaaggcgcagtgcgccatcgtcgagcgcctcaccaactcgctcatgatgcacgggcgcaacaacggcaagaaggtcatggccgtccgcatcatgaagcacaccctggagatcatccacctgctcactgacgccaatcccatccaggtggtcgtggacgccattatcaacagtggaccacgtgaggatgccacccgtattggttctgctggtgttgtgagaaggcaggctgtggatatctcacccctgagaagggtgaaccaggccatctacctcctcaccactggtgccagggagagcgctttcaggaacatcaaaaccattgctgagtgccttgcagatgagttgatcaacgctgccaagggctcttccaacagctacgccatcaagaagaaggacgagattgagcgtgttgccaaggccaaccgttgagtggagcttgtatcctggtgcacttgctctagagctacgtttctggcagccgtgttttttcttgtttttacccatgtttagactttgagacctatatctaaggttttggttctcagtgaacaatgaaaattactgtgaaatgcagttgttttggtgcagaaatgcgcactgagatattcttttgtgagtgctgttggcgtcgccgctggcttgccgatgtagtagttcttgtcactcagatgtcactggttctatgttggcaatcttgtgtaggttagacaattgatgatagcaggtgcaaatcaagctgctggtgcagattaggcaaaccaatacaaggatgggaagatattttttttaaaaaaacatgtttcaaaccagcctttttcacccccaggatatttttagcttaccttgcttgcgttggtttgtaccaatagtttgatctgcattgcacctctccgtgttattggttaggtgacacaattgtagctatggatctgtttgtttcc

SEQ ID NO: 39970 - DNA, 255 bp, Zea mays
  Clone ID: MRT4577_136453C.1
attcggctcgaggccaaacatgccacgtgactctccagcgcagacacaaggagcgctctacaatttatacctaaacataactacgtccacagagaccttgagcctggatcactgctagtcgataaaaatggtcacatgaatcgtcgtcattaggggctgagcaagcccacagcccgctgaaaaccctcaacgatgaatgaagatacacccatgggtgacgacaacacgagggaatgcatggacatggaaaggtct

SEQ ID NO: 39971 - DNA, 407 bp, Zea mays
  Clone ID: MRT4577_136454C.1
gggaacaatggcagaagggcaagtcttctgagtgcctcacttcacctaatggacaagccgccaactccttcggtaactttgccaactacgcccacatgggcgaaggtactcagacacaagttttttcatcctcatgtaggcatcccatagattgggtcatagattcaggagcatcaaagcatgtgactggcatatccacttttttcaaaacatacattccttacacacattctgagtctgttcaaattgctgatggtacatctcaacaaatccatggtgtagggtctatcgagtgtacaccatctcttaacttatcttcagtcctgcatgttccatcttttccagtcaatctcctttctgtaagttcaatcattgaccaattcaagtgtacagtaacatttgatgaa

SEQ ID NO: 39972 - DNA, 386 bp, Zea mays
  unsure (1)..(386): unsure at all n locations
  Clone ID: MRT4577_136455C.1
aaaaaaggaaggtttttaaaagggaaggaattcataacgtttaaagggggaggggttttttaaaagggggggaaactggagtttagaataaaatgtttttttgggaaagggaaaaaaaattgaaaaaactaaattttctattatcctattttttagaattaaaccttggtggaaaaaggtggaattttaaaaggagaatttaatgttcattgaaaagaaagaggtttttggtaatttgggcgataaaggaatgttgggattttaagggaaattggngcttgttaatttttagaaagaagttattaagggttggtggaaataaattttcaaagaacaaaaaaatttttggggggggagaaaatttgatttggggggttactttaccc

SEQ ID NO: 39973 - DNA, 255 bp, Zea mays
  Clone ID: MRT4577_136456C.1
cggaataccgggtcggaccacacccgtccgttaaaaaggccgttttagcaggcacagaggttggaaaattttgttgaaaattttggggggccggtttttgaaatggccaaaggcaccaggatcccaaaggatgttccaccactaacagcagcaggtgcaaatcctgttgaagacaaagcttccttgaaagacctttttgggcaaacagagaacagggttttttctgcctccccagctccggatgatccaaaggcc

SEQ ID NO: 39974 - DNA, 288 bp, Zea mays
  Clone ID: MRT4577_136457C.1
cgctggagacattcaattttttgatgttagaaggtcagcagaaccctacctgggtattgagggacacaggggttcactttcaacatttgcggtttaccggcatgccccaattgttggttgtggcttagccccaaccataattaaaaagtgtagtgtttgaagagagacgcatacacaaaaattcgctcccagccattttttatgggccaaagaatagactgtgaaccggcttcttttttacctatacaaaacacatatatcttcttgtggtggtgatgaagatttttt

SEQ ID NO: 39975 - DNA, 365 bp, Zea mays
  Clone ID: MRT4577_136458C.1
aagggaagtgcgcgttgtggtagttatgctgatgctgatggtcggtggccgattacatacactgcaacttctggtgtatgctcttctcttctggggacacgtaatgtaaccacaaagactgtgtcactgtagcctgtggtacaaaccctgctgtgtatcagcctgtctacaaaatacagcgatgagttgtgacgttacgtttctgacaattcagctactaatgagcacatctttgcattactagagctaagagaagttgatgaactgtcagccatctgcagcacagatcctcactatgcatcagaatcactcttgtttggattatctggatttatgatcgacttaagaatggtggagtttctgca

SEQ ID NO: 39976 - DNA, 106 bp, Zea mays
  Clone ID: MRT4577_136459C.1
tgcatacacgacaaagggatgcgaacaacccgacgagtcaactttctatggctgaggagacatcggccgaaagcaagaccaaggcgaccggaacagcgtgcaacag

SEQ ID NO: 39977 - DNA, 385 bp, Zea mays
  unsure (1)..(385): unsure at all n locations
  Clone ID: MRT4577_13645C.1
aaccgaagcaagacgcacccgggggggggagaaagctcgaagggccaacgcccgancccccagacgacaagacaggccaagcggaccacccaggcgcagaccccaccacaacggcccagggagaggagccaagaaagcaaanaggcgcaccagaccacaacgaaggcagcgcgaagacccaacaaaacgcgaagggcgaccacagaggcggcgacaaagggagcgccgcagccgccgaaggcgaacaagaagaaaaaggcgcagaggggggcgagcaccacaccgcgacccaagcaggggcagacgaagaaacaagggcgaaggcgccaaggcaaagcacccncgcggacaagcacaagggaacaacaagaaagggccccacccc

SEQ ID NO: 39978 - DNA, 835 bp, Zea mays
  Clone ID: MRT4577_136460C.1
aaaactcgctccttctcccccttcttcctccccgtctcacaatcacaatcccattcagacgcggccgcccctaccctagcaggcgcggacgcagccaccatgccggcccatccaacccctcccgccgcgcgcctcagcggcgtcacatcccgccgccacgcggagctgcttctccacagcggcgtcgacggcgtttctgtcaaggacctccgcctccgccgcatcgtcccacccgccgccggctccctcgacacctcccccaagtgcgtctcacccgtgaaacccggatctgttgacagcacgcctccggaggctgtgtcgtcagcggcggcggcggcggccggggaccttgaccggaagttggcgcccccgcggtctaagctcgtccgcgatccacgctcgtttggctaccggcgcctgctgcctttcctgaacgagatgacgaaaaacagcgttagtcacagcgaacctgatgccatggatcctgtcgagccggcggtggtgagcactggaggagacaccgatgggaaggctacctgcggcaatgtcatggaagagaccaagactgcccctcatgacctaactaacaagccgttgcttgcccgatgcacaaggtcgaggtttgtccatcatccaagctcgttcagctacaagaggatgctgccatttctaatggaagacgaaatatatgctcaagaaagtggcagggtcaaaattcgaaaagttgctgaggaaaggcagtttgcggcaaacaagcatgatgcctcagccaatgggcagcagtgtcttgctgtctcggatgactcttctcaggaaggcatagagctcaatttaa

SEQ ID NO: 39979 - DNA, 364 bp, Zea mays
  unsure (1)..(364): unsure at all n locations
  Clone ID: MRT4577_136461C.1
ccgaccgacgttntaagaaactaaacgaaacgaaaatgatgatgatgatgggagagagagcgcacgcgccgccgtggcagngctcgctggcggncagcggcgtcacggacgcggacgacgcgtntgcggggggctcctagnggagctgagcattacctggcgtcgaacgaggtggaggngtacgacgaatacgacgaggaggcggccctggcggcggngaccgccgccgtcgacgcgtacgcctgcgacgagttccggatgtacgagttcaaggtgcggcggtgatcgcgcgggcggaaccacgactggacggnctgcccctacgcgcacccggggtgagaaggcccggaggtngcgaccccag

SEQ ID NO: 39980 - DNA, 965 bp, Zea mays
  Clone ID: MRT4577_136462C.1
ttgggtacctcgaggccggccggcccattcagacgcggccgcccctaccctagcaggcgcggacgcagccaccatgccggcccatccaacccctcccgccgcgcgcctcagcggcgtcacatcccgccgccacgcggagctgcttctccacagcggcgtcgacggcgtttctgtcaaggacctccgcctccgccgcatcgtcccacccgccgccggctccctcgacacctcccccaagtgcgtctcacccgtgaaacccggatctgttgacagcacgcctccggaggctgtgtcgtcagcggcggcggcggcggccggggaccttgaccggaagttggcgcccccgcggtctaagctcgtccgcgatccacgctcgtttggctaccggcgcctgctgcctttcctgaacgagatgacgaaaaacaatagctcaatcggcaaggaggtgttcctgcaagacacggctgcacacccaacggatgagctcagccgatctgattctcggttagctgatgaatctataggcgttagtcacagcgaacctgatgccatggatcctgtcgagccggcggtggtgagcactggaggagacaccgatgggaaggctacctgcggcaatgtcatggaagagaccaagactgcccctcatgacctaactaacaagccgttgcttgcccgatgcacaaggtcgaggtttgtccatcatccaagctcgttcagctacaagaggatgctgccatttctaatggaagacgaaatatatgctcaagaaagtggcagggtcaaaattcgaaaaggtgctgaggaaaggcagtttgcggcaaacaagcatgatgcctcagccaatgggcagcagtgtcttgctgtctcggatgactcttctcaggaaggcaatagagctcaatttaaaatagtggaagaagaaaagccactaaaagcagatgtgaatcatattcttgatgaca

SEQ ID NO: 39981 - DNA, 578 bp, Zea mays
  Clone ID: MRT4577_136463C.1
cccatcgtacgcccagcgtccggcagctgccacacccctgtcgtcgggcccggccataccgtcgtcgtcgggcaggccaacggtggtgtcctagcgtgtgctcgaatggactcgcagctggcgcaggcgctgaacccgttgcggttgatgaagcacgacgcgtgacactacgcgctgtgcgcccaccacttgcacctccaggtggaggtccaccacttcgtcgaccggttcaaccacgacttcctccagtgctccgtctacgacttctacaaggcctcggtccacctcatcatcatgtagtacatcctctccatacaccatgttctaggtcctggccccggacgagcacaagctgaggcactcgcacgcgtacgatgtgaaggccgggctgtggaccgacgatctgcgtgccggcagccctgcacatgtcggacatggcgatccttataaggacgtacggaaagttctggtgcaccttgcatgtagaccgcggcgactcgctgacccttggcgcgcccgagctaatggtgttggcgcacgtcgacctgcccggccgtgtgcgcgaagagctggtgctc

SEQ ID NO: 39982 - DNA, 309 bp, Zea mays
  Clone ID: MRT4577_136464C.1
gggtcttgcatatttacccacatttattattgttttacacccaatatatttttaaaaccaaaacaaactatttcaatttttccaaaaaaaaaaaaatccacaccccacaaagtttttttttttgcgcccaaaacatgagaaaacaagccccaagcaaaaagctcaaaaacccactctttttaattttttaaaaggtacccattgcagtacacacggggatccaaacaaacttaaaaaaactggccaaattattaggcccacaaaaattacaaaatgagcctctgagaattaaaaaggggcccccaattt

SEQ ID NO: 39983 - DNA, 167 bp, Zea mays
  Clone ID: MRT4577_136465C.1
ctgagaagccacagttgccttatttttgaggctgttctgcccagagctcggctgaaccagcctttagtgcctaccattatcttatccgtctcttcccgtccctgatgacaaagatcttgccttacagattttacaggcttggctttgagattctgtaactgcatcct

SEQ ID NO: 39984 - DNA, 200 bp, Zea mays
  Clone ID: MRT4577_136466C.1
ccacgcatccaatggccgtcgagcgagcgtaccacttgacgtaccgtccactacatctatgcagtcgcgatggcagggtactgaccatatcagttgacgaagtcatgctcggaggcgggtgcttcgctctcagccttgtgcaggccatcgctgtctccttggggcggcatgctcactgaggagctgcggctgtcaacctc

SEQ ID NO: 39985 - DNA, 406 bp, Zea mays
  Clone ID: MRT4577_136467C.1
aattgggttgggggtttttatttttttttttgaggggccaaaggggtttttttcacaacacgcaaaatttcttttgcttggacaagggcgaagggatttaaaaaatatgaaaccaattaaacccgctgggttccaggaacccaggtttaccgggctactaaataccggggaaaacattggttcggacataggacaacgacgtacgagcccctggttaactagaaaagcacgtccttgggggggttggacctggggggcctccggccacccttggcctggtcggtgccggggaccttggcggggcccttggtggacccgctggtgggggggaaccccggctggagggggcccccgggtggtttttcttccacccgggggggccgctttttgcatcccgacccaaaaa

SEQ ID NO: 39986 - DNA, 205 bp, Zea mays
  Clone ID: MRT4577_136468C.1
caattatttagtagagctcatgtgaagctaatcatacaatcatacatatcaaggtcgtcaaacatattgccatgaaagggcggcaaaggtctaagcaagggcggcgccaatctccaccgcaacgtcctgcgcgacaacatccagggcatcacctagccggcgatccggatgctcgctaggatgagcgacgtaattgtatcgtcgc

SEQ ID NO: 39987 - DNA, 2846 bp, Zea mays
  Clone ID: MRT4577_136469C.1
gacctgcttgtccgccgccgccggcggcggcggcggctaccactcgccagcgagccatctcctggagctggagggggtccgcttcctcctcgactgccccatcgacctctccgctctcgcggccttcgcgccggtgcccctcgccggtgacgcaggaggtctcatccgcgcggtgccgcgctactggttgccagcggccgtgaaagaaggcggcgtggacgccgtgctcgtgtcttccgctacggggatgctcggactccccttcctcaccgggctccccggattcaccaacacgaaggtatatgtgacagaggtagcagcaaggatcggaaagccaatgatggaggagctggtggagatgcatcgtgagtttgtgaggtactatgggccagatacggatgcatcacccaagtggatggaaggggaggaactcaatgaactcatgtcaatgtcgcaaaaggcagtgattgaaggcagggaaaatgatttgacttctctggtgcctttatacaggtccgctatggaatcacaatcctgctgggtcctggcttgcacatctgtggcttctcttccagtcttcccgcagggcaatctatatgtctgaaagcttgagataaagagtctaataggagctaataatatccaaccatcaaatcagcagaatctaatagatatgagttgtccaggaaacgttgaagaatgcatgcacaaagtacagtctgttaaatatggagaggaggtttgcttcaatggcatatttatgctgaaagcttctagttcaggccttgaacttggcaattctacctggacaatacaaagtccaagagctagcattacctacctaccaagttcagtatttgtgtcggctcatgcattagattttgattacagctctctgaaggaaaatgatgtgattttgttttcggatttctcatccttgaatgacacggacgaggataatgagaaactgaatgagcattcaatggatgaaacggactcttctctatgtcgctactcagtgtttagggatgacggcgctgatgcagatgaaagggtgccattcgtgtgcaacaatgatgatatcacagaggagattgagagaatcagctttatatgctcatgtatttttggtgcagtaaaatctggaggctctgttctaataccaattggccgccttggtgttattcttttacttttggagcttatatcagaaatgctacattcttccagcctgaaggtaactgtgaccttggaatcatatgggggattttcagattggaatatattattatcacacttaattaatttaacatgtgtgcctcagctcttgaagcaatgcttctggtatattttttcctgatgcggtcatgcaagatgccactgcctaatttgccatcaactgcctgtaaaattattagcgttcagggatgtttaattatgcatatggttcaagtatcttaagttattaattgataaggaatgggctacttgagtatctgacatagtttgtccaccccttatattctttctatcccatgaaatgtcaatattgtgctgaggttctgtagcaaactagtaaaactaccttttcttagattatttccccctgtttttggctcattattgtttttttcctgagtcaggtgcccatatttgtgatttctgaaacagcagaagaaatatttgcttttaccaataccttgcctgaatggctatgcaagtcacgtcaagaaaagttattcgctggtgaagcattgtttggccatgtcgagcttttgaaggagggcaaattatttttgttcccgcatctacattcaaagggtttgctcatggaaggagccttgtattgtgctatgtccacactggagccttagactcggcccagctgttcatttgcttcgtcgctggcatgcagacaaacggtgccttcttgttgtggagcaaggaaatggtgctgagttgagtcttaagcctttcatgccattggcaattcaagtccttgagtgttctttcctttcgggcgtaagggcggggaaaattgatccattactgggagtgctcaaaccgaagtttgttatgcttccagaaggtcttaagtcgcggtgttcaataaagggggtgccatggtcattcttgtattactccaagggcaagaccatcgagctctcaaatttacgtgaagatattgaggtgcatcttgcaactgatgttgccttccgattgcagcctagacaactgaacgaaaccactgcagtggcgagattgagaacaaagctgcttgtaagcaatggacggtaccagctggcctctgcagaaaagcaaccagatcaatcaaagcgtcacttgctacactgtagcactattgaccctggtcgcttgctgtcagctttgcgagagaaggggatggtatgttcatttgctgcagatgatagccccactgctagtgaacgctcagttctgatcactagtcctggagatgctttggtgaggataacgtccgacacgactgttatatactgcgacgatgagagaacatccaatcaaatttatgatgcgcttagcagtgtttgtaaagggatctgactgcatcatgtgtaattgttgttcgttatggggtgtttggtttttagggactaatttttagtactccattttaatctataaattgctaaatgcggaaaataaaacttttatttttcgtacttggtaatttatgaactaaaataaaataggggactaaaaattagcctctagaaaccaaacattcccgaagttgtgcgtgtgcgttaaattgtgaattgccatgtggtggtttagtggttgaaaaaaggttaagttttttcttc

SEQ ID NO: 39988 - DNA, 844 bp, Zea mays
  Clone ID: MRT4577_13646C.1
tccggccggggaagcccgggggggccgggcccggagtttcttttcttccccgcaaagaaagaaggcaagagttctcggcttctcgcgagtcgcgagtcgcgacagagagagaggcggagttgcggagaagatgcagagcagcagcatgaagagggagatcagcgaggcccacgacaccattcgcttcggcatcaacgccggcgtcaaagccgacctcgccccgccgcacccgctccagtctaccatccaatcggagaccaagttctgggcggacaagaagaagttcgggacagatgccatatacggatccgccctcaacatccgcaaggatctcgatgcccaaatcctctccaggttccaaaggccccctggtgctttgccgtcatctctgcttggatacgaggcactgacaggttccttggatgattttggatttgaagattatcttaacatgcctcatgattctgacagtttccgtcaacctgacatgcaccatggaatggaggttcgccttggtttgtccaagggacctatctgtcctagcttcaattgaggcagtaatgtaattctgctgcaagttcacctctcagtccagtacttcagtcaatagaccatattaagatggtgaaatatgaaaactggtagcttgcatctgttcaatgttatgttttaatcaacgctgaatttaatatttgtcaagtttgaactttgacacctactttttctggtttccttgccactgcgaggccatggaagcgaccaaatttatttatgtttgatgcgggttaaaaaaggttgccaaaaaaactaaaagctggggcatccttaaatttgggggacacaa

SEQ ID NO: 39989 - DNA, 320 bp, Zea mays
  Clone ID: MRT4577_136470C.1
gggagggaggacacagcaaaaacaaattaaaggcgcaaacagatcgaacgggggcatggcccgatgctgtattgaaaactgggcccacacgggaaaacaaaacaaaacaaagtttgactgttaaatgagccccaggagggacttgacaggacaggacacgacacgacagggggccaaaatttgggaaaaattattggttcccccataagtcccaccactagagcagggggatggaacaaatagagggggggttgttatgccatggcccatggaacggggttgactgtttaactgacttgaacaaaaaaaaagaaacggcc

SEQ ID NO: 39990 - DNA, 267 bp, Zea mays
  Clone ID: MRT4577_136471C.1
acccacgcgtccgcgtagtctttgggctaatgtatgaagttctgctcgagactgcacccagagcacattggtacatttgaatcagttgctaaccaataacttcaccgaactcaaacttctcgtacacatttgcgttctaaagacgatcctccaataatcctctcactaaatcatcaatgcctttaagcacaaaactctcttgtcctctatcactgtgctgatctacggtcttcaaacaaagaacattctcactcaacatacaatgca

SEQ ID NO: 39991 - DNA, 168 bp, Zea mays
  unsure (1)..(168): unsure at all n locations
  Clone ID: MRT4577_136472C.1
aagctttgagggccttgaccggcctgggccttgaaacagatgcctgagtcatcaccagcttgacatccttggccttgacaccagttttgtcaacctcctcctnctcgttgtcctccaggcccaggccagatgtctcaggctttgggatcatttgggtcaggtcaggag

SEQ ID NO: 39992 - DNA, 230 bp, Zea mays
  Clone ID: MRT4577_136473C.1
attgttttaattagtaaaattatttttatttgaagggtttttactttttttcattgcgtagctacatagtgctctgttttattttatcctgattctagtaatttttttttggatcccgatttaaaaattttattcccggagcgaaacccaacttaatggccttgtcacccatcccccgtttgggccgctgtgcgtccccccaaatagtaccccacccagagtatttttaa

SEQ ID NO: 39993 - DNA, 491 bp, Zea mays
  Clone ID: MRT4577_136474C.1
aaaaaaaaaaaaaaaaaaattttttaaaaaaaaaagaagattgaagccccagtctaaggggggcctttagggcggcttagtgggggcgctggggcgtagctatgggcatgagctgaattcctgtggggtcctgattgccgctgacattccgccccagcgtgcgaccgggtagggccgggggggaagacggggggggctaaggggggggggggggggggggaactgggctgggttgcctggcggttatcgggcggggccagctggggtgccggttgggccaaggtgcgggacggggcgcgtcgagaggcggggggcgttcgggtggctcttgcgctgcctcgctgcctgggtcggtgggccggggggggggggtgcgcggggctggcgcggggggcgcgggggcggcgccgcggcgcggggcggggggggcgggggccttggggcggcgcggcggggccgggggcggggggggggggggggggggggggggg

SEQ ID NO: 39994 - DNA, 449 bp, Zea mays
  Clone ID: MRT4577_136475C.1
aagaaattgatcgggagatccgtaaaattctgcatggaataatcaggaaaagggagagggcttttatagatagtgaaggaactaatgatgacttgctaggcttattggttgagtcaaacatgagggaatcaaatgggaatgcaaaactcggaatgactaccgaagatataatcgaggaatgcaagttattttactttgcaggtatggagacaacatcagtcctgcttacatggacgttaattctgctaagcatgcaccctgaatggcaagagcaggcaagagaagaagttttaaaccactttggaatgggtacaccagactttgataacttgaaccgcctgaagattgtaaccatgattttatatgaggtccttaggttgtacccaccagtagttttcctatccagaagaacctacaaggaaatggagctcggtggcatcaaatatcct

SEQ ID NO: 39995 - DNA, 397 bp, Zea mays
  Clone ID: MRT4577_136476C.1
gcgttcgcggacgcgtggggcctaattggagatcccaatctcggttgacaagttgaccagctccctataacgtataggcaaatcgttcacacatttatttattcttttaagaactgagatgggtttgcttttcttgccatagaaagaacataggtgctgtttggttcacgaaatgtaacgtaaagggtaatggtaacggtttacactcgattacggactaaccagacaacaggccaacgaaggtggagctagcagcccatattcccatcgacctaactgaaggttgggatctctagcttgagatcaatattctgaatttctggattagaaaaaaccatgtcagaagtagagctctggtttgagatcgtcattctgaatttctggttctagatcgcga

SEQ ID NO: 39996 - DNA, 1965 bp, Zea mays
  Clone ID: MRT4577_136477C.1
cattcgcgtcctcgtagccggccgggaaggtaagaaattgagtgtcacgagcccctgccgcatagacttgtttgcttgacgttcactaggtgcaccaagaagccaaagccaatggcgactctacctctgctcctgcacctgctatgggaggcctctccgtgggcccgtgcaggcgcggcgacggccgccgtggtgctggtgtggctagcggcctggacgcttgagtgggcgtggtggacgccacggcggctagacagagccctacgggcccagggcctcaagggcaccaggtaccgcctcctcaccggcgacgtgagggagaacgcccggctcaaccgagaagcccgcacgaagccactgccgcttgggagtcacgacatcatcccacgcgtgctacccatgttccacaacgcggtgaaggagaatgggacaaattcattcacttggtttggcccgattccgagggtgataattccagacccggaattaatgagagaagttttgtctaacaagtttggccactttggcaaaccactgtttagccgtgttggcaagttactagccaatgggctcgctaatcatgaaggcgagaaatgggcaaaacacaggagaattctcaaccctgcattccaccatgagaaaataaagcggatgctgcctgtatttgctacctgttgtgccgatatgattaacagatgggaaaattcaatgtcttccaaggaaccttctgagatggacgtctggcctgagttccaaaatcttactggagatgttatctcaagaaccgcatttggtagcaactatcaggagggcaggaacatcttccagctacaaggagagcaggctgaacgccttatacaatcttttcaaacaatatttatcccaggctactggctcttgcccaccaaaaacaacagaaggatgagagcgatcgatctggagatccgcaaaattctccgtgaaataattgggaagagagagaaggatactaaaaacagagaaacaaataacgacgacttgctgggcttattactggagtcaaacacaaggcaatcaaatggaaatgcaagcctgggattgacaacagaagatgtgattgaggaatgcaagttattttactttgcaggtatggagacaacatcagtccttcttacttggacgctaattctgctaagcatgcaccctgaatggcaagagcaagcaagagaagaagttttaaaccactttggaatgggtacaccagactttgataacttgaaccgcctgaagactgtaaccatgattttatatgaggtccttaggttgtacccaccagtagttttcctatccagaagaacctacaaggaaatggagctcggtggcatcaaatatccttcaggcgtgagccttctactgcccatcatcttcattcaccatgatcccaacatctggggaaaagacgcaagcgagttcaatccacagaggttcgaggatggcatttccaatgcgaccaagcatcaggccgccttctttccatttggatggggtcccaggatctgcataggccagaacttcgcgttgctggaagcaaagatggcactgagcaccatcctccaacgcttctcctttgagctctcaccatcctacactcatgcgccatacaccgtgataactttgcatcctcagcatggtgctcaaatcaggttgaagaagctttgaccatgatggtcatactgaatgctaaaacatgcactcctagtaacatattgtgattgttcatgtatgcaggtttaaatttagctttgatatgaataatgagaaccaagtgtgtatgaatggagaaggggtgtaatcggatcggatacgaacggatattgcttgtaccatatttatttcatattttctgtttggattcagataacatcaagttgtgtcggataagatttgaatagatattgatatcttaaatatccaactttgagtatc

SEQ ID NO: 39997 - DNA, 420 bp, Zea mays
  Clone ID: MRT4577_136478C.1
cgttctggtcgtgtgcctggctatgtcatctgtcagcgcgtctgcaatgcagatgccgtgcccctgctcgttgctgcaagtcttgttctgcgctagcgccggcctgacgacgattatgggcgcctgctggctgtacacttacgcggagtacctgaggcagtcgaaatacagcacgatggcggcgactccatactactccgtgtgagggcagactaacgctatgtaccaggcgctgcggtaacagtgctgccatcagcagatgaggatgatggacgtacaatacgtttcgcatcagctagagatgaagattcagcttgagcgtgccgctgacgtcagcatcagcctgtactagccactgttgatgcatcatcagcagcatctgatggcagctcatgctcttaaccccatggccatgatgat

SEQ ID NO: 39998 - DNA, 272 bp, Zea mays
  Clone ID: MRT4577_136479C.1
gcgttagcaacagcccgatcgtctccaggtgcggcgacaagacgaccatgctctggaacactcttggccagcgcaagaacaccatcggcgccgacctccgcggaatcgagggccacagctgatgcgtatgctgcgttaggctattcccaaacaccttccagcccactattggctccagattctcggaccgcaccgtcaaggtctggaaccttaccaactgctagctgccctgtagtttggactggcacggtagttatcgaaacgatgacgct

SEQ ID NO: 39999 - DNA, 625 bp, Zea mays
  Clone ID: MRT4577_13647C.1
gagccctcacaagcgataggcgagagaccagagatgggcggcggcaactgcaaccccaaggacttcggcgccgccgcctactgggaggcccgctactcctctccctccactggcggcaagggcggcggcggtggcgggttcttcgactggtaccagtcgtactcggcgctccgccccctcctccgcgcctgcgtgcccacttcctcccgggtcctcatgctcggctgcggcaactcccttctgtcggaggacatggtaaaggatggttaccagaacatagtaaacatagacatctcatcagttgtaatcgagcagatgaaagagaagcacatggatatcccacggcttacatatatgcagttggatgtcagagatatgagcttctttggagatggatcatttgattgtatcatcgacaaaggaactttggatgctatgatgtgtggcgatgatgcccctcatggtgcttacaaaatgctagcagaagtggcaaggcttatgaggcctggtgggatttacatgttgataacatatggtgcccctaaggaacgcctgacacttctgaatcaagtccaatgctgttgggaagttgagctttacattatgcccacacctgaataccagc

SEQ ID NO: 40000 - DNA, 568 bp, Zea mays
  Clone ID: MRT4577_136480C.1
ttttttttttttttttttgaatttcctagaatctgtccattaatcgtctcttcgtctcgtcgaccaggagtaaaatacatattacattatataaacttgtatgcaacataaatcagaagagaaaccataccccaaaacataggtgataggtcagccgtcagcgtcacttcagtatcgtacacacgtcttggactgagcagttcctcggccagtgccggcagccagctcctccactcccactctcccaggctcccagttgctttggttgcttcctcgttcacaactcagcagctcaactcaagctgaacccatgcaggaaactgccttggaaggggagaaactcacgcccacagcggattgaggcctttagcacaagcaaatcaatccctatatcagtatagtatgcaactggattctggatctgtagaatgaccacctactctcactacctcctaccttacagtttacaaccctaaaattgcctgtgagtgatattaatagcaagccactggccactgctatatggataaggggctgcacagcctgcactggaacagccagaataacc

SEQ ID NO: 40001 - DNA, 208 bp, Zea mays
  Clone ID: MRT4577_136481C.1
ttttggaacaatactttccactttacatttcaacagttcattcaggacattgctcacactgacactgccacccatggcgatgcgtgacacattattactcacacattcgacgctaaatgactcaactagctagctagccaacggctatactacaggacataagtggttaagtgggggacaccgtcggcagcatcgtaagggcatggag

SEQ ID NO: 40002 - DNA, 316 bp, Zea mays
  Clone ID: MRT4577_136482C.1
ggagaagccaacacagcaacaagcagagcagggagccgacatccgagagatggacgcggagatggtcgagctgcaaactcccctgatggcggggctgcaccacctgctggacgtgcccgacggcgacaacaagacgggcggcggcgccacgcgcacctacaaccaggacacgcgcgggctggcaggcaccccgggcagcgggaaggagctgccctgcacagacacgttcttggtggacatgcctaatactgggcacccggcgacatccctggtgcaggcagaagacgatcgggtgctcatgggcagaggatagcgg

SEQ ID NO: 40003 - DNA, 497 bp, Zea mays
  unsure (1)..(497): unsure at all n locations
  Clone ID: MRT4577_136483C.1
aatacaaacaaaattatactactgtttatcttttagcaattttttgtcctttttgtcattcttacggggcaaaagactagggtatgacacacatgctagcaacaggaatctctaccaaccggtcgaaacaatggggggggggggggaaacattcaccaaaacttcgtacttgcatgctcaggacgaatacttcacccacacttttaaaaattctaacaccccccctcgtattgggaaccatgaaaatattagagatagaaagagactcgttcatacaggcccctgcctttgccctcatggacaagcacacacacacccgtgcagctagaaaccccggggcccttccatgttgggttgcctttttacacacactgctgagagctccccttcnaaggggaggccaaacttgaccagaagctacaccaaaaacttggggtcgaagttgaagacgcccataaacctccagtccttgcagacagacaggaacttgaagtccg

SEQ ID NO: 40004 - DNA, 699 bp, Zea mays
  Clone ID: MRT4577_136484C.1
ctcatcctccctcgccgtcaaaaccgaatcagaaatctcaagcttagcacagcaacaatggccgagcagaccttcatcatgatcaagcctgacggcgtccagaggggcctcatcggcgaggtcatcagccgcttcgagaagaagggcttctacctcaaaggtctgaagctccagaacgtggagaagtcgttcgccgagcagcactactccgatctgtcctccaagcccttcttcgctgggctcgtggagtacatcgtctccggcccggtcgtcgctatggtctgggagggcaagagcgtcgtcgccactggacgcaagatcattggcgccaccaaccccctggcctctgagcccggcaccatccgtggtgactttgccgtcgacatcggcaggaacgtcatccatggaagcgactcagttgagagtgccaggaaggagatcgccctgtggttccctgagggcattgcagagtggaggagcagccagcacaactggatctatgaggcctaagatgtgtcatgagtggtttgagtgcaggtttcattaagcatctaccaaactagtctttggttgtttacagttttgagatttgtatcttgggaaccttgtttgtgtgaactgaagttatctccttgtgcttgagcatgcaagcgttatctgctgctctatatttgatatatgggtattgagttgcattcc

SEQ ID NO: 40005 - DNA, 636 bp, Zea mays
  Clone ID: MRT4577_136485C.1
ggccgcgggttttttttttttttttttcatgacggcccccttcgacctttttggtcttttgtttttttttttttttttctgtttgaaattgttgaattctccctcgtaactgccgcccattctacaggccttgctatttatgcctcggacccaaattgtgtaattacatttgttgatctgggttgccttcgtaaccatccgctctaagccatcgtactgttgtttaagaaaagcgtgtttccagcttccaggggttgttcaattcgaaccctaagggtgcctctgccttgtctgtttgtcctcgtagggttcccgtaaggcgacggtcacggtccatcatttgtctatcccactgatcaaccgagtaacgaggccgcttgccctcgttttggatgcccttaatgacggcaaggccagtaccagagataccgaacataccaatcatgatggcatagggaagaagagcctcaaaaggaacgggcattatgacggtggcgctgcttgagcagactttgacgtattcggtatattactcggagaatgggagatcaaattgaccaggcctgacctgtcgtcctggtacgtcgtcggggtcgagaatctttcgaatggccgggtcttcccggccggggccgg

SEQ ID NO: 40006 - DNA, 290 bp, Zea mays
  Clone ID: MRT4577_136486C.1
acgtggccattgatcaactctattggcgaacggcctcacctaaacatgcctaatgccaatatacatatggtacccttatattggtgctcatcaaaattgtaaagctatttcacataatacaattgacacactaattctattcaaaataaaagaggacaagagttaatgtgcatagatcggctaaaaacgtaattagatggatatcatacatgtacggattcacacgggttcttactaacagtgcccaaattgtactcggggagctaatttctcttccttggtcttcaata

SEQ ID NO: 40007 - DNA, 345 bp, Zea mays
  unsure (1)..(345): unsure at all n locations
  Clone ID: MRT4577_136487C.1
ccgacgcgtgggcttgaatacntcgactcggttgatgttgggaccaaaactacagccgcgaaaaatgaggcgttctactagctccacgccgtggctgacctgaagacggaccaggcaccgacggaggcacctgatgcaggcagccctgccaaggcaccggccgagtcaccgaaagcaggcagtcctgcagctactgccaaggcacccgagtctgctgccacgagaactgaccacgctaaggcacctaaagccgccttcactcccgacgatgacgctgccccatcgtcgtcggcgtataggaagtctggtccagctgccgagccgaccaccgacgtctctacaccg

SEQ ID NO: 40008 - DNA, 469 bp, Zea mays
  Clone ID: MRT4577_136488C.1
cttcccaatctccaaagctatccttgtttgtcaccccattcttggctacaatagcagttcctcttgaagaaaaaacttcaacggtgtattctcgatacttttctatcatgaaatgatttaaatttgtttgcctacttgatcccagtgtattctgatgtcatctagagagaaagatcatggataatattcgataatacaagtttcctttgcagcgctacatggccctcgtggatctcgaggtaactgatcattaagtttcattgttatgcatagtatattagtatagctgatataaggagttcatttgggctatacttttctctggtaccatcttatcataggaagggaacgagaggcttttctacaagctgctcattgacaacattgaggagccgttggtgaggcctgccaaaagtatggatccatattgagtcgccctcagtgtctttatatcagtttgaaggacaag

SEQ ID NO: 40009 - DNA, 177 bp, Zea mays
  Clone ID: MRT4577_136489C.1
attctcataaccaaaactcggtttcaacaggggttatgacccaacaaggctgggacccgcgagggggcgaacaagttacaaggccaggggttcaattaaacgacaaagggggggggggccccactgtgtcctactcgtgggaccctggcttggatttgtagagggcccaggggggac

SEQ ID NO: 40010 - DNA, 1839 bp, Zea mays
  unsure (1)..(1839): unsure at all n locations
  Clone ID: MRT4577_13648C.1
attgggtacctcgaggccggccgggccgaaatgcacattcagtggcagagcagaacatctgagttgcgtccgcctcttgccccctccctctccgtctccgattctggatctgcccctgccgtaaccggcaggctcccggcatctcgttctcgcctccaaaattcaccttcgccgattgccgccgtgggccgccgcgatggcgttgcggacgcctcgtaccacctccgtcgcattctccgctgactcccccctcggtggcgtcccactgcgctcctcaacagcctgctccattcccacgccacctcctctcgctccgctgcgaccaccgaggaccaccagagcgggacgccgcggaactcgtcggccacgtcctggccgtcgcgcatgctgacgacgaggccgttgccctcccgggcaccctcgacgcggagctcgcgcgcgtcctgcgagcgcgcggcgccgctcaggtacgccttcacctcctcgtaggtgctgtcgttgtcggagacggggccgtagcgtgagtagcgcacctcgccgccgggctccgagatgtcgatggtcacgtaggggtccacgacgttgagtaggcggcgggcgcgccggcggaggaacaggttgaggtaggtccagaacagaggacagggagggacctaaaaatcaagcccaaaggcccaaagcccgaagtttcttttcttccccgcaaagaaagaaggcaagagttctcggcttctcgcaagtcgcgacagagagagaggcggagttgcggagaatatgcagagcagcagcatgaagagggagatcagcgaggcccacgacaccattcgcttcggcatcaacgccggcgtcaaagccgacctcgccccgccgcacccgctccagtctaccatccaatcgggtggggggcgcctcgcacaggagaccaagttctgggcggacaagaagaagttcgggacagatgccatatatggatccgccctcaacatccgcaaggatctcgatgcccaaatcctctccaggttccaaaggccccctggtgctttgccgtcatctctgcttggatacgaggcactgacaggttccctggatgattttggatttgaagattatcttaacatgcctcatgattctgacagtttccgtcaacctgacatgcaccatggaatggaggttcgccttggtttgtccaagggacctatctgtcctagcttcaattgaggcagtaatgtaattctgctgcaagttcacctctcagtccagtacttcagtcaatagaccatattaagatggtgaaatatgaaaactggtagcttgcatctgttcaatgttatgttttaatcaacgctgaatttaatatttgtcaagtttgaacttttctggtttccttgccactgcgaggccatggaagcgaccaaatttatatatgtttgatgcgggttgtccatggttgccaaaaaaaaaaaaaaaaaaaaaaaaaaaaaaaaaaaaaaaaaaaaaaaaaaaaaaaaaaaaaaaaaaaaaaaaaaaaaaaaaaaaaaaaaaaaaaaaaaaaaaaaaaaanccttctggggtgttgggggggaaaaccaaaaaggcccctttttaaaaaaaaaccccaaaattaaaaaaaaaccccaaaaaaaaaaaaaaaaaaaaaaaaaantttttttcccgggaaaaaaattgggatttttggcgggtcttaaattttggccgggaggggaaaaaaaaaaaggggcccccagggaaaacccgcgggcccttggggtgttcccccctccccccaattttcgggaaaaggttcttcccccggcccctgtgaaaaaaattggggggttt

SEQ ID NO: 40011 - DNA, 255 bp, Zea mays
  Clone ID: MRT4577_136490C.1
cacgcccacgcgtaacattacataccttctaccaattaccttcatctttttcattccctgctctagcacgcgcgcgagtgaaatatccaaaagatatgcctcactattattaccactataaaaacacactcttgtatttttgcaaatttaccactcatactcgttccctcaatttaaaacatctcatatgcagatatcgaaaaataccaaaaatggatttaaaacgtgactattcatttattcaccttagttatt

SEQ ID NO: 40012 - DNA, 230 bp, Zea mays
  Clone ID: MRT4577_136491C.1
tgggagctctctgcagagaagacctatctggacgaaagtacaggggcaaggatctctcacagccgggcttctgccgcctaaacattgagctgcgcgcgaccgaaatgcccccactcactacatgacgctccgcagttggcccgtacaaggcattcgccgcagatagaatctcccggggctatacacatgaccatacacacctccgtcgccatcgagatcctcaccgggct

SEQ ID NO: 40013 - DNA, 1194 bp, Zea mays
  Clone ID: MRT4577_136492C.1
aattcggcacgaggcgggcctcctccgagtctccgacctcctcctgtcttcggtgtcgtcgcccgcctccccatgaggccgccctcgagacatgcctcgtagcctcggcgtcagtagcagcagcagcaccaggcgctccctccgcgtcgcgccccccgcctcacccccgctgcggcggccgccgccgccggcatggccatgccgttcgcgcgccgcgacatcgaggcggcgggcgccggcgccagcagcgacgactctcctgccgctaagaagggcaagcccgagctcgcaggggcgcgcccggctttgacgaggtccgaggcgttcgcgttcgcggccgtgctcgcgctcttcaccgctgggatcttctgcgtcttcctcaccgcgccacgcggcgagtttgggcagatcctccgcctcccgcgcagccttgccgacgtccgccttctcaaagacaatcttgctgtttacgcgagagattaccaaacgaattttatattgggttattgctcaatatacatcttcatgcaaacattcatgatccctgggacaatattcatgtctttacttgctggggctctttttggagtgattaaaggtggcattttggtagttttcactgccacagccggtggatcttcttgctattttgtctccaagctgattggcaggcccttggttagttggttgtggcctgaaaaactgagatatttccaatcagagattgctaagaggaaagaaaagctgctgaattatatgctttttctgagaataactccaactttgcccaatacattcataaatatggcgtcaccgattgttgacatacctttccatattttctttgctgcaacactagttggtcttattccagcatcttatattactgtaaaggctggtagagccctaggcgatctgaaatcagttagagagttgtatgacttcaagacattagtggttctgttccttattggatctgttgttgtcgttccaacaatcctgaaaaggaagagaacatacgaatgatgtcttagagcatctacatactttctttagatgttcaaaatgtattaggatttttttaccttttgttttcttgatatcgtatacattttcaattctatacgtagagatgtaaaatcgaatcgaatgctttctaatactagatgatgccatcattgtatcaaaaaacct

SEQ ID NO: 40014 - DNA, 371 bp, Zea mays
  unsure (1)..(371): unsure at all n locations
  Clone ID: MRT4577_136493C.1
aacgagtcttgacgagttgcagtaagacgacacacattatcatgtgtggtatgaccaataatatatgcatcataataaagttttggttttaaagaattaaaaaaaaaaaaaaaaaaaaaaattttttatattattatnaaaaaaaaattgggtgggggggggaaaatttttangttgtgnggggaaagactaaggtggaattttgtggttttacaactcacgggggggggtttatgccagcatatgatggggctctaattcccctatctgtttccatttcacaataaatcacctgtggttaaaaacccatggattaaatgatgtcttctgattttttactagaataggctggggagataaatgatctactt

SEQ ID NO: 40015 - DNA, 259 bp, Zea mays
  Clone ID: MRT4577_136494C.1
aagaagccgacgaagatggtttaatgttatatgtatggccagttgaatcagaaacaatttaacaatctgcatacagttgggtgaaaattttaaataactgcaatgactgaccagattaccctatccggatcatctggttgatatatatacatacatgggacataaccacgttacttgtacgtgtaaaaatggtattccgatcctttgattaccaacgaaaccctccaatattaaagttttttttgctttcctaataacc

SEQ ID NO: 40016 - DNA, 266 bp, Zea mays
  Clone ID: MRT4577_136495C.1
actgggggagagaaggtaaaatatcgagtaaccgtacgttgcgatctcaatggcgaagcgtcgagacacgttgagcgtgaccaggaagcgaccgccagcagcccaggctcgcatggaggtgtacgccaaccaagtgccaaagaccacggataacttccgggctcttttgacgtgctagaagggtgttagcaagtgatgatagtcgctgcactacaagggctcgaccttgaaaagggttatagccaagttcatgtgccacgccggat

SEQ ID NO: 40017 - DNA, 235 bp, Zea mays
  Clone ID: MRT4577_136496C.1
cccacgcgtccgcttccatggcgagagtcgtcttgcccaggccgccgaacccgacaacggacagcaccttgagacgggcggttccatccaccaaccagtccacgatgccagtcgccggaccatcgatgccgaccagctccggcacgtcggcgtagaggacgttgatccttggatcggcaaccatgcggtccccagaagcccaaacgtcgtcctcaccgccgaacctatacctgga

SEQ ID NO: 40018 - DNA, 222 bp, Zea mays
  unsure (1)..(222): unsure at all n locations
  Clone ID: MRT4577_136497C.1
cccacgcgnccgcggacgcgngggcacggnncaagcacancgacacacgggagcacagaagagaaacgggcacacgcaacngancaaggcaggcaaccaananncaccgncggcaaggggcgaccngancccngggcngccggangaagnggcgagggagagccacggccgggngggcnacaaccagcggccgggggagcgccgaaccgagcgccagaggaa

SEQ ID NO: 40019 - DNA, 682 bp, Zea mays
  Clone ID: MRT4577_136498C.1
ccggccggggtttcccctctttcattcttattcttttttatacttcattcagcgttttatttcatcaaagcctttccctttgtactcgatctatactctcttttcttttgttcttttacagccaatctcgggtttttcgcgacggcaccatatgatcttgatccaatcgcaaccgtcatgaccagtcatcctccaccatgattgaaccatctatccgtgtccgtcgggcaatccacgccaacgatgcgacccttctgcgccgaatcctcaagacacaccccagctatctcctaaaccccgattcatccccttccggcctatccaactcgaatatgcacctggcagcttcactaggtcaccacgaagtctgcgcagtactgttaaaactcggccacgaggatccatgtcctgctctcaatgaaagccaccaaactgcattgatgctcgccgcagctggtgggcataccgaagtcgtccaaattctctgcgagcacgacaaaacatgcattcttcgtcgcgacgttcgaggccgcgatgccgtcatggaggccagtcttggaggacacgataccatactacaactcctccttaccctacgttcccggtgggctttatgatgcagtccgccgcgcagatgttgaaggggatacagcactgcattttgcgagtggaacggaaacct

SEQ ID NO: 40020 - DNA, 236 bp, Zea mays
  Clone ID: MRT4577_136499C.1
aaaacccgggcggacgcacgcatccgcaagatcttcaccaccatcctcactatcatattcaatgttgaaactgtactctataagggcattttctccactgggggggactcttctggccactacatctatcacgcccctgtttatgcactactttcataacacacatgtacttattcttgttgtatacatcatctacacgaaaccttttgtttatgctactaattatctcctcatta

SEQ ID NO: 40021 - DNA, 1372 bp, Zea mays
  unsure (1)..(1372): unsure at all n locations
  Clone ID: MRT4577_13649C.1
aagcccaaaggcccaagcttcttttcttccccgcaaagaaagaagggaagagttctcggcttctcgcgagtcgcgacagagagaggcggagttgcggagaatatgcagagcagcagcatgaagagggagatcagcgaggcccacgacaccattcgcttcggcatcaacgccggcgtcaaagccgacctcgccccgccgcacccgctccagtctaccatccaatcggagaccaagttctgggcggacaagaagaagttcgggacagatgccatatatggatccgccctcaacacccgcaaggatctcgatgcccaaatcctctccaggttccaaaggccccctggtgctttgccgtcatctctgcctggatacgaggcactgacaggttccctggatgattttggatttgaagattatcttaacatgcctcatgattctgacagtttccgtcaacctgacatgcaccatggnaatgggaggttcgccttggtttgtccaagggacctatctgtcctagcttcaattgaggcagtaatgtaattctgctgcaagttcacctctcagtccagtacttcagtncatagaccatattcctagaggccggccgggaaactttcagttagatccggaagtcgcgacagagaaagaggtcgagaaagaggcggagttgcggagaagatgcagagcaacagcatgaagagggagatcagcgaggcccacgacaccattcgctttggcatcaacgccggcgtcaaagccgacctcgccccgccgcacccgctccagtctaccatccaatcggagaccaagttctgggcggacaagaagaagttcgggacagatgccatatacggatccgccctcaatatccgcaaggatctcgatgcccaaatcctctccaggttccaaaggccccctggtgctttgccgtcatctctgcttggatacgaggcactgacaggttccctggatgattttggatttgaagattatcttaacatgcctcatgattctgacagtttccgtcaacctgacatgcaccatggaatggaggttcgccttggtttgtccaagggacctatctgtcctagcttcaattgaggcagtaatgtaattctgctgcaagttcacctctcagtccagtacttcagtcaatagaccatattaagatggtgaaatatgaaaactggtagcttgcatctgttcaatgttatgttttaatcaacgctgaatttaatatttgtcaagtttgaactttgacacctaaatttaaaggtttccttgccactgcgaggccatggaagcgaccaaatttatatatgtttgatgcgggttgtccatggttgccaaaaaaaaaaaaaaaaaagcggcc

SEQ ID NO: 40022 - DNA, 197 bp, Zea mays
  Clone ID: MRT4577_1364C.1
ccctttctttttttttttttttttttttatttgtgggggaaaagaattgtgcggttctcctttttggattctgttccgaccgagatgtgggggaccctgcgcctacattcccatattctgttcttggtttaaagaagacctgctgagcttgggttgcccttgccattctatgagtcgttctcttgttgcgtatggca

SEQ ID NO: 40023 - DNA, 640 bp, Zea mays
  unsure (1)..(640): unsure at all n locations
  Clone ID: MRT4577_136500C.1
cccggctgatgtgcaagaacctagttgctggccgtgcggtggtaaggggggcaggtgatgctcaggccaggttgcttgagcacgtatgtgaatgccttgagaaggagtgttgtggaacatttgacgattgcataacgtgggcaagatgaatttgaaacttctccaatcgtgtgaagcagctaacattcacgtttcctgaagatgctgccactagcatgggagcccatttctggtgtgctccaaagcgtttccctcaccctctggaattttcagctgctgattcatcacacattcagtttataatgtctgcttccatattgagggcattgtcttttggaatctctatacctgattgggcaaaggacactgataatctggctgatgcagtcagtaaagttgcagtacctgaatttaagccaaagaaaggggtgaatattgagacagacgtgaaggccgataacctctccagcgcctcagttgatgatgctgctgttatcaatgatcttttggcgaagctggaagcatgtaccaaggaactacctccgaggttccaaatgaaacctatccagtttgagaaggataacgattccaatttccactcaatttnaaaannttccccaacntccacttttcttttatt

SEQ ID NO: 40024 - DNA, 383 bp, Zea mays
  Clone ID: MRT4577_136501C.1
gcattcggggagtatcaaacatatgcaatgccaatgcttatgatgccatgctcaaattttagttataggaacaccaggggtgttacaggggggaccatacagaaacttctcgcgatcattgcactaggcagtgtgcaactcgcgctccacagtacgcaaccaatcttcagcatccatgggatcagtagagtgggcaaatacagggggatagcccctcatcaattctgcccgcttgtcttggggcacctgaggcatctgaacatgcacatgaggctgaggtgggggtggctactggtgcacttgctgcatcacttttagggtctaaccaatcgcttggactgcttgagtctgcattaggaacatctgctcaatggtcatcgggg

SEQ ID NO: 40025 - DNA, 171 bp, Zea mays
  Clone ID: MRT4577_136502C.1
ccgtatacgtctcctttaactccgctcgccttactctctaccacaagccatcatcagccagcgctcggcagagagagagacagcgagagcgacacagacagagagcgagcgagcgagccagagagctaggtaggcacccacgcccccttcctttctccatcctgcatctcc

SEQ ID NO: 40026 - DNA, 282 bp, Zea mays
  Clone ID: MRT4577_136503C.1
gggtggcctctttcttttttcttggtctttttttttggttctctcgctcctttggtaattttgtgggggctcctgtcgggctgggctttttttgtttaacgcttttttgttgtgggggggggggggggcctgctctgccctctgtgtggcccgtcttcctcggccattgcattccctttgtggttggcttccctcgggcgcgtggggcgccccccgcctttctgacggggcccgcgccgcgcccctgcttttccttttgggcgtcggtttcggtgcgtgtct

SEQ ID NO: 40027 - DNA, 693 bp, Zea mays
  Clone ID: MRT4577_136504C.1
ccggccggggcaatccactcaggcgacgcccatctcttagccaaccacctccaggcttccatgtccttcgcaacaagaaggacaaggatggctacgccatgtggatggccggtaaccttgcctccggtggtgctgctggtgccacttctcttctattcgtctactctctggactacgcccgtactcgtcttgccaacgatgccaagaacgccaagtccggtggtgaccgtcagttcaacggtctcgtcgacgtctacaagaagaccctcgcctctgacggtattgccggtctctaccgtggtttcatgccctccgttgctggtatcgtcgtctaccgtggtctctacttcggaatgtacgactctatcaagcccgtcgtcctcaccggtaacctccagggcaacttccttgcctctttcgctcttggttggatcgtcaccactggtgccggtatcgcctcttaccctcttgacactatccgccgacgtatgatgatgacctccggtgaggccgtcaagtacaagaacaccatggacgctgcccgccagattgtcgccaaggagggtgtcaagtctctcttcaagggtgctggtgccaacattctccgtggtgttgccggtgctggtgtcctctccatctacgatcagctccaggtccttctcttcggcaggccttcaagtaagcgattcgtac

SEQ ID NO: 40028 - DNA, 1336 bp, Zea mays
  unsure (1)..(1336): unsure at all n locations
  Clone ID: MRT4577_136505C.1
tacctcgaggccgtgggggcctcgaggccctcggggagcctcggcaaccttaccttcttcacccaatctcccctccaaacgtcgtcaagatgtcgggtaaacagcaagacaagagcttcatgggcatgcccggtttcgtggtggacttcttgatgggtggtgtctccgccgccgtctcgaagactgctgctgcccccatcgagcgtgtcaagctcctcatccagaaccaggatgagatgctcaagtccggtcgtctcgaccgcaagtacggtggtatcgtcgagtgcttcagccgtaccgccaagaacgagggtgtcctctccctctggcgtggtaacactgccaacgtcatccgttacttccctacccaggcgctcaacttcgctttccgcgacacctacaagtccatgttcgcctacaagaaggagcgtgacggttacgccaagtggatggccggtaacttggcctccggtggtgctgccggtgccacttccctcctcttcgtctactccctcgactacgcccgtacccgtctcgccaacgacgccaagtcggccaagaagggtggtgagcgtcagttcaacggtcttgtagacgtctacaagaagaccctcgcttccgatggtattgctggtctctaccgtggtttcatgccctccgttgctggtatcgtcgtctaccgtggtctgtacttcggtatgtacgactcgatcaagcctgtcgtcctcaccggtaacctccagggcaacttctttgcctctttcgctcttggttggatcgtcaccactggtgccggtatcgcctcttaccctcttgacaccatccgtcgtcgtatgatgatgacctccggtgaggccgtcaagtacaagaacaccatggacgctgcccgccagattgtcgccaaggagggtgtcaagtctctcttcaagggtgctggtgccaacattctccgtggtgttgccggtgctggtgtcctctccatctacgatcagctccaggtccttctcttcggcaaggccttcaagtaagcgattcgtacaacataccctgtatagatgagtgtgggggataaggattcgaggagaatcttaattagcgggctggacatggtgtccgctggttgaaacaaaaaggcgagatcgaagtgcagatcgagggaagttgtcacagatacccgacgtggtcctctgaaacagcagctcttntacgggttagagtggcataggcacggcgtctttttctaatcttgctttgccttccgttctaggccgctgtaatttatacaccaatgcaaattccctttactggcaaaaaaaaaaaaaaaaaacccgcggcc

SEQ ID NO: 40029 - DNA, 1426 bp, Zea mays
  Clone ID: MRT4577_136506C.1
tctcgccaaagcgccgcacagcgggtggcggcgcgacgcacgcacgcacggctcctcctgtcctgctcactcgaccggctcggcagcctcatgaatctggccgccctcacctccacggccgtccgtccccatgcccatgggctcatgccattaaacctcccctccgccgcctcctcctcgctccgtcgctccctcttcgcctccctccggaagaagatctccccgatggcatccgcccccgcctccgcctccgcagccctctccaccgccgcccccgccgacaacggcgccgccaagcccgcggagcagcggcccgtacaggtggcgaagcgattggagaagtttaaaacaacaatttttacgcagatgagcatgctcgcggtgaagcatggagcaataaaccttggtcagggctttcccaattttgatggccctgactttgtcaaagaggctgctatcgaggctatcaaagctggaaagaatcagtatgcaagaggatatggtgtgcctgaactgaactcagctgttgctgaaagatttctcaaggacagtgggttgcagatcgatcctgataaggaagttactgttacatcagggtgcacagaagcaatagctgcaacgatattgggtctgatcaaccctggggatgaagtgatcttgtttgctccattctatgattcttatgaggctacactgtccatggctggtgcgaatgtcaaagccattacactccgccctccggactttgcagtccctcttgaagagctaaaggccgcagtctcaaagaacaccagagcaataatgatcaacacacctcacaaccctaccgggaaaatgtttacaagggaggagcttgaattcattgctgatctctgcaaggaaaatgacgtgttgctctttgctgatgaggtctacgacaagctggcgttcgaggcggatcatatatcaatggcttctattcccggcatgtatgagaggaccgtcaccatgaactctctggggaagacgttctccttgaccggatggaagatcggctgggcgatagcaccgccgcacctaacatggggcgtgaggcaggcgcactccttcctcacattcgccacctccacgccgatgcaatcagcagcggcggcagccctgagagctcccgacagctactttgaggagctgaagcgggactacggcgtgaagaaagcactcctggtcgacgggctcaaggccgcgggcttcatcgtctacccttcgagcgggacctaacttcgtgatggtcgaccacaccccgttcgggttcgacaacgacatcgagttctgcgagacctggatccgcgagggtgggcgtggtggccatcccgccgagcgtgttctacctgaaccccgaggacgggaagaaccctggtgaggttcaccttctgcaaggacgacggca

SEQ ID NO: 40030 - DNA, 523 bp, Zea mays
  Clone ID: MRT4577_136507C.1
cccacgcgtccgtcttcgtccttgggaactccaacgtgctaacaacaacagagaagtcgattagcaggccaagtcacactgagaagcagcacacgggatgcgacctcacgctgtcgatcggcctgtgggcggaggaagcgagcagcgacgacgtcgacggctcgagctccatcagcgaggagctgatgcctgctgctgctcccgcagcgggcgctcgccgtgccgcagccgtgaaggaggaggagagcgaggcggcggctctgaacctggacctgaccatctcgtcgtcttattggctggccctgacgacggcgcacgccgacgcacggccggctggcggcgctagctgtgcatgactggcgtaggtatgcgcatctcatgcagagccgcagcagactgtgatcaggccatcagtactcgactgtatatgtgtgtatatgctaggtctcgatggctcggattttcgtgtccttcctacccttcttaatacttaccaactgtagcacttatttttctacttctt

SEQ ID NO: 40031 - DNA, 1334 bp, Zea mays
  Clone ID: MRT4577_136508C.1
tcgaggcggcgggatttccttatcaatctcctctccataccgtcaaaatggccaagggagacgttgtccaagccgagaagtcctttatgggcatgcccggcttcgtggtcgatttcttgatgggtggtgtctccgccgccgtctcgaagaccgctgccgcccccatcgagcgtgtcaagctcctcatccagaaccaggatgagatgcttaagaccggtcgtctcgaccgcaagtacgacggtatcgccgagtgcttccgccgtacttcccagcaggagggtgtcctgtcgctctggcgtggaaacactgccaacgtcatccgttacttccctacccaggccctcaactttgcgttccgtgacacctacaagtccatgttcgctttcaagaaggagcgtgacggttacgccaagtggatggccggtaacttggcctccggtggtgccgctggtgccacttccctcctcttcgtctactccctcgactacgcccgtacccgtcttgccaacgatgccaagaacgctaagaagggtggtgaccgtcagttcaacggtctcgtcgatgtctacaagaagaccctcgcctccgacggtattgccggtctctaccgtggtttcatgccctccgttcttggtatcgtcgtctaccgtggtctgtacttcggtatgtacgactcgatcaagcctgtcctcctcactggtaacctcttgagggtaacttcttggcctctttcgctcttggttgggccgtcaccactggtgccggtatcgcctcttaccctctcgacaccatccgtcgtcgtatgatgatgacctctggtgaggccgtcaagtacaagggtaccatggatgccgcccgccagattgtcgccgctgagggtgtcacctccctcttcaagggtgctggtgccaacatcctccgtggtgttgctggtgccggtgtcctgtccatctacgaccaggcccagctcctcctcttcggcaagaagttcaagggcggatccggttaagcgcctctcttccctcctcgataccccaaacctgcgtttatgtggcggaaacagctaattgcgacgtgagagatggggatgaggtgtccgtgttggagcaattagacgtccaatgggccgacgattgctcttgctgacgcaaagcacgaccccggagtggtaacacactcttgtactttacaacattcacacgtcatatccggcttgcattgctttgtctgtttttgactgtacttcctcttttcatcgctcggtgcaatggggaaaatagtggtcaatagaaagtcatgggtttctttataaaaaaaaaaaaaaaaaagcggcc

SEQ ID NO: 40032 - DNA, 795 bp, Zea mays
  Clone ID: MRT4577_136509C.1
cgtcgtcttggctagctgcctagctagctagctagttcctcactcctctccgagaaccccctttttcatctctctctctctctctctcggtctcgcccagctcctttcgatgttatcgtctctgctggcctcgcaactcgtcgagagagactcgtgaaaaagaatccagatatagctagagagaccgagagggcagctagcttaattattagcatgtcgatgagcttcttgagcatggtggaggcggagctgccgccggggttccggttccacccgagggacgacgagctcatctgcgactacctcgcgcccaagctcggcgccaagcccggcttctccggctgccgcccgcccatggtcgacgtcgacctcaacaaggtcgagccatgggacctccccgtggcggcgtcggtggggccgcgggagtggtacttcttcagcctcaaggaccgcaagtacgcgacggggcagcggacgaaccgggccacggtgtccgggtactggaaggcgacggggaaggaccgaccagtggtggcggcgcggcgaggcgcgctggtggggatgcgcaagacgctcgtgttctaccaggggagggcgcccaagggcaggaagacggagtgggtgatgcacgagtacaggatggagccagctgctcctcttcttgatcaccaaccctcctcatccaactccaagcaggatgaagattgggtgctgtgcagagtcatctgcaagaagaaactggcagcaggaggccgcgcaggagggggcagctcgaggagcctggtcgccagcaac

SEQ ID NO: 40033 - DNA, 651 bp, Zea mays
  Clone ID: MRT4577_13650C.1
gggtactcctcgggctctgccgggagctgctagcttgtgatgccatgctccctcccccagactgcgactgcgactcggcccgtgtcgtggctctccctcgtctcctcgctctggacggcatgggtggcgtggacgctgcctgtggtgctcgcgacggcggcgccaccggaccggcaaggagcagagccctgctccccgacgctatgcggcggcgtgaacatcttcttcccgttcgggatcgtcgccgaccacgccacggagaccagctgtggattgttcgggttccaggtcctctgctctaacgacaccccctacgtcgggtcctacaagactccgtactcgttccggatcctcaacatcttctacagcaacgcctccctgctcgtcgccgacgtccacaagctcggcgacttcgtcaatgtcagtggctccgcctccgctccttccaagccctgccactccccgacgggcaacagctcctccaagctcggcctccctttctcgatcagcccggccaaccagaacatggtcttctacgactgcgtggagccgccggcgcaggcggtgcggcggagccgcgggctcgtggacacggcgtgcgggaacaggacgctggtcggcgtcgccaggccccccgacgtgcctggcagc

SEQ ID NO: 40034 - DNA, 320 bp, Zea mays
  Clone ID: MRT4577_136510C.1
agggaggcgcacaccattaactccatctacttcacaactcttaacaacccaaccaacaccaggagggtgtgaggtttttccctggctctcctgcctctcgctactagcgccacctccacacatacaagctgcgactgcgggtgccagccaccaccgccagttcatctaccacctaccgtgcatctgccacctacggttcacctgccacctgcggtgcatctcccaccgccaatccacctgccgcctcctgtccacctgccaccgcccgtccatgtgccaccgccagttcatctgccatctgcaccatgccactaccctac

SEQ ID NO: 40035 - DNA, 788 bp, Zea mays
  unsure (1)..(788): unsure at all n locations
  Clone ID: MRT4577_136511C.1
ttgggtacctcgaggccggccgggattctctctctccactcttacgtttggacagaaccgcaaagatgtctcaagacaagtctgccttcggcatgcccggcttcgtggtcgatttcctgatgggtggtgtttccgccgccgtctcgaagaccgctgccgctcccatcgagcgtgtcaagctcctcatccagaaccaggatgagatgcttaagtccggccgtctcgaccgcaagtacgacggtatcaccgagtgcttcaagcgcactgcccagaacgagggtgtcctctctctctggcgtggtaacactgccaacgtcatccgttacttccctacccaggccctgaacttcgctttccgcgacacctacaagtccatgttcgcctacaagaaggagcgtgacggttacgccaagtggatggccggtaacttggcctccggtggtgccgctggtgccacttcccttctcttcgtctactccctcgactacgcccgtacccgtcttgccaacgacgccaagtccgccaagaagggtggtgagcgtcagttcaacggtctcgtcgatgtctacaagaagaccctcgcctctgacggtattgccggtctctaccgtggtttccttccctccgttgctggtatcgttgtctaccgtggtctgtacttcggtatgtacgactcgatcaagcctgtcctccttaccggttccctcgagggtaacttccttgccctcttcgctcttgggttgtgccgtgtccctgtcatctacgacccagnccagctcatcctcttc

SEQ ID NO: 40036 - DNA, 716 bp, Zea mays
  unsure (1)..(716): unsure at all n locations
  Clone ID: MRT4577_136512C.1
ggccggctcgagggccggccggggccggggnaaaaaaaaaaaaaaaaaaaaaaaaaaaaaaaaaaaaaaaaaaaaaaaaaaaaaaaaaaaaaaaaaaaaaaaaaaaaaaaaaaaattcccccttaaaatttccagatttcaaaaaccccccaggggaagggcattagaaaggcccaaaaaaaaggggttcccaaaaaataaccccccctggggtttttggccctttaagggagggaaaaaaaggggttattaatcccacggggcccattggccccaagggccataatcccacggtccccccccccagtaatttaaaggggtttcaaaaatccagcggggaaagccaaaaggtaacaacaagggttgggggggggggcttaaaaaaaccaaatggccaaatggaaaaaaaaatcctgggaaatttaaacccaaaaaaccttggaaaggaaaaaacaaaaaaattttcggccatcacggaccccccaagaaggggggaacccggcgcccaattggaaaaagaagtggttggaatcaaacccattggttcgggggaaggaacttacataccagaaacaaaaacagtggaaaaagttaaggccagggctcggtaaacaagccagggggaacccggcggttaaccaaaaatggttttaatcaacccggttcgtggggggaaaggaccttacgaacttaaaaaaaaagaaaaattgggggcc

SEQ ID NO: 40037 - DNA, 1386 bp, Zea mays
  unsure (1)..(1386): unsure at all n locations
  Clone ID: MRT4577_136513C.1
cacccgctggggcgaccgggattctctaggccggccgggatcctcaatctcccctcaatcctttcttcttgttcaagggaaagcccatcacagccgcaatcatgtcttccgctgaaccccagaaggtcttgggcatgccccccttcgttgctgacttcctcatgggtggtgtctccgccgctgtctccaagactgctgctgcccccatcgagcgtgtcaagctcctcatccagaaccaggatgagatgctcaagaccggtcgtctcgaccgcaagtacaacggcattggtgactgcttcaagcgcaccatggctgatgagggtgtcatgtccctctggcgaggaaacaccgccaacgtcatccgatacttccctacccaggctctgaacttcgctttccgtgacaagttcaagaagatgttcggttacaagaaggacaaggatggctacgccatgtggatggccggtaaccttgcctccggtggtgctgctggtgccacttctcttctattcgtctactctctggactacgcccgtactcgtcttgccaacgatgccaagaacgccaagtccggtggtgaccgtcagttcaacggtctcgtcgacgtctacaagaagaccctcgcctctgacggtattgccggtctctaccgtggtttcatgccctccgttgctggtatcgtcgtctaccgtggtctctacttcggtatgtacgactctatcaagcctgtcgtcctcaccggttccctcgagggcaacttccttgcctctttcgctcttggttgggccgtcaccactggtgccggtatcgcctcttacccccttgacaccatccgtcgccgcatgatgatgacctccggtgaggccgtcaagtacaagggtaccatggacgccgcccgccagatcgtcgccgctgagggtgtcaagtctctcttcaagggtgctggtgccaacattctccgtggtgttgccggtgccggtgtcctgtccatctacgaccaggcccagctcattctcttcggcaagaagttcaagggtggatctggttaagcgcctttcttccctcttcgatacccccaacctgcgtttatgtggtggaagcagctaatcgcgacgtgagagatggggatggggtgtacgtgtatgagaacgacaagaagccctgcgggcggaaggttgttcttggtaacgaaaagcacgatcccggggtggtaaaacactcttgtactttatacattcacacgtcatatccggcttgcaatgcttttgtctcttgcctgtacttcctctttttatcgcttggtgcaatggggaaaatagtggtctatagaaagtcatgggtttctttgtacgcnnnnnnnnnnnnnnnnnnnnnnnnnnnancaag

SEQ ID NO: 40038 - DNA, 325 bp, Zea mays
  Clone ID: MRT4577_136514C.1
gtgcattggtgcacctgtactaaccgcaaagtgacgtcggggggtgtggttgtggggggcggcgggagtgactccttattgtggagatctcgacgcttaacatgaacccgccggtatttccatgacgataattagataacgacttgctcctacctgtgccccggatacgttttcacttttttttgctccggatatctacacgaccgcctacaaggtctcattacctgtgccaccacgggctccacgccgggccgatatctcttatttgtcttacccaccctattaaacagagggctcgcccccactagttagtttgtttaccggg

SEQ ID NO: 40039 - DNA, 451 bp, Zea mays
  Clone ID: MRT4577_136515C.1
cgcatcgatgaagaattgtatgtggtcaagaataacaatgacttggaacaaattcaaagggagcctgcaggacagttgataaatgaaattgataatgcaaggttttatttgtcaaatgaggtaaatgaaggtggtcacagtcccataaattctgatgatgagggtatatatgtgcataggtctctcggggtagattatgtgaggtttgacgatgctaccatgagacacccaattatggacgttggaacagtttttaccgatgtggagcagttcagatcggcactacgaatttcatctcactactggaatgcttgctgttttggtggtttcagtaattaggccacaaggtgaacgcctgctatgttgagatgaagtaggaacgcctgctgttttgctgttttgtttgcctaagctagctgcttaaatcctgcaaactgtgtctgtgtttcac

SEQ ID NO: 40040 - DNA, 225 bp, Zea mays
  Clone ID: MRT4577_136516C.1
aaataaaactagcaccaaccgcccaaccagttgtttactcgcttgctgccttgccccggctcacggggcgctacctgtaggatcatggggcgcgggcgcggccacctcctgctgccggcagcagccgcctgcctgtgggcgctgtcgtgcgcgctgctgctgcacgcgttccctcacggcgccggcgccggcggcctgctgagggtcgggctcagcaagcgcggc

SEQ ID NO: 40041 - DNA, 401 bp, Zea mays
  unsure (1)..(401): unsure at all n locations
  Clone ID: MRT4577_136517C.1
ctgttttgtttgttttcttgccttatttcgagacgccgaacaggtgctggtttaagttctaggcaagcgcgggcgatctaataatttaatttagtcggtgcgcatcactgagacatgatgtgtattcatgcatgaccaaatgaaacggttcgttcttttaagagaacaaagccggaggcaagcgagctggtacctatttgttgccgtcctggagctgttcctgatggccctcgtcgtcgggcttggccttttgntgcacctcctacgacaccagatgctcctgttacgcgtacggtgatctagtggtccacccagcgaatgatttcttggaaaacgcattggatgttgtcggacgactcgccagaggtgagggcgtgcctcatgcccggacagaacttgag

SEQ ID NO: 40042 - DNA, 308 bp, Zea mays
  Clone ID: MRT4577_136518C.1
cccacgcgtccgcccacgcgtgcgcccacgcgtccgcacaggcgtccgcacatgggtagggggctcaggctatgcctaggccatgtccttgtccaagatgctgcacgtcgcctgccatggaggggtagtctcacggcctgaattcgcggaggcgccgtcgacggcaaggccgccacatctagcccgatcgcctgcgcactactgctgccgtagacgttcttggccgctgccatctgtgcgggcgccccgctactcctcggtaacctgagccagtgatgacgcatgcctgtcttctagaccgacgagag

SEQ ID NO: 40043 - DNA, 1750 bp, Zea mays
  Clone ID: MRT4577_136519C.1
gggagcaccggcccggcggcaccccgcagtcccgggctcccggcgtcccgcacccacgccctacaggcagaccaagcaaatggcgatctcgatctcgcaggaggccttcgactccatggtccgggagaacatggaggacctcggcatggaccccgatgaggccctcgctgacgccgttgaggcgctcaccctccagggcgccgatctctcaggtatcgttaagcgcgtgccgggagaggccaccgcggcggaggtgagcccggtggtgcgggttctggacgaactgaaggcctctctcagcgccagcggcgggtcggagcaggatctcgacggactcgtctctctgctcgatgagttgcgcaatctgtgctgctccggcgagggttcggagaatgcagcgatcgcggtacggaatggcgtcgtggaggcgctcgtcgccctgtgcgcgtccgctcgggtcgagcaggagaggctgcttgcttcggccttgaagagtctgagctccgtactccgtgatgtggcaagcactgaaaagttcagacgaagtgagggacccagaattgtcatggatctcttgcaaggaggctcagaaaattcagatttattggatgctggatttagtgttgtggcagcaggttctgctggcaatgaagttgtgaaagagtcctttatggacctgaaggtcgatgaactcattctgcgggttatgaaggataaatcaaaatctaatgtgcaaagtttgtatgatgccatacgtgttctgttgaaacctgatgacaaccgagtggtagcttctcaggtatatggatactcccggagatttgctgaaatcggggttgcagaagttcttgtcaatgcacttcgtgagcaagtcgctccttccagtttgccatctgcttgtgctgctttaaagtcgattgcagtcaatgatgaaatatgccgttccatatctgaaaatggtggaattgatgtgcttcttcaatgcatcgacgaggcaggtgagcagaagaacaaagttgtagcaagatcttgctgctctttgttgtccaagcttgctgcaagcgatgcaaacaagtccattatcattcagcgaggtggttttgataggttcctaaagttgacatccagattttctgaagatcctgctataattcaagaggttatgtctatggtgacggtcctcacactgaggtcaccagaaaatgcagcacgtgcaatggaagaaggctatgggacactggctatacagtcaatgcaaaggttcccctcctccgggcagactcagaagcaagcatgccttatgattcgcaatcttgttgcccgaaaccctgagaacaggaccgtcctgcttaatgatggtgcagaaaagcttattagaaaggccatggccctgcacggaagctgtaaagatgctgcctcgtctgccttgagggacctgggcctcgacaactacaatgcatagacaccagtgaccagtcacaccatagaaagtgtgcgtcgagttagtttggtcgcggtagaatgttttggaggagaaatacattgtgagttatcgaggtgccgcactgaaatgagtttgcagaattgcgctactgtggttgcatcaatggtttcagtttgttgggcaatccaacttcagggctattaggttgtctccagtaaatcttacatatgatcatacaatttttttttacagagtgaagtttaaaataggaaatgtttcaagaaaaaaaaaaaaaaaaaagcggcc

SEQ ID NO: 40044 - DNA, 522 bp, Zea mays
  Clone ID: MRT4577_13651C.1
gtttgggggtttttttttttttttttttttttttttttttttttttttttttttttttttttttaaaaaaaaaattttcttgaacacctgacatttttatttgggtacaaagaggttgagtgacaagtactacaaacgggcctgagtttgggggggtttttttcaaatcaataacaaaaccttgtaaaaaggcaattcatttgatgacagggaactttctgtaaactaaacccaaaaaaaaaaacatggcagggaactttctgtaaaataaaccgatgggaccacgctttgaataaaatgttaccagggttttgattaatccaccaacattttaaaggggtatatgacacctgatcacttacatttagcattaaaaataggttggtaacccttcttggggagggggatccaaatcagatataatcatataactacaactactaaccccaaaattattagcaaatttgttatttatttgggaaagctccaaaaaaaactgggggggggtggagaaaaaattta

SEQ ID NO: 40045 - DNA, 1347 bp, Zea mays
  Clone ID: MRT4577_136520C.1
gtggggcctgtggttgttgtcttttgtgtttctgtgtgtctcttgttgtattgcttttttgcccccctttttttttttttgcaacattcagtgacaaaaggttcatgaatagtccttgtttttcattagtagacaaatttcgcaacaacgatgcctggggccaatgcatacccagtccaggttgagtctgctcagagttgctagtagttagataatcccaggtcagcgaaggccaattggctagtgctgctaatcaagggtgcaaccagcacaagatggccttcttctctcctaaatggttggcatgtgtgcgactttttaagaagaaaaaaatgttgaaaatccgacacagcgcaacaaatttattctgtgacaatgcaagagcccgacttcttcaagctcctgctacgcatggagccgtgaactcaaaagaaggtccttccatgcctcgtaaaacatccaggtgacaccggacgttggcatgaccttcagggagctcgccgcccatcctcggaaaagccccttggcaccctcctcttggatcacctcggctaacgccgcgatcatgtggggtgggcacttcccttgcagggatcctaccataaggcgcttccttgccacttcaagagggaagctgatcgtgcttgcagttagacctgaaagagccccgataaccagcagctcaggacggctcaaagatttctttttgtgcgcacggcagtagttagtcttgatggtctcgtacatgaaatagtagcatgtgctatatggaagcatgccaaccaacgttgggcagaggccagcataaaggccaccaatgccatcagttcggtagatcttgctgaaaggcaatggcaatactaggataagcctcacggttgacagtcatgcgatccttaagaacctcaagaggatgacacaccaaagtgctagctattccagctgccgcacctccaatcgcaatcggcgatagtaagtgaaatggcaactcaattttcaaatcgccgagttgtatctttgggcatccttcctctttccatttctcttgtgccgaggccatactccttttgacacattcaaatgtcccgagctcaattgcttgagttgggataatccggagcatatttattgtattacctgcccagagtccttgccagccattatgttcaacaatctccacaaagctaccaaaaatatgttttgatcctacccctacaaccattcttgtcctgatagtttctaagggagcaagaacagccttagtcattgcaccagccaatgctccactcacgaattctgcaacttctctattcctcagaaaagtcctagcggcggcgcctacgtcgg

SEQ ID NO: 40046 - DNA, 262 bp, Zea mays
  Clone ID: MRT4577_136521C.1
cggacgcgtgggcggacgcgtgggagcagcgtggcacccctgcccgcaccgccgctgggctgtgcgtcggagccaccagcccaggctgccgccgagtctcgtgcccgcccaaggctaggcaactgcacaggaaccggggccgacaaccgtgggggcctcgcccgcgagccgcaggggctgcaccggcgctctgccgggtggccgcgcccgcgccggggggcgcctcacctgcgccgacatggcccacccggggcctgccccc

SEQ ID NO: 40047 - DNA, 404 bp, Zea mays
  Clone ID: MRT4577_136522C.1
attcggctcgagggaggatctagcgctttttttcatgtgggatgcgatctatgaggtctgatgggtatattgacattgatgcatatgatacagtagcaatgtagatcaaaggggatggatgatgctacatatgtacagtgtgtgttctgacacaagactgactctagaatattaaatgtacagtcactattgttatggacaatctgaaatcttaataagcacacatatacacggagaattggtagaattcacccgggctgcatgttgacaactcgtggcatgcttttgtgtacatacattataaagacatatgggaagacttgaagatccctctggatcgctatttacccacatggataggaaatgtgatccaggcgacgctgtaaatgaactctggtcggatc

SEQ ID NO: 40048 - DNA, 472 bp, Zea mays
  unsure (1)..(472): unsure at all n locations
  Clone ID: MRT4577_136523C.1
naaaaaaaaaaaaaaaaaaaaaaaaaaaaaaaaaaaaaaaaaaaaaaaaaagggcggaacgataaaaaagaaacacaaagactaacaaacacaaaacatgcaaaagggggcggccctttttatagtgttcccactatatccattcccactgcgccgcaaggtttacaactttcttttatctgggaaacccatgttcattacccagctccagatctccttacaacgacatcgccctgggtaaaaccgctggcgttaactccactataaaggccccttaccagatacatccttcttaacacctgctgcagcttataatggaaaaggcgcacgacgccttgtaccttcccaattaatccccacccttatgggggatatggcacaccccgtccgttacacttataaagcccctagggcccggtgcttacgctcagttgcatcgcttcattggcaagtgccctagctcccccccttt

SEQ ID NO: 40049 - DNA, 419 bp, Zea mays
  Clone ID: MRT4577_136524C.1
ggccaaaaaaaaaattttgtatacaccaaaaagttgggatttaaaaaaaccaaacacccaaaagggcatgaccggttttaaaaaaaacctgtttttttttttttttttttttttttttggctaaaacgtaaaaaaaaaataaatggacaacgtggaaaaaaaatgctaccatgcaaatgcaagggtacgtgcacaaacggaaaaattttttttaatagaacaaaacagtaaaaaagtagccatcgataataacccgtaaattgataaatataatcatgaccaccatctattatccccccgggggaaaaggggaaatggttggtaaaaaaaaaagggggccgttgtcccccggggtctaagtttaaattaaccctggaaaaatcgggggaggtccttatggtgtagggaatcctaacccc

SEQ ID NO: 40050 - DNA, 759 bp, Zea mays
  Clone ID: MRT4577_136525C.1
attttaccaaggcataagaaatttgtgggtgctggaaagaaggctacaactttcgccaacagaatttggttagattatgctgatgcagcagccattagcaagggtgaggaagtaacccttatggattgggggaatgctatcgttaaagagatcaaggtggagagtggagtaattactgaactagttggagaattacatcttgaggggtctgtgaagacaacaaaattgaagatcacatggctagcagatatagaggagctagtccccctctcattggttgaatttgattatctcatcagcaagaaaaagctagaggaagatgatgacttcctcgagaatctcaacccttgcactcgacgagaaaacccagcccttggagatgcaaacatgatgaacctcaagcgtggagagatcatacagctcgagaggaaaggctactataggtgtgatgccccttttatcagatcgtcgaaaccggtggttctgtttgcgatcccagatggccggcagcaggccttgcttaactaggcatgatgaccacttttggcacatggaattcctgagatatcggagtcggcaatcaatattgttgcattatacactttgatactgtactgtgactgggcttactcatggtgtgccagatggccaggcctatcctgtcaacaaagcagcacagccattttgattttggtcgattatacttttaccggagcttaaaagtttcttatacttttctggcagtgcctttgctatttt

SEQ ID NO: 40051 - DNA, 1017 bp, Zea mays
  Clone ID: MRT4577_136526C.1
aaatatactttctcttgatttatggtatagataccataactgtgaatcaggtattgtgaacacgtacctgcaataccctgtccaatgacgtttgatggactcaagttttcagttgctgtgtatatttctttgatcgacatcggcttgcaggtagtctcctcatactcaagggatgccaacgcgacctctgcaagaaaaaaaaacatgtgcaacttcgtattgctattagtggaaaacagctatggccccaattatcaccccagcacagaggcatcctagcaacgcttcgtatcctgttgataaattttgaggagctcaaagcttgaaagatcaagtagaaaggttgattagctggatcgcacacggctccaagcaaaacaaccgatgagcaaccagctgggagatgcaaatccagattgcgttacaagcctcgtcgtcgggatcaagagcgagaggcgttcaccgcaggggctaaggtgcagagggctggacagagacaatacaacggcctctgcccttttgtgattgcaacagcacatctgccagttgttgtgtgtatacacattacacacggatacatagagttttgaagaacggattgcagcatatctcatctttaggactcactgcttagggcttaaggatgcatgattattggcactggtacaaatggtgcacatttcttcctatagataaaaggaggccgagctaagataatcttgggccgtgaggatgctattagggtgttctctgacttggtaacataaaccgagttgggataagcaccaaatcttcatcgtgtgtgtatggtcttcacacgtcctaatcagggacacaaaccaacccttagttgtgacaccctgtcacgatagacccaccataaatagagacaagagccaacatagatgtgcatccgtgcgctcgaaaaccctagccgccacaatcctagaggtcttgatctatgtaccaccggtgatgggcacgacaataatgatcaacgcgaccactatcatcatt

SEQ ID NO: 40052 - DNA, 418 bp, Zea mays
  Clone ID: MRT4577_136527C.1
cggacgcgtgggggaattcctgagttggcgatgagtattgttgcattgtacacgttaatattgtactgtgattaggctttactcgcggtggatgtctttcaccgctagatggccagaggcatatcctgccaaccaagcagagcagccattttgattttggtctatgatacttttacctgcgcttgaatattcctataaaaaaaaaaaaaaaaaaaaaaaaaaaaaaaaaaaaaaaaaaaaaaaaaaaaaaaaaaaaaaaaagggggcggccgttcgcgatctaaaactagtccctggtgcaaaagttgggaaagtttgcgttcgttttgccccaaagcctaggggttacctccatattgggcatgcaaaggctgcactattgaacaaatactttgctgaaagatataaagggcgctta

SEQ ID NO: 40053 - DNA, 964 bp, Zea mays
  Clone ID: MRT4577_136528C.1
cattgtgtagctcgagaatgaagggttcgtccggatccgggcaagtcaccactcactagtcaccagtaactttaccaatccgcgccggtggtaaccctgcctttggcggcggctagccggtacccagtgtgcgcactccctctatctccctcttggcgacgactgggcggccgtcgctgctgccctacgccgtcttcgggctcttcgttgtcgacgagcgccacaaggttcctaccatttttaagaaaaaagatcaatggaggcagctttgtcattctccaaggacagcccaccaatttcgataatttgtgctgcaaagattgtgggtctacccctaaccatcaatcatagcctcgctgctggctcggcacccaccctacagtttgcttctggagaatcactccatggtgtcaacccaatcatcctctacattgctagaggtgcatcaattgcctccttatctggaaagaatgatattgagtttgggcatgttgttgaatggcttgaatatgcccccaccttcctttcaggctctgaatttgaaaatgcatgcttatttgttgatggattcttggcctcccggacctttctggttggtcatggcctgacaattgctgacattgcagtttggtcaaatcttgctggaattggtcagcggtgggagagtctaaggaaatcaaagaaataccaaaatcttgttcgctggttcaacagcatagattcagaatacaaagaggcactgaacgaagttgtggctgcatttgttgggaaacgaggtattggaaaatctcctgcacctagccttaaggagaaggtacatgactcaaaggacccatcagctccagaagttgatctccctcattgcgttcgttttaaggagaaggtacatgactcaaggaacccatcagctccagaagttgatctcccctggtgcaaagttgggaagtctgcgttcgttttgccc

SEQ ID NO: 40054 - DNA, 3922 bp, Zea mays
  unsure (1)..(3922): unsure at all n locations
  Clone ID: MRT4577_136529C.1
aattccttggttgacgagcttttatgtccgccgccgcccttttttttttttggggggttaactggactttttttgtgaggcatatacacgactcttgatccatgactcaagataaaagggaaatatggctgtacaaatgcacaaggaaacttcagatcttgggtactggcagcaactcagagctcaaatagacataccgaaggtcctttcaagtaaagaaaaaggggagcattacagaaagctaccttgaatcacagttaacacccgcactctgcaaaaaaaaatggtggaccagcttgacgggcttcaaacaagactactttgtcagccatcccatcgatgcgaccaaagaaatggggtcttccttgcttcaggtgaaattctctcactggtgaaccgaaaggcacccacctgctgaacactgctccttcacctaacttcttgggataaagcaaaacactagctaatgtcagagcacctttttgctttttttttttttttttctttttttttttttttactttaaaataatttttttttttctagagaagtataggaatattcaagctcaggtaaaagtatcatagaccaaaatcaaaatggctgctctgcttggttggcaggatatgcctctggccatctagcggtgaaagacatccaccgcgagtaaagcctaatcacagtacaatattaaagtgtacaatgcaacaatactcatcgccaactcaggaattccatgtgcccaaaaggtggtcaccatgcctagctaagcgaggcctgctgcctgccatctgggatcgcaaacaggaccaccggtttggacgatctgataaaaggggcatcacacctatagtagcctttcctctcgagctgtatgacctctccacgcttgatgttcctcatgttcgcatctccaagggctgggatttcccgtcgagtgcaagggttgagattgtcgaggaagtcctcgtcttcctctagctttttcttgctgatgaggtaatcaaattcaaccaatgaaaggggaactagctcctctatatctgctagccatgtgatcttcaattttgttgttttcacagacccctcaagatgcagttctccaactagttcagtaattactccactctccaccttgatctctttaacaatagcattcccccaatccataagggttacttcctcacccttgctaatagctgccgcatcagcataatcgagccaaattctgttggcaaaggttgtagccttctttccagcaccctcaaatttcttatgtcttggtaaaattcgaacaaatggctcctctggaccatttgtaagagtaaagatgacacgctggtcttttagcacagcagtatgccttgcgcacactggatcaattatcttcttgttgattgtccagagtttatcccattccatgagattcagattttttgaagcaccctgttggagtataaactgtatcaatgcctcaaccttcaagccccgacgtactatgccttggacagtgggaaaacgtgggtctgtccaatcttcgaccttcttgttttgtacaaaccaaagaagctttcgcttgcttagaagagtgtaaaccatattcaatcggctgaattcataaatttctactctcctcaaccccatgtcttgaagaattcgataatattgtgcatttctgtcatgatattcactggaacgaagagcatgtgttaccccctccaatgcatcaacaaatgggcacgcaaagtcatatgttggatagaccttgtacttcgaaccaacacgatggtgtggatcagtattacagcggtagtaaacaggatccctgagtgacttgttaggatcctgcatgtcaagtttaccccgtacacagcactgcatgcccctttcagttccattaaccatctctttccataatgagagattttcctccacggtattatttctgcaccttgactcaataccgtccatcctctctttcctcatttgctcctttggtgtgtcatcaatatatgctttaccctgctttatcaaactctcagccatttccattagctttgggaaataatcagatgtgtatgtgacagcatcatatttgatccccaacgtctcaatatctttcaaaagattctcaacaaactcattgctttcttttgaagggtttgtgtcatcaaatcgaactattaagcgcccttgatatctttcagcaaagtatttgttcaatagtgcagcctttgcatgcccaatatggaggtaaccactaggctctggggcaaaacgaacgcagactttcccaacttttgcaccagggagatcaacttctggagctgatgggtcctttgagtcatgtaccttctccttaaggctaggtgcaggagattttccaatacctcgtttcccaacaaatgcagccacaacttcgttcagtgcctctttgtattctgaatctatgctgttgaaccagcgaacaagattttggtatttctttgatttccttagactctcccaccgctgaccaattccagcaagatttgaccaaactgcaatgtcagcaattgtcaggccatgaccaaccagaaaggtccgggaggccaagaatccatcaacaaataagcatgcattttcaaattcagagcctgaaaggaaggtgggggcatattcaagccattcaacaacatgcccaaactcaatatcattctttccagataaggaggcaattgatgcacctctagcaatgcagaggatgattgggttgacaccatggagtgattctccagagacttactgtagggtgggtgccgagccagcagcgaggctatgattgatggttaggggtagacccacaagctttgcagcacaaattatcgaaattggtgggctgtccttgtagaataaaaatgctagctccattgattttttttttttaattttcatagaaaccttatgacgcagttcgccaactaggtcactgattactgcatagggcagcagcgactgccgcccagtcgccgccaagagagcgataaagggaatgcgcacactgggtaccggctagccgccgccaaaggcagggataccaccggcgcggattggtaaagtaactggtgactagtcagccgcgacttgcccggatggtggtaaaattccttcagtgtctagcactacaccccgggcgcacactggatgcctctttgtattctgaatctatgctgttgaaccagcgaacaagattttggtatttctttgatttccttagactctcccaccgctgaccaattccagcaagatttgaccaaactgcaatgtcagcaattgtcaggccatgaccaaccagaaaggtccgggaggccaagaatccatcaacaaataagcatgcattttcaaattcagagcctgaaaggaaggtgggggcatattcaagccattcaacaacatcaacaaactcaatatcattctttccagataaggaggcaattgatgcacctctagcaatgtagaggatgattgggttgacaccatggagtgattctccagaagcaaactgtagggtgggtgccgagccagcagcgaggctatgctacacggttgggggtagccccataacagtggtagtaaaaatgatccctgagtgacttgttaggatcctgctgacaaagctgcctccattgatcttttttcttaaaaatggtaggaaccttgtggcgctcgtcgacaacgaagagcccgaagacggcgtagggcagcagcgacggccgcccagtcgtcgccaagagggagatagagggagtgcgcacactggataccggctagccgccgccgaaggcagggttaccaccggcgcggattggtaaagttactggtgactagtgagttgtgacttgcccgctccggccggcgagcttacgtacgcgtgcntgcgacg

SEQ ID NO: 40055 - DNA, 1524 bp, Zea mays
  Clone ID: MRT4577_13652C.1
tgggacctcgagcaggcccggttctttgccgagggtaacttctgcccgcaaagaaagaagggaagagttctcggcttctcgcgagtcgcgacagagagaggcggagttgcggagaatatgcagagcagcagcatgaagagggagatcagcgaggcccacgacaccattcgcttcggcatcaacgccggcgtcaaagccgacctcgccccgccgcacccgctccagtctaccatccaatcggagaccaagttctgggcggacaagaagaagttcgggacagatgccatatatggatccgccctcaacatccgcaaggatctcgatgcccaaatcctctccaggttccaaaggccccctggtgctttgccgtcatctctgcttggatacgaggcactgacaggttccctggatgattttggatttgaagattatcttaacatgcctcatgattctgacagtttccgtcaacctgacatgcaccatggaatggaggttcgccttggtttgtccaagggacctatctgtcctagcttcaattgaggcagtaatgtaattctgctgcaagttcacctctcagtccagtacttcagtcaatagaccatattaagatggtgaaatatgaaaactggtagcttgcatctgttcaatgttatgttttaatcaacgctgaatttaatatttgtcaagtttgaacttttctggtttccttgccactgcgaggccatggaagcgaccaaatttatatatgtttgatgcgggttgtccatggttgccaaaggaagcccaaaaaagctgctctgaaggacaatgcttccaccagcgcggccgtagaggcggaagcaaggggttgggcttctgtcggtgctggacagcgtgatgccaaacgtgccagccactcttgctgtcgtccgcctccctcttccacgataggttcgcccgcaccgagcctagacgcagatagctctcgaccgtccgctacagtgctgtcgaagagacggtaatggaggaggcctcgcccgagacggtcgagtaatcactgctggtgagcgcaatcagagggaaaaaggttgagagggcaccaatctggctcatgaggcaagccgagagtgcctcaagattctgaaggtttccgtcaacctgacatgcaccacggaatggaggttcgccttggtttgtccaagggacctatctgccctagcttcagttgaggcagtgaatgtagttctgcggttttgtcgcacgttgatgcaccttagtacagtacactcgggtcaataaaagaccacattaggatggtgaaacggtgaaaactgatggtttgcatatgttcagagtgttatgttgtaatgaacgcatattgcgaagcatcgcagttgagctttaggatctctgcagctgcaggtggcttctttcgtactcgaattagagttagctgtgaattacaatccttttgttatttttctctaacttgtacgaggaaagcaatccataggaatttttaaatatgccaccaaaatccatagg

SEQ ID NO: 40056 - DNA, 617 bp, Zea mays
  Clone ID: MRT4577_136530C.1
gcacgaggaaagagttcgatgctgataggatcttggggcaggagtatgcacaaggtggaatttagatctactataatcagtgggaaaagtaggctatttcctgtagaggttctatttaataatgaaaaaatggaataggcattgaaaaaacaagagatgaagctcaagctcaagatgctgagaaaactctccaaaatttaaagatggtttctcagctttcaatccataagatttgttagagaagagtcaaactctcagtcaggaaacacactcgatgatgaggatgtaaagctactaggtgatgatgaggatgctttagcagatgatgaatgaaggacatcgctgttggagaagtacctatgttgattgcagggttttgcaatggattgtcttatctctaaagattgtagtctaggtatctaaacgaggaactaacatgtactagattgtattgtcgtagatgtttgtttgtgggagaacatttgtgaagttacggggtgatcagttgatcacaatgccagctcttttgtgttgagttcatactgtattcttaactaaccacaactaatcatatgataaatcatatgagacttttttgacttcaaaaaaaaaaaaaa

SEQ ID NO: 40057 - DNA, 653 bp, Zea mays
  Clone ID: MRT4577_136531C.1
atgcccacgcgtcagaagaagctcatcaagtacaagggcttccaggtcgctcctgccgagctggaggccattctcctgtcccacccgtcggtccaagatgcggccgtcttcggcctgccggacgaggaggctggcgaggtcccggtgtcgtgcgtggtgaggcggtgtggcgcgtcggagagcgaagcggacatcatggcgtacgtggcgggccgcgtggcgtcgtacaagaagctccggctgctgcagttcgtggacgtcatccacaagtcggtgtcaggcaagatcctgcggcggcagctccgggacgagttcgttagcaggaccaaaacggcggcagcctagctctagcgagagctagacactccaatatgctagttacatacttacatgcacacgtacatcaaacgaataaatgtcaagctattctaaattttaatactactacaatggcgtgatgcgcaattatgtatgtttatgttttttttcatgtacaaccttagcccttgaatcggtcaagtataaaaaaataactaagagaccatgtgatacaacctttagccccttgatcataaatgtagttaagagacattatgtataaagagtcgtgatcttttttgaagagatcgtaatattttgtactttttccagtt

SEQ ID NO: 40058 - DNA, 316 bp, Zea mays
  unsure (1)..(316): unsure at all n locations
  Clone ID: MRT4577_136532C.1
acgcgnncgacggctgcgagaagacgacagaagggcacacanacaaggaactggaggacatgaagaagaggctgaaggagatcgaggaggaagctagcgcccttcgcgaaatgcaggccaaggtcgagaaagagatgggcgctgttcaagattcgtcgggcacttccgcaactcaagctgaaaaggaggaagtggatgctcggtcaatctatgttggtaatgttgactatgcatgtacgcctgaagaagtccagcagcattttcagtcctgtggaactgtgaacagggtgacaantactgacagacaaattggtca

SEQ ID NO: 40059 - DNA, 160 bp, Zea mays
  Clone ID: MRT4577_136533C.1
attctgttcacacggccacatcatcattgtcctagtttacctcgtttttattatagattcagcgcaaccaatctactagcacaaccctaagtccatgatgatgtggccgtgtgtatttaatgtattctgttcacaattatgtttcgtgctcttttttttt

SEQ ID NO: 40060 - DNA, 665 bp, Zea mays
  Clone ID: MRT4577_136534C.1
gccggcccgggcctgccagctagcttatagtagcgctttatatatatgatcgagctgcagatgagaagctgcacgcgatgccccagcaagcagtattagttgggttgacggcgggcatggtggcggcggaggggaaggcagctgggaacaagacgatgatgcagaagcagcaggcgagcagctgctgctcggaccgtgaccaggacatggcggacctggagctggcgcttgaggcggttgttccggtgagcgtgcagcggcaggactcgctgtacagggacgcgacgagggcgggcggcggcgggcagcagcagcacgaagggtgggctcggactctgaggctggccttccagtgcgtgggcgtcctctacggcgacatcgggacgtcgccgctgtacgtctactcgagcaccttcgccggcggcatccgggacaccgacgacctcctgggcgtgctctccctcatcatctacagcttcctcctcttcaccatcatcaagtacgtctacatcgcgctcagagcaaacgacgacggggacggcggcacgttggcgctctactcgctcatctctcgccacgccaaggtcagcctggtgccccaccaccagcccgaggacgagctgcagacgccgaaacgccgcgccgccgtgctgggcaagcacgga

SEQ ID NO: 40061 - DNA, 284 bp, Zea mays
  Clone ID: MRT4577_136535C.1
ggtcactcccaaatatggacccataccgacgaaaattttccaatacaattgggatgttgtaaaatgcaaatgtgctccgctgtgagcctgttgaaaaccacggcattattgttgcattttttataattcttttggcctggaaacttgaggattgggatcccaggacgctttatacctttgaatagactgattgcttacaatggcagaacttttccaatccgaggtttattatatgggaatggggggttcaaaacctaaaatgtcgattggaactaattttattt

SEQ ID NO: 40062 - DNA, 132 bp, Zea mays
  Clone ID: MRT4577_136536C.1
ctcgagccgggcagatttgcatggtacggttcatttatcaagtgatgcgcaccccctctgtgtatgttgtggctccaggtacaagtacaaccaatcaagccaagcaagtttgattggttgtacttgtacctg

SEQ ID NO: 40063 - DNA, 455 bp, Zea mays
  Clone ID: MRT4577_136537C.1
gcaggaatgtgtctgatttccaaaggggtgccggatggtagcacaggttgaacatagcaaattacagggggttggtcggggtatttgataaacatccatttgtgcttccaatcaacatgcattggactgtggttttttagccagtccattcccaaaatcaagtcataacagggaatcggaatcactttaaaggtagagcgaaactgaaaaccttgcaagtaccaagctgcatccaacaactcctgggtacactgaatgatactgtcgttggccacaagaacgtgcaaaggttgttgcagtacagtaaacccactcagaagagaatgatgagcaacattcaagaatgagtgtgaactacctgaatcaagaaggacgagcaacgacacaccttggatagtaccatgcagcttgaacgttgtaacaaaacatttagtagctgatgcttcttgagatag

SEQ ID NO: 40064 - DNA, 139 bp, Zea mays
  unsure (1)..(139): unsure at all n locations
  Clone ID: MRT4577_136538C.1
ccgcccatttcttnatncctcccatctcctgttctccatctccatcttgtgcgcagcgccggcgatccatcttccgctgcctcggggcctcgcgctcgnnctctcantgacgncatcancnntttcccctcccncctct

SEQ ID NO: 40065 - DNA, 377 bp, Zea mays
  Clone ID: MRT4577_136539C.1
tgatattttagatttcattgaggaacaagatgaagaacagctggatgatgaggaagaagatccacatgatgatgcagatgtgatagatcgtggggatgcaactgatgagcccactgacgagggagaaaatgcagcagctgctgatatctttgatagcttagatgattatgagtgactcggtgatgggcatggccattgagagagaggaactgggtgatgtactgctgtttaggggttgttatttgactagtgtgtgctgtagttttatgtggattatgtgtgctggtatggactgggtgatgaacagcagcaattgttctgtgactgtagttttgttatattgctagtgcgtgctggattatgtgtgctgaattacc

SEQ ID NO: 40066 - DNA, 492 bp, Zea mays
  Clone ID: MRT4577_13653C.1
cccggtaaaaaaaaaacaacaaaaaaaaaaaaaaaaaaaaaaaaaaaagaaaaaaaaaaaaaaaaaaaaaaaaaaaaaaaagaaagcaaacaacaataaaaacaaacaagcaggccgcccgctttctagggacggcttccaaactgctcctccagggctatgattctccccttgctgcacaactaaatccctggtggcgggccgtggggttctcccaatcgttaattggttgcgggcttgggctctcccaacgtctgagggggccctgccactatcccctgttccgacgtttgctccaaccggatgggcccctggcccgccccttggtgcacgccatccacccgggcattggacgtgtgcctgccctggtcacccataccgtggccagtgctctgtcccctgccctccccccttaacccttttctttgtccggtccttccctcgtgtctttgatgttcgtttccattcatgaattaacgggtgggctccctt

SEQ ID NO: 40067 - DNA, 615 bp, Zea mays
  Clone ID: MRT4577_136540C.1
gcgtttttggacgcgtgggttctcacggagaagaggtgccgcagcggttgcttgagatcgcgggggtcgccacattctgggcttggtacccgttgctggtggcttccctgccgaattggtgggagagggtcgcgtttgtgcttttcagcttcaccatctgcgggattcagcacgtccaattctgcctgaaccacttctcgtccgacgtgtatgtcgggccacccaagggcaatgactggtttgagaagcagacggcaggcacgctcgacatcctgtgctctccttggatggattggttccacggtggcctgcagttccagattgagcaccatctgtttccccgcctaccttggttccacggtggcctgcagttccagattgagcaccatctgtttccccgcctacctcggtgccaccttcgcaaggttgcaccggccgtccgcgacctttgcaagaagcatgggctcacttattctgcagccacattctggggtgcaaatgtgcttacatggaagacactcagggctgctgcattgcaggccaggaccgctacaagtggtggtgctccgaagaatttggtatgggaggctgtgaacacccatggataaatgggat

SEQ ID NO: 40068 - DNA, 253 bp, Zea mays
  Clone ID: MRT4577_136541C.1
ccgtgattgagtgtccatcactggcgtcaaatctcaatcatgcatgaattctgccaagagggcatcctgtaattttgttgttcaaattgtaagaccggtcccaacggtcgtcggtactgtcgacggccctgcgatcggcacgtctgcccccgagttctagccacggtcggtcgagctagcggtcggtgacgctgatgaccacccagaccgacctagcggtcggtgacgctgatgaccacccatgaaccgtaga

SEQ ID NO: 40069 - DNA, 391 bp, Zea mays
  Clone ID: MRT4577_136543C.1
gtggataacaaggggcgaagaggctgcaattgctaagttttgagaggctatggaaaaggctagtactgcaaagcttactgatgaaatattggtcgggctatcagatgactctgaagacagcgaagattttgattttgaaggcgatgttgatgatgctgaaaaacgtccttggaaaccaagtcatgtcgtctttgggatgtcggtcgtgaagaaaggtcatattgaacctatgaaaggtaagtattttaatgatgtttcccttgtgaggcctggtggggacgctattgtcgtcccgcttcctaagaaggacgaagtagttgtttatcgaagctttttgaagggtgggctatgttttcctcttcataaaatgttagtggaagtctttaaaaga

SEQ ID NO: 40070 - DNA, 312 bp, Zea mays
  Clone ID: MRT4577_136544C.1
tccacgctttcttactattgccagtccaacaatgggcagcaccaccttgccggtggcaagcatgcggggacgtcttacccaccatttcattaccccaccgtttctagctgagggagaagtctttactttgcggttcgctcaggtcgtagattaggtgcgtttccagacagtccttagtcgcctctgtttcttctcgctgcgtccggtatcttcgctcattttaccctatttcttgctggtgattttcaaacaatcttcgactataaatattgctgaagtctatctgatgggcgggggtgtcatgacaatttt

SEQ ID NO: 40071 - DNA, 357 bp, Zea mays
  Clone ID: MRT4577_136545C.1
agggggggggggaatttttggtggggtcgccgggccccccctggagttttttttttttttttttttttttttttttttttttttagaaaagtgcgcacagtgtgtgaaacagctgggacgtctactaccaacagtttgtattctccagctgagtctgctgccacggaagttgcattcgtggactcattatgtccctaagccaagctcggcttaagctgttaacagccgagggaggagagatgtcaactctattaatgagacaattcaaatgcaagccacaaggcgagtgtcaaggttgagggtgagccctagcaccggacgtgcaaacaataatatttgaggggcaaggccctatcc

SEQ ID NO: 40072 - DNA, 1141 bp, Zea mays
  Clone ID: MRT4577_136546C.1
cggacgcgtgggtttcatcttgaacttttctggtactgacttgaaatgtctattaaatttgctagaaatgccaaggaattgctaagatttaatgacgctggtgttgaaatagttgtgaaggtgtttggacccacaaatgtattcctcctatgacgaattcctcaggctccatgaaggtaagcctgtcttaatgggcttgattgttgaacctgacttagtacttttatccatgtcacgacattgaaccagacagtcactcatgtccttaggatattaacggtatacatcaacaattcattctattttaattgcttgccaaacttttttggcccttcaaatgagttccacgcatcaagaagtcaagattccaggaggcctaaaataggagaggagggcgcagcttgattcaatccatgtcaagtcaaaggctgctgcgaagtttgcacatgcaagtagaatttagatggtttattcaatttcggttctaatgcttctgacagcagttgtatcagtcctcttgttcagcttacataataatgtactaaacttcagtttggtgtctatctcagtgtacctacactcagttggaaaacttcaaccacactgcaacaaggtttataaaaggtttgctatgaggaaaaacaaatttatgggctcaaacaaagtgtgatagtgaaagtcattttgcttccagcttaagaaccaagccaagaaaacagatatcaactgtgacgccacactcaaaagcttgtttggtgagagggataaggttgggatgctggagatctctaagcttttgagccgtggcttcccgaaaatctccaagcttttgtggtccatggagccagggatggctctttggtaaaagacttcgttgtggatggcctcttttatggtccatgttaagtcccaagtcccactaggtggttaagcagaaaaatcttgtgatggcattaagactttcagactttgtttttgggtctgatgcatgtaaaaaggattcccagtgtttctgttgctcttgcgatcctgtgaggacacatatgagagaaatatttagtttgttgatggcaaatcttgtcttatgttcaaaaataaaaaaaaaaaaaaaaaagcggcccatctgatcaagcgttatgat

SEQ ID NO: 40073 - DNA, 138 bp, Zea mays
  Clone ID: MRT4577_136547C.1
ctttacggagggttaacatgaggactaggcggaatcatggacataccgtgttacctgtgggaaactgttttgcaggtacacttgcgcacaacatgcgagccggaaacattaagtgaaaagcctggggagcctaaggag

SEQ ID NO: 40074 - DNA, 553 bp, Zea mays
  Clone ID: MRT4577_136548C.1
cattgggtacctcgaggccggccgggatggcttctaggacatctattccagctcttactgttccggcggacggagtcctccgatccctgtagctccatctccatctgccatgccctgccctatcgcttacaccgccggcgatttgtccatgctcgcccagtgcactgtgctgctttgcctctatcattgtagctccatcgttctcatcatcaagagatcgtactcccttttgcattactctgcgaactcgaacgaccacccgccgtttctcgaatcacggtgactaggtgcttggcagaacactgagaacgacctgatgccatctcacgaggcgccgtgatgtgatcaaatgagcgcaacaccatggggagcgtatgctttatgatgtgttctaacttactatcctgactgcagcgtaaacttggctccattgtcgtgttctattgtacttgctgaagcgagagggttgatatccaagacatccggtttttgttgatggacttactgagaacgttaatgtacaccatgctgcatccggatctacttgtccttc

SEQ ID NO: 40075 - DNA, 579 bp, Zea mays
  unsure (1)..(579): unsure at all n locations
  Clone ID: MRT4577_136549C.1
aatgattcccgcatcagnaatcaanatccaggagcctaaaatagagaggagggcgcagcttgattcaatccatgtcaagtcagaggctgctgcgaggtttgcacatgcaagtagaatttangatgaaaagacgtgaaatggtattttccagtatggactgtataaatgtaattatattcctatgctggtcctgcttcgctttcatgtggatttatcttgcaaatggtatgtggatccgttccagaggcaatgagccttgcagccagtttgcagtataaaaaacccaattatgtccactgttggttcgacgcagcgtgtgccgaggatttctactgccaagcataagaaagtatttgaaatcaagaacttgcattcattcaatcataatgtgtttcctatcaagcataagtgtgtgtgttttgtttgatatctgctttaataggagattgttcttgtcaccccaaaaatgttcccattctactttcgggcaggtgaattgcagataaatggtctgttcgcaactggtgctctcgggcgactccatcactgagcaacccttcgccccggtggctgcggtgt

SEQ ID NO: 40076 - DNA, 137 bp, Zea mays
  Clone ID: MRT4577_13654C.1
cttcatccgcaacattctcgtggaggaatcattcctcaaccattctcccccaagctagcactcatggcttccatcattcgctccgcctggtgcgtcagcggcccccatctctcgcagcggcctcccaaaccaggcgc

SEQ ID NO: 40077 - DNA, 217 bp, Zea mays
  Clone ID: MRT4577_136550C.1
aatataacactggtaactgctataaaaaaaaacccgccagggtttttaaagcgtgagtgtccccaaatttgggactcttgcaccccgggattaaatccgggcccggaacttgacgggctcccatgtttccttttgggcgcgctctttaaccttgggcggaatcaggggcaaagctttccccgggggaaaattgtttcccggtcaaaattccccaaaa

SEQ ID NO: 40078 - DNA, 514 bp, Zea mays
  Clone ID: MRT4577_136551C.1
ggtcaggggaaccaacattttagccaacaggccaacacaggtcaactcatggggggccacaggggcctaagggggaggcccccactgggcacatatcaggggctcttattattatttcacgagggcttcgggggggtattctagcctgggggggacgggacttttaggggcccccgaaggccagcgaccatttgtttcaattcacccctggggtccgatgatcccacaaggaacacgggcgccagcggttccggggctcttgctgagctcggggccaccctttccaaaaacatcgggggcagggggaacaacaacagctctgccaaagattgagtttggcccaatcagggggatctggctgtcgggaacattaatggtgggaacaccatttggtccagagggcacatttccaaaaacaccgggatgggggggctcattttctggggctccaagttccttgctcccaagattgtagggtgggccaattgacatgcagccattggtgggggcacca

SEQ ID NO: 40079 - DNA, 1079 bp, Zea mays
  Clone ID: MRT4577_136552C.1
cttataaacttgaagcctgtaaattggaatcactcaagttaaataagaacaggggtaactattcatagctcagatggttgtcatccaatacgtgcgctaaggcacagacaggtgaggttgcatattcaatccccaagacagtaaaccattgaggcatattaaaacacattttccatgaggtttcctaagtgatcctttaggtaaacagaaccatacctagctccatatgaaactatttcccgatttgaagtacacctaagttaaggttcatacattggagctctggcagtaaaacaatagtccttaccttgagacagcttagattagaatgaggtggatggtaatatggcatgagcaacataccacagttcatgcatggaggaaatcatttttactttctttcctagccatggtagttgtgttgctccttaccaaggcactacatggagcatcatatggttcatgatgtaaacatggttttagatctgtctatactcacactcaagaaccagccaaaatgtgatattccacaacctgagagaaatcaaaatgaaatcatgtacaacatagtacatatgatgatgtgcggtgatgcgggtgcatgtgtgttgtgtgtgtaggagaggagggcgcagcttgattcaatccatgtcaagtcagaggctgctgcgaggtttgcacatgcaagtagaatttagatggtcctgcttcgctctcgtgtggatttatcttgcaaatggtatgtggatccgttccagaggcaatgagccttgcagccagtttgcagtataaaaaacccaattatgtccactgttggttcgacgcagcgtgtgccgaggatttctactgccaagcataagtgaattgcagataaatggtctgttcgcaactggtgctctcgggcgactccatcactgagcaacccttcgccccggtggctgcggtgtcgcactggctgacacctgctcgcagttgcattacaagttttactgactatgtattttcaggtttattcaatttcagttgtaatgcttctgacagcagttgtatcagtcctcttgttcagcttccataataat

SEQ ID NO: 40080 - DNA, 551 bp, Zea mays
  Clone ID: MRT4577_136553C.1
ttaaaaaaaaaaaaaaaaaaaaaaaaaaacaaaaaaaaaaaaaaaaaaaaaaaaaaaaaaaaaaaaaaaaaaaaaaaaaaaataaatatataaaaaaaatttttactttggacttttaccacccttttaggtcccattttttggaaatttttccttctttgtttgggggcgcgttccgattttcctttttttggggcccctttttcccctttttttggggggttttttttttttttggccttgccttttacccccgtcttgaactggattttaccctgggggctccccccaccttttattttgtttttcgcggttgttttccccttttttcggcgggttggttttaattcgcgatttgggcccgaaccgttcggcctttcctaatttttgccccccctttttggcgctttttttcccctttttggtttctttttagcccgccgggtttggggtttccttcccgggggccccttcccttttgcttcgcctttaccccctttcttttcttttttttcccttgtttttttgcgcctttcccccggttttcccct

SEQ ID NO: 40081 - DNA, 1652 bp, Zea mays
  Clone ID: MRT4577_136554C.1
ttcaggtgtgtggagagacatgtgtattcctcctatgacgaattccttaggctccatgaaggtaagcctgtcttaatgggcttgattgttgaacctgacttagtacttttatccatgtcacggcattgaactagacagtcactcatgtccttaggatattaacggtatacatcaacaattcattctattttaattgcttgcaaaacttttttggcccttcaaatgagttccacgcatcaagaagtcaagattccaggaggcctaaaataggagaggagggcgcagcttgattcaatccatgtcaagtcagaggctgctgcgaggtttgcacatgcaagtagaatttagatggtcctgcttcgctttcatgtggatttatcttgcaaatggtatgtggatccgttccagaggcaatgagccttgcagccagtttgcagtataaaaaacccaattatgtccactgctggttcgacgcagcgtgtgccgaggatttctactgccaagcataagaaagtatttgaaatcaagaacttgcattcattcaatcataatgtgtttcctatcaagcataagtgtgtgtgttttgtttgatatctgctttaataggagattgttcttgtcaccccaaaaatgttcccattctactttcgggcaggtgaattgcagataaatggtctgttcgcaactggtgctctcgggcgactccatcactgagcaacccttcgccccggtggctgcggtgtcgcactggctgacacctgctcgcaattgcattacaagttttactgactatgtattttcaggtttattcaatttcagttgtaatgcttctgacagcagttgtatcagtcctcttgtttagcttccatgtatccctcgcatccttccttggatccacataagtgttaatgataattttgttgcatctcctctgctgatcagagctttcaaactcatgacagaataatgtactaaacttcagtttggtgtctatctcagtgtacctacactcagttggaaaacttcaaccacactgcaacaaggtttataaaaggtactgttactattgttaaaattagtcattttagctatccgcttctatttcaccgtgcttgcaggtttgctatcaggaaaaacaaatttatgggctcaaacaaagtgtgatagtgaaagtcattttgcttccagcttaagaaccaagccaagaaaacagatatcaactgtgacgccacactcaaaagcttgtttggtgggagggacaaggttgggatgctggagatctccaagcttttgagtcgtggcttcccgaaaatctccaagcttttgtggtccatggagccagggatggctctttggtaaaagacttcgttgtggatggcctcttttatggtccatgttaagtcccaagtcccactaggtggttaagcagaaaaatcttgtgatggcattaagactttcagactttgtttttgggtctgatgcatgtaaaaaggattcccagtgtttctgttgctcttgcgatcctgtgaggacacatatgagagaaatatttagtttgttgatggcaaatcttgtcttatgttcatgcctgtgcctatctgatcaagcgttatgatatgatcccatgcgtggtactgtgttctttagagatg

SEQ ID NO: 40082 - DNA, 176 bp, Zea mays
  unsure (1)..(176): unsure at all n locations
  Clone ID: MRT4577_136555C.1
tcggcaaatactttggcactggctgaacagcaccactgttaatagcgaaaaactatttagttgaagtttgtatgtcagactgtaaactcgaaagatcctatgcataccaaaggtgcttttgcttgaaagaacattntggtatggctggtgttcccaanntaaaaaaatttttaacc

SEQ ID NO: 40083 - DNA, 856 bp, Zea mays
  unsure (1)..(856): unsure at all n locations
  Clone ID: MRT4577_136556C.1
cccttcaaatctccagccatccccgccgccgcccgccgcccaccacctccaccgcccacgaaatcttcttccggaagacgcgcgaaccccgccggagacgagaggcatggacgccaagtcggtgacgccgggcgccgtggccctcatcctcgccaaccccacgccggcgtcgcccgacgacgtgccggagatcgtcgtgcaggtcctcgacctcaagcccatcggctcccgcttcactttcatggccagcgacggggaggcgaaggtcaaggcgatcctctccacccacttcgcgtcggaggtccactccggcaagctccagaacctcggcctcgtccgcatcctcaactacacatgcaacgacatcccacaaaagacggacaagatggtgatcatcaccaagtgcgaggtcgtgtcccaggcgcttgacgccgagatcaagagcgaggtcaagatagaagagccagcggctctcatgaagcccaaggaggaggctgcggtcctctccaagcccattggcgcggccccggctgcgattatgctgaagccgaggcacgacgtgaagtccgcgtcccagattgttagcgagcagcgcggaaatgctgctcccgctgctcgcttggccatgacgagacgggtgcatcctctgatctccctcaacccctaccagggcaactgggtcatcaaggtgcgggtcacaagcaagggcaacctcaggtcatacaggaatgcccgtggagaaggccatgtctttaacgtagagctcactgacgaggatggcacccagatccaggccaccatgttcaatgangcccgcaaagaaagtctatcccgtgtttgagcttgggaggtctac

SEQ ID NO: 40084 - DNA, 855 bp, Zea mays
  unsure (1)..(855): unsure at all n locations
  Clone ID: MRT4577_136557C.1
caactccaaccatctccgccgccgccgccgaacaccacctccaccgcccacgaaatcttctccccgaagacgcgcgaaccccgccggagacgagaggcatggacgccaagtcggtgacgccgggcgccgtggctctcatcctcgccaaccccacgccggagtcgcccgacgacgtgccggagatcgtcgtgcaggtcctcgacctcaagcccatcggctcccgcttcacgtgagtgctctccctcctcctgtcgacccccgccggatctatctgtcccttctgctcgtaggcatagcgcaacacgcaatcgctcgtttgtcttcagaatctgttagatctctccattttgccccgtaccggcatagatctgttcttctttgcgccaatttccccctgtatgacctgtgaccctgatggactgttcttgctgccttgcagtttcatggccagcgacggggaggcgaaggtcaaggcgatcctctccacccacttcgcgtcggaggtccactccggcaagctccagaacctcggcctcgtccgcatcctcaactacacgtgcaacgacatcccacaaaagacggacaagatggtgatcatcaccaagtgcgaggtcgtgtcccaggcgctcgacgccgagatcaagagcgaggtcaggatagaagagccagcggctctcatgaagcccaaggaggaggctgcggtcctctccagcccattggcggngccccggctgcgattatgctgaagccgaggcatgacgtgaaagtcgcgtccaaaattggttagcgagcagcgcggaaatgctgctcccgctgctcgcttggccatgacgagacgggtgcatcctctgatct

SEQ ID NO: 40085 - DNA, 472 bp, Zea mays
  Clone ID: MRT4577_136558C.1
gggttgtggttttttttaaaggggggggggacaacttacaacaatggggtccaacttacaagttacaacaaatagtttacccattatacagcattaaagcccctcaaaccggggggttacaactaaaaaaaaaaaacaggggttacctaaaagggcggggaccactgaaatttttaatgcaaaaattcgggggcaaaaaatataaccaaaacaggggggggacatggaacaagtgaaaatttttttttggggaagggggctcaacatttcaaaagaaaaacataacccccttaactttttctttaaaagcggggggggggctaaccaaaaaactccccgtttttttaatgctgggggccccacctgggggggggccacgggccccactgggcattgagccactttgaaaggtattttgctccatttaaaaccaacctccaaagggccccaaaaaaccatattatgccggggg

SEQ ID NO: 40086 - DNA, 361 bp, Zea mays
  Clone ID: MRT4577_136559C.1
acggatctatccatgctttgaacctaatgtcaatttcacttaattgtcttgtgctattggggcagagatttatagaagctggggtatgaccaaatacaatattcattcgaattgcacacatatcgctgcgtctagttcagactctacgcaaggcgtacctggctcaaacagaagctttcaggatccatgcattgacatctgtcactctatgctcgatagttgatagactatcagcttactcttaaacatgttcgatggcatttaccattatttaccagtcgctcgacgatctctcgtacattgcctagagctactcacccaacgattccacaatcatctaggtctctactcttgcatgctg

SEQ ID NO: 40087 - DNA, 257 bp, Zea mays
  Clone ID: MRT4577_13655C.1
acacgatggagacggtgagaccgctgcccatgcactggagctgggtgaagtcacgcaggttcctatgcacgtgtccagcgtgttgtaggtggagcccatgcacgtgtccagcgtgttgccctgcaggacaaacatggcctcgttgccaattggcaacccatgaagttggccatgcagacagtgacctaggtcgggtcaaagcagcagggcctggatgtgctcgtgcatgggtacgcacgctgcgctgagccaccaat

SEQ ID NO: 40088 - DNA, 250 bp, Zea mays
  unsure (1)..(250): unsure at all n locations
  Clone ID: MRT4577_136560C.1
gcgacccgnggcggaagcgcgggggggattttaacangtcgcttcacaccagccgggccatgcagagctccgaaagctcgcggtgctgctctatgctagcggcagcagcttacacggctgcgccgtagcacagagcagctctggtcaacccgagatctacgaccccgaggctgagccgcggcgtcccggacggatagcttcggatgccgcgtcggccccaggtgaggggtggcaacacggggcggggccc

SEQ ID NO: 40089 - DNA, 514 bp, Zea mays
  Clone ID: MRT4577_136561C.1
ggccgcttttttttttttttttttctttcaatcccttttttttttttgttctatctgtttttcattctttttgtttttctgcaggggtctttgagacggggagaattccacttagccgaaagaacccccaaaggagggcacaaccacaggcccgttttttgttacaaaaagagcagaacgggggagaggggggaggaagtttgatagcggccgggaccacggctgcaggggacaaacccgggcgcccatgggagggccccccccccggaaggggggcggcaccaagccggacccggggccgccccccccccggcggcggaagggaagcaggagagggcagcggggaagaggggcaacaatggaaggcagcgctcgggacaacagggagaaaaacgggggggagggaagaaggaaaggggctgaaggcaaggggcacggggtggatggaaaaatccttgttaccaaaacgaccacggcggccaggacgaggcagggggtgctgtggctggggggg

SEQ ID NO: 40090 - DNA, 419 bp, Zea mays
  unsure (1)..(419): unsure at all n locations
  Clone ID: MRT4577_136562C.1
ttcgggtggtgctcaagagtcacacgtgcggccagaattacccttggcctgtgatacaactagcatggcctctcaaacctaatgagaattttatattgacgcttagacatatgttgtgggggggggggggggtgccattcangactcatgtgatgatgcatgcagcttttgccttgaggctttctgtgagtagtgacccttctgcattgactggcttcaaacatgagttccatttttaatgcattttttaatggtgcctgagaagttgacagtgcctaatgtgttgggggtctctgcgttgagggatttttatagtttgttttttttttgggcgttgtgacttgtttggttttggtgttttttttagtggttngttgttttttttttgtgttttttttttttttttttgtttttttggt

SEQ ID NO: 40091 - DNA, 261 bp, Zea mays
  Clone ID: MRT4577_136563C.1
cagacattaggtgcatgtactctcccgatattaccgttcgtttcatcacatgcctagctccctcgtactatgttgagatggacgctcatctaccgtgcgtgccatttctcgtaaggagactgtcaccgtcagattattctatagtgtaaagctggctgaaactatgtattattttcttttactatgttgtatggcttggcgcatgatgccttttgcaaaaacggttactgaaagtttgtaactgttcttttagcctttcct

SEQ ID NO: 40092 - DNA, 251 bp, Zea mays
  Clone ID: MRT4577_136564C.1
ctcccacgctgactgtgctgtccttatcattgactccaccactagccggttctgaggctgcaatctacaacgatggccagacacgtgagcatgctctccttgcgttcacacttgtagtgaatcatacggtttgctgctgcaacaagatggatgcaaccactcccaaatactccaaggcacgctatgacgagatcgagaaggaagtgttatcttacctcaagaaaggtgggtacctgccttgacgcacgttc

SEQ ID NO: 40093 - DNA, 305 bp, Zea mays
  Clone ID: MRT4577_136565C.1
ctcacctcatgggaatataacattttgaacaaccttaatacaaaatgaaatgcagttttgtcacgacaacattgaattgataagcaataccacccatctaggacctagcaagcttaaccagacgaaccttaaactggcgggtactaacagggttccaaggaatttcatatttgtgccaagcactggggacaaagacttagggctcttcctctttttcctcctcctcctcgaactcctaatcctcgggaggggcgtcctggtactggtgatactcggccaccagggcgttaatgttactctctgcc

SEQ ID NO: 40094 - DNA, 150 bp, Zea mays
  Clone ID: MRT4577_136566C.1
tagtaacaggcgcggtgtgctgggaatttgccacttagcgcctcgaccgggcaggagccagagaccagcgatgtcttgggtatgtgaaaacccgcttgttgcaccctacagagtccaacaggcgctcacaggggaggagttacgttagtg

SEQ ID NO: 40095 - DNA, 383 bp, Zea mays
  Clone ID: MRT4577_136567C.1
tactgagccgccggcctgtacaagctatgtagagcacgtctctttggcgaacaaagtacgcatgtaagtgggtgtacctctgcaccgccaccacgaactgtgccgacgacatgggcgcttcatcctctagatcatctctcgaatggcaattgaaggtctgctccaccgcctaccatgccactgaggagaacacgtgcttatgagcacaggaaacaacgctgagtgcgaactccgaaataatactatgacggatgacagaagctggcagtggcaagccgtgttattgcacggactatgtaatactaggactgataatataatgctgaatagagtgtgaatcaaaagccgacatgaaaggttgtgctgatgctgtgcctatcctg

SEQ ID NO: 40096 - DNA, 1218 bp, Zea mays
  Clone ID: MRT4577_136568C.1
cattgggtacctcgaggccggccggggttcccgtcctcctcgttgttttgttccgtttccccccttgcctcgctcgtcgcgtacagctggacgcctcctttctcgctgcgggctgttgccttgcctccgtcccctcccctcgtcgcctccgactccacctcccctccccggtctctgagagagggagcccggacccggagaccgccagcaagcgcgaggcagaggaggagcatggcggccccgccgtcgaggtcgcggggcgactacgaccacctgattaagctcctgctcatcggcgacagcggagttggaaagagttgcttgctgctgcggttctctgatgacacattcacgacaagttttatcaccaccatcggcattgatttcaaggttaggacggtcgagctcgatggaaagcgtgtaaaattacaaatttgggacactgctggtcaagaacgtttccgaacaattaccactgcttactacagaggagctatgggcattctgcttgtatacgatgtcacagacgaatcgtccttcgataacattaggaactggattcgcaacatagagcagcacgcatctgataatgtcaacaagatcttggtgggcaacaaggtcgatatggatgcgaagcgggtggtctccacagctcaaggtcagaagctcgcagatgaatacgggatcaagtttttcgagacgagtgcgaaaacgaaccgaaatgtggagcaggtattcttcgccatggcaagggacgtgaagcaaaggctcaccgagaccgttgccgctgcggctgagcccccgaccattcagattagcaggccagaccccgaccaggctgacgcagcctcctcgcggcggtggtcgtcgtcctgctgtaacacctgatctggcgactgccgtggcgaaatcaagcagcgtgaatcttgatgcgcgtgactggactgctaggttactgattgtcgcctgtgttcactttcattccggtgccgtgccaagccaagccgggatgtataaatttcgctcgtctagtattcacctcaatcaatgtgttaactcccgctgctttgcacgtcacgtcgtttgtttgttgagagcaaaacgtgtgtggggcagataaaaaaaaaagccctggtgggtttgctcctgtcacgtactaaacagaacgtgtctgatgattgtgtcgccggtggaacttggaagcgtgcttgtctccct

SEQ ID NO: 40097 - DNA, 1202 bp, Zea mays
  Clone ID: MRT4577_136569C.1
acctcgaggccggccgggaagtacatccttcgttcagaggagcaggaacgtcgacgacaggggacgcctcctcccttcctttcttctcgctgttgctgttggctgttggcctgttgcctgcctcgcctccgtcccctcgtcgcctccacctccacctcctcggtcacagagagagagagagagagagagagagagagagagagggggagggagagagggaacccggagaccgccaccaagtgtgaggcagaggaggagcatggcggcgccgccgtcgaggtcccggggcgactacgaccacctgattaagctcctgctcatcggcgacagcggagttggaaagagttgcttgctgctgcgcttctctgatgacacattcacaacaagcttcatcaccaccattggcattgatttcaaggttaggacggttgagcttgatggaaagcgtgtaaagttacaaatttgggacactgctggtcaagaacgtttccgaacaattactactgcctactacagaggagccatgggcattctgcttgtatacgatgtcacggacgagtcatccttcaacaacattagaaactggatccgcaacatagagcagcacgcgtctgacaacgtgaacaagattctggtgggcaacaaggtcgacatggacgcgaagcgggtggtgtccatggctcaagtttagaagcatgcagacgagtacgggatcaaatgtggagagaggtattcttcgccatggcaagggacgtgaagcaaaggctcaccgagaccgttgccgctgcggctgagcccccgaccattcagattagcaggccagaccccgaccaggctgacgcagcctcctcgcggcggtggtcgtcgtcctgctgtaacacctgatctggcgactgccgtggcgaaatcgtgcaggtcgcgtgactggactgctaggttactgattgtcgcctgtgttcactttcactccggtgccgtgccaagccaagccaagccaagccgggatgtataaatttcgcttgtctagtatttacctcaatccacgtgttaactcctactgcttcgcacgtcgttttcctactgcttcgcacgtcgtttgtttgttgagagcaaaatgtgtgtgggcagattaaaaaaaacctggtgggtttgctcctgtcacgtactaaacaaaacgtgtttaaagcgtgcttgtctcattt

SEQ ID NO: 40098 - DNA, 313 bp, Zea mays
  Clone ID: MRT4577_13656C.1
ccggccgggatacctttctcggccttttggctaagatcaagtgtagtatctgttcttatcagtttaatatctgatatgtggactatgtgtccacttcgatattaaatttattttttgtgggggagggctcgctacagcggcttgccactggagccctcgagcgtcgctcggccgttgcactataggctgagccaggcgcgccccaaccaatgcaatttgagctttaagtatgtttttagacgcggcaaaatgtaaggttgcatatgtatatatatatgacaaaaagaaaaaaaaaaaaaaaaaacccgcggcc

SEQ ID NO: 40099 - DNA, 1293 bp, Zea mays
  Clone ID: MRT4577_136570C.1
ggttattccgttttcccccttccctctctcgtcgcgtacagctggacgcctcctcccctccttttcttctcgctgttgctgttggctcctttcttctcgctgttgctgttggctgttggcctgttgcctgcctcgcctccgtccccctcgtcgcctccacctcctcggtcacagagagagagatagagagagagagggagggagagagggaacccggagaccgccaccaagcgtgaggcagaggaggagcatggcggcgccgccgtcgaggtcccggggcgactacgaccacctgattaagctcctgctcatcggcgacagcggagttggaaagagttgcttgctgctgcgcttctctgatgacacattcacaacaagcttcatcaccaccattggcattgatttcaaggttaggacggttgagcttgatggaaagcgtgtaaagttacaaatttgggacacggctggtcaagaacgtttccgaacaattactactgcctactacagaggagccatgggcattctgcttgtatacgatgtcacggacgagtcatccttcaacaacattagaaactggatccgcaacatagagcagcacgcgtctgacaacgtgaacaagatcctggtgggcaacaaggtcgacatggacgcgaagcgggtggtgtccatggctcaaggccagaagcttgcagacgagtacgggatcaagtttttcgagacgagcgcgaaaacaaaccagaatgtggagcaggtcttcttcgccatggcgagggacgtgaagcgaaggctcaccgagaccgttgccgccgcggccgagcctccggctatccagatcagcaggccggactcgggccaggccggcgcagcctcgtcgacgaggtggtcatcgtcctgctgtagcacctgatctgccgccgtgtgtgtggctggctctggctgctataggttactgcttaccgcgtggtgtgtgtgtgtgttttacttcctccggtgccaagccaagatttaaatttcgctccaaagatttgccggagcaaacgtgtaggcagatagctaggctgctgtgctgggtttgcttgcttctgtcgtgtaaacaaaacccttgagagacggtagtgtctgattgtgtcggaacatgacatgcttgtacattattagtgcatcgtatatccagctgttgctcccatgtgcactgcgcagggcacaagtttgcgttgggttttttttgtatgttttatttatacagaaataattcgagagaatccaaaaaaaaaaaaaaaaaaaggggcggcc

SEQ ID NO: 40100 - DNA, 413 bp, Zea mays
  Clone ID: MRT4577_136571C.1
caactagcaacatacaaagctcaatagtttaccaacaatggcagacaaaagattctgagtccttatgctccttgggcttgctgcaagtgctcgtacagtgaccattctcccgcaatgctcgcaagctcctatagctctccttcttaccccgtacctatcaccaacagtgtctgcgatatgtgaaaacccaattcttcaaccctacaacatccaacaagcaattgcaacttgcatcttaaccttaataaccttggttcttcaacaataatcaagcctaatacaacaagtacctttagttcaattaatggcaccaaaccaccaggccccaccaactacaacacctgttcctagcaaaccttgctgcctactctaagaaccacaactttcttccattcaaccacttcggtcaattg

SEQ ID NO: 40101 - DNA, 289 bp, Zea mays
  unsure (1)..(289): unsure at all n locations
  Clone ID: MRT4577_136572C.1
nttttttttttttttttttttttttttggggagaaaacttagcttgtcatgggcatatgtccaaaacaaaccccaacagagcacaacatatttaattcaccacaaattatataagttggcctacacaacacatgatctcatcatgctagcaaatatgggagaacagagactcaacgacatgtaggagcgacggcccatgcctaggatcgatgccgcgtgtatcttctcccatgaacacaatgttattacccattcaagagatcaaaaacttgttctgatgagttgactc

SEQ ID NO: 40102 - DNA, 364 bp, Zea mays
  Clone ID: MRT4577_136573C.1
ggacaaaaaatgggaggaaaaccaagaagggggccaccaactggccactgggtggaaaaaaaaaagaaacgggagcacagctacccttattttgatttttgacaaaaagggaggggtaaacttccattcctagcaaggtggcagaggggacagtttacagctacttccagtttttgaaaaaaaaggggggggcaaaaatgatgggcttgccaacctgggactggttggattttgggaggcctgaatacaccagggctagtcattattaaaatctgcaccagggggtattttgtcccacaaatacattattactgaacagggacctaaaagggcaatgttaaactgttttgaagggctggccttg

SEQ ID NO: 40103 - DNA, 280 bp, Zea mays
  Clone ID: MRT4577_136574C.1
ctcttattcacggaggaatcattgactcagagtgtatatcatattaaaaccttactggaatgacatcacctccaatcacctgaccagcatgcaaaaagcttaccgtcgccaatttacttgacatcgcaagagataaacgctgtggaatagatgctgttgaatccgaacataacatgaccttgatccaaataaaacggtaatttgcagcatatgtggctgaacatgcaaatatctgcatattaacatcagatccatctgtatagtgggcgcctaataacca

SEQ ID NO: 40104 - DNA, 355 bp, Zea mays
  unsure (1)..(355): unsure at all n locations
  Clone ID: MRT4577_136575C.1
ccccctttttattaacccaaaggngaaaaaaccagggaggccccttttaaaacaaaaaagatcaanacacccccccccaaactggccaagggtctgggccttcaggctacaaagaaacacctcgaacaggaacccagctgtcggctatacacaacattcgacgcagaacacaaaccaaacaactaggacaaacagagctacaactacaaatctagtcaggggggccccagcccgacaaaggttgtgcaaccaaccacaaaagaaacaaaattgactattccatcgaaaaaacctaaatgaaccctcccgctaaaccaaggggtgggaggaaaatccagtacattcctttgaaaac

SEQ ID NO: 40105 - DNA, 243 bp, Zea mays
  unsure (1)..(243): unsure at all n locations
  Clone ID: MRT4577_136576C.1
gagcgcaccaccggccggaggaagaggacgacacgatgctgcgggttgcggggagaaggctctcgtcttcccncnnctggcncccccgcngnntagccagggtcccctnnccgncnctgnntccncgaccggacacgactcggctcncggacggagccatccncagttctccatcgactcccccttctttnnnnctnncaggggtttctcttctactgaaacagttntccaaggaaccaagat

SEQ ID NO: 40106 - DNA, 159 bp, Zea mays
  Clone ID: MRT4577_136577C.1
cttgccattgagctccttggttcacgtgcaatgtttctttgccctccgattttacaggacctcgcgttacattccgtgagaagaggtagatcctacttcagaccgcatgtagccaagaactagagaatgtaaagagcctatatatttgttaattaaaga

SEQ ID NO: 40107 - DNA, 605 bp, Zea mays
  Clone ID: MRT4577_136578C.1
tcggcttgcacttcgccatgttttttcctcttacagttgaaagttgaattgatgtatggttttactgtttaacttatacctgtacgtgtaagcttagttgttttgtgactgggaactggatactgtactaaaaccccatccattttcccactatgattccggactccggtgacctttgtggcacaggtgccactttactccggatagttccgaggctgttatgagcagtggcctcggagcccagttgaatatctgggttcggcacgagctacattttgaagaagctggagtgcccctgctgcaaggttcttttgtttgaagtgcaggtggtctggaagcaccgggtcttgtaacaatcttgtgctggtgggagatgcttgcaagctgtggtggttgaatgtttggcatgtgatgctgttttagggagcaataggttatagaaatcaagggctatagatttcagaactgatatatgttcactaatttgtatgcttaatactatattagtcatgtacattcagattctgataaacatttgactgtcgtgcgatgaagtaataaggtagactactgtagagctgcacggtgcactggacattttggat

SEQ ID NO: 40108 - DNA, 775 bp, Zea mays
  unsure (1)..(775): unsure at all n locations
  Clone ID: MRT4577_136579C.1
gggtacctcgaggccggccgggccgggatctcacaacaccactccaccgccgttcgaatattccaagcttgagattggaggaggggaggggaggggagccgagcgcagaaccctaattacctccatcgattgctaacagctcagatctcagaggcaggggaggtaaaatgccaagagcaaatgaaatgttcagggcagattctagaatgatggtggtttttggtgccttgacatcgaaaccagagcagctgacattcgaagaaaccctcagatttgtcaagaaagtgaagttacagctgctgttcggaaaccacccggatctgtgcgaagagctcgagaagttcaggccaccggtgcctacaaagcaggcagcaaacaacatctggccctgggtcattgtttgcgccgtcccgttggttgcggtcagcctgatcccggcgctcggaaacccagtggctgtggttcgttcagcaaactgtcggcgagaaaatggccgcctgattgaagaaaccactgcagtacatatgcgtgcagcggatgagcgtgcgggcctcctgtcatttgcgccatggcaactggcaatcgaatcagcattngtctttatatatngtgtgtatnatatgttagagtagcattctggaaggaaactcgtcttcttggtcatcaagtgccgctgagcaagaaatttatgccggtacatgctgtccgggcgcaaccgtgcaagtgcaagcccaccaaacaaaaaaaaaaaaaaaaaaaggcccctagggccctc

SEQ ID NO: 40109 - DNA, 147 bp, Zea mays
  Clone ID: MRT4577_13657C.1
gagggcgcgcccttttttttttttttttttattagcatagaagcagaggcgggttagaagaggtgtagatgacaaacgagcgatacatcagagaagagaggcactttagattgatagatagcttggacacagcagaaagatgccagg

SEQ ID NO: 40110 - DNA, 283 bp, Zea mays
  Clone ID: MRT4577_136580C.1
cgcactcttgctacacacgagactgctgttctcattgagctcatcttacgacatctgcgttatcgttaaacagatgtgtccggacattcaaactccgtaccttacaatttcttgcgctcggatcggctccttaagtccggaccttatcaccaaaaggaggaccggtgccccatttccaacctacagaatgtgttaaatcaccttgaacttacatgtatttcacttgcgccccaatgctagtacttatcctacacctgtcatgtcatttcacaaacattgacta

SEQ ID NO: 40111 - DNA, 969 bp, Zea mays
  Clone ID: MRT4577_136581C.1
ccggccggggaaggatgccggccgcaacgcttcgtcctccgcgtccgctttcgcctttcccctcctcctcctcctctcgacaccaccaacacaacaccactccaccgccgttcgaatattccaagcttgagattggaggaggaggggaggggagccgagcgcagaaccctaattacctccatcgattgctaacagctcagatctcagaggcaggggaggtaaaatgccaagagcaaatgagatgttcagggcagattctagaatgatggtggtttttggtgccttgacatcgaaaccagagcagctgacattcgaagaaaccctcagatttgtcaagaaagtgaaggcccgcgattacatgctatacctgtcattgttcgacattcttggcagaatggaactatcccagctcgatgcctaccgagagttacagctgctgtttggaaaccacccggatctgtgcgaagagctcgagaagttcaggccaccggtgcctacaaagcaggcagcaaacaacatctggccctgggtcattgtttgcgccgtcccgttggttgcggtcagcctgatcccggcgctcggaaacccagtgctgtggttcgttcagcaaactgtcggcgagaaaatggccgcctgattgaagaaaccactgcagtacatatgcgtgcagcggatgagcgtgcgggcctcctgtcatttgcgccatggcaactggcaatcgaatcagcattgtctttatatatgtgtgtatatatgttagagtagcattctggaaggatactcgtcttcttggtcatcaagtgccgctgagcaagaaatttatgccggtacatgctgtccgggcgcaaccgtgcaagtgcaagcccaccaaacacatatagcccgtttggacatttgagctgggttctaagtgctaaagatcaaaactacgcccaggaatgttattatgataaaaaagttgccccctcc

SEQ ID NO: 40112 - DNA, 211 bp, Zea mays
  Clone ID: MRT4577_136582C.1
aaccaaaaaagcgccgggatataaattattatgttcattacacccctaaccaaacactttagaatttataccataacagggaaggtcaaaacttaaccgccacaaattccaccaaagattttaaagaagtttatctttttaggaccacaactaccaattgctgtgcgtactagaggcatcccccgggaagtttaaacccggtctcgggggg

SEQ ID NO: 40113 - DNA, 587 bp, Zea mays
  Clone ID: MRT4577_136583C.1
gcgccgccgcggccggcggcggcggcgtcgcgcgcgtccagctcaagcggtgggtgttcgagctctccctcagcgtgctcatggagaccatcgcgcacaccaagacgtcccgcgccgaggccgacgccgactcggacatgtcgaccgaggcccacgagttcaagcagatcgtcgacgagatcgtgccgtacatcggcacggccaaccgctgggactacctgccggtgctgcgctggttcgacgtgttcggcgtgaggaaaaagctcctcgacgccgtgggcagaagggacgcgttcctggggcggctcatcgacgcagagcgccggaggatggacggcgacggcgacggcgagaagaagagcatgatcgccgtgctgctctctttgcagaagtcggagccggagctgtacacggaaaccatgatcatggcgctgtgcggggacttgtttggagctgggacggagaccacatcggtcacgacagaatgggccatgtcgcttctcctttagtatctcctaaccttattctctaaattattattatttatttaaataaaaatcgctctttatattcttttactcttcaaa

SEQ ID NO: 40114 - DNA, 197 bp, Zea mays
  Clone ID: MRT4577_136584C.1
tcgtccacgcgttcgtacacacgtacgctcactctttctaaaaaaaattatataaatatagaggatgcatattaaataggacgcgtatacaaatatatatctaaatatgataataactaagtagtatcttatttatacacataagattactggagtgtattatgacttgaaatttgaagttaatactgtttcattga

SEQ ID NO: 40115 - DNA, 631 bp, Zea mays
  unsure (1)..(631): unsure at all n locations
  Clone ID: MRT4577_136585C.1
cgccgncgaacgcccgcgtacgccgccccccgccgattcgcgccgncacgccgcgcggggggggggggancgaccgcgacacgccgccccccgccggnnagccncgncgnctaccatncgccgncncatacaggacggngaccnggccgnccccggctcctctgcggaggacgncgcccacgctctccgcaaccaccgnccngagctcggcncaggagggaagccttttttttttccgnccgccgngactatcctctgactttgatgacgacgatgatgacgactccgcctcccgcggtcaccaaggtgcccacgccaccctctcctccaccacctctctctcggacgaatccgcccacccgccgcctccaccctatttcgatgccaccaagaccatgcttcgctcccagtatgtctcgcagacgggcaaacagaacccaggcactaaccagcagctggaaatcgagatgaccgctgagaaggctcgccgcctcatcacatctgattgtggaggcggaggtggcgatgccaagccagaggctccggtcttcgaaggagtggtcaatggggacaaggggccgggttttgctgatcctggcgggatggatcagggggtagatcagcttgtggt

SEQ ID NO: 40116 - DNA, 1446 bp, Zea mays
  unsure (1)..(1446): unsure at all n locations
  Clone ID: MRT4577_136586C.1
ccacgcgtccgcggacgcgtgtttggtactgtggggactgaccaagggtgcagtcagtggactatattcgattcttttctcctcacaaccaatatttcacttacaacttgcagctttctctctacttctgtctgagcccttctgtcaactttcactggttaaaaattattcaatgggagaaagttgctcatctgctcagcaatctggcacaagccaaagtgctgagttgatgccagattcagacaagacagtgcatctaagagaggaactttcagacttaatcgagttcccaacatctgaacttctcaaaactgnatctgacagctcgagatagggttgatgtattcattgcctggtcattgttgctgtcccacctgcaaacactaccagcatcttccagtatcaagggagatgtgcttcaatacatacaagaaaaggtcagtccgtgcatattggattgcattttccagcatatcccagtaaaggccgctgcgccgagtgggaagaaaaaggacaccgagctagcgcctgaagcagaagctgctgccaaagcttcgaagaatgccatagctacttgttctttgcttccgtacttggagtctctttggcccatcgggactttgcagatggcctcacttgcaggctcactgtacgggatgatgattaggctgctgccttcttttgtgcgcacatggtttactaccttgagagaccgttcattgtcatactcaatcgagtccttcaccaaacaatggtgcagccctcctcttcttctagatgagttttctcaggttaaggagtccgtatacggcgatgagaatttctcggttagcgtcaacaggtcggctttcgagatcgttgctacatacaaaaaggaggagacaggaatcgaccttgtcatacgcctcccgagctgttaccctctgcgccacgttgatgtcgaatgcacgagaagtttgggtatcagtgaagtcaagtgcagaaaatggctgctttccctcacgtcattcgtccgcagccagaatggcgcgatagcagaggcgatccgcacgtggaagagcaatttcgacaaggagtttgagggcgtggaggagtgcccaatctgttacagcattctccacaccagcaaccacaacctgccgcggctggcgtgcaagacgtgcaagcacaagttccacggcgcctgcctctacaagtggttctccacgtccaacaaatcgacttgcccgctgtgccagactccgttctagtcctagctctagacacatgcttgtttgttggcaccacaccgttcgatccttcgatgtaaatggcgtgtgtacgcagcgcagtgttcagcgttttggctgttaaatactctcgaaacaggacgggacctgcagagactgagttcagaggtcttataatctacagttaccgtgaattcaatagattatttttgcggcc

SEQ ID NO: 40117 - DNA, 808 bp, Zea mays
  unsure (1)..(808): unsure at all n locations
  Clone ID: MRT4577_136587C.1
ccggccgggagttatcttatacctagaaaaaaactgcgagaggtttcgtccaaaaaaaaacctatgaggaggcagatgcaatgtttcagcggcgccggcgcatggggcggagggtctgtctgaacggcgaccggtgtcctccttcctgtccagacgcgaatcggatcatggcgcccccctgccagtctgccacctcaggcacactcagctgtcggtgtggtggcatgcctcggtatgctgacttcggctcttctcaacccttctgcctcgaggcctgcatctcctcgactcgtcgccgatctcctgtgatcctgtctcgacctcggccctccactgaatattcaagacatggaggattacccagccatagtatagcatattttggaagaagcaggactcgtgaagattaatttcaaaacatctcttcaaaaggaaaagcactgcaaagtagcatagggtcatgtgatgcaacgattctgctacactgaactgcagagcaattttgtttggagaactgtttcacttatctgggggagtttgatgatggcaagataagctgcagaaagcttctagatgggcataatcgatatcgctagtgcaggaagccacaaccagataccatggcttttgcaagatttatcatctgccgacatggtcttcttctttttaccattttccatgttttcccagtctatagttttttaatagatcttcagagttatgaaagtgtaaacagatatatgcatagaacccgccataccaccatgctccggacccgcatagaaccggncataccaggctcggatcg

SEQ ID NO: 40118 - DNA, 319 bp, Zea mays
  Clone ID: MRT4577_136588C.1
cgaatccggccgcccacgctacggacaaagtccagtcttacatcaagagcaccatgcggaaaccattcaggattggtagaatgatattgtgaagtctgctctttatgacataggatccgaccgatgtgatcgaactaaaacttactatatcatgcaaggttggttggacatcgagtctgggaagtgatgactcattcgccctgtctttcagatctctctatataaatatttaagaggctcacaaaaggcaaaggatataacgtgatgtcactctgtgtggtgtcacgcaggtgccccgaaagacccacataggtctgcc

SEQ ID NO: 40119 - DNA, 193 bp, Zea mays
  Clone ID: MRT4577_136589C.1
ctccctgacgtgagtcgtattaatacagccagcctccaataggagcgagccagtcaaactgatcgcactctctccgccgccatcagagcgaacatgctgactgaccccgtctccaaggcaatccgcagccgacgtaccaccaccaccgggggagcgagatggatatcaagatgatcctcgtcgccgtcctcgt

SEQ ID NO: 40120 - DNA, 391 bp, Zea mays
  unsure (1)..(391): unsure at all n locations
  Clone ID: MRT4577_13658C.1
gctggtgcagcataccgcagcgcctttccattccatttggcctttgctccgcctccgctcacctccggaatcgatgtcctcgtctgacctctcctgctcggtttggttggcgtacggcgacgtggaaagctcacccgtatagtagtagaataatgcaatgcgatggaatatgaccctcctgtcatctcccccaatcacatctcgactgaattattcaatactcaatgctgctgagcagctgctgtggtgccgccgtcgccttctcctaatccagctgctccaacctagctcacgtcgcttccaatagacgccaccagccatcgcccgtcctcgcctcagtagcagtgcgagtccccggccgcttacttcatgcctncatggatcccgtcgc

SEQ ID NO: 40121 - DNA, 659 bp, Zea mays
  Clone ID: MRT4577_136590C.1
cggcacggctagaaacataatatgtatatcaccaagtaaactgaatatgtttcatgcatcataataggggttccatacacccagtaagctaccaagtaccaacacacatagctacaaacataacatggttcatacttggcatcaaccacagtatcataataagggtttcatacatagtactccgtcctaaaccccatacatcgcctcaaacagcaattacatggttccactcaatatgtcatcattaggaggttgagctctcttcttggatgtaatctttttaacccccaccctttgtggtgcttgtgaggaccgaggaggatgcttcaacatcgccaagtggtgtgcttggtccttcttcagacgggaaccatctttgaatgttctttcactgctttcttgacctcttctttgttcctatgattgtcaacatttcggctttgcttcttccctattccaccttctaggcatcccttgatcctattttttctttgcctacctgcagttctaccaagaggtgcactcacctcattgcctaatgcaatctttggccaaaaagacttatcaccacgtaattctattctcccatcataagctttcttgaacttttcaactgaatagtactcatctacaaaatactccaactccacaaccctata

SEQ ID NO: 40122 - DNA, 267 bp, Zea mays
  Clone ID: MRT4577_136591C.1
cccacgcgtccgattttgcaggatagaatagtaggtgggacgggcactgatggggcacctattattacagggattgcaaagttcatggatatattaactattggacctgtcacaaccccattatcttgcaacactaaattacagtgagtttttgaagattaggaatttgggacctcatatcttgaatttctttggttctgatgagattcatggtttacctatgtagattcaggaaaatagtatttctatgtctatttcttaatacat

SEQ ID NO: 40123 - DNA, 615 bp, Zea mays
  Clone ID: MRT4577_136592C.1
cgcgaatcgaggccaaggggtacagcctgctgaaggagctcggcgcgacggcggtggaggaggtgttcacagcggggggaggagcgcagaacgaccagctcgcggcgctgagcgagcacatcgacccggccgtcccttcccctctcgactactaccccctgccgaagaaaggcgagaggttcccggtctccgacccagacatgatgccaaggctgcagccgcgccctgggagcgacgcggagtacctgcacggcatactggaatcgatcgcgcgaatcgaggccaaggggcccagcagactgaggcggcctatggagctgcactgctagcactcaagggcgccaagagcttggctggctagtgtgtcttgttgtgcttggtagggctggacgaaaaactcgtagctcgttaactcgctcgactcgactcaatagtggctcggctcgactcgactcgtttataatttgtaacgagttgagcttgtatttcaactcgttacgataacgagccagctcgagctggctcgcgagctgactcgcgagccaaacgagttgaagtaattagtcaaactacaataatcttggatccaaaatagttaatcttgtactctactat

SEQ ID NO: 40124 - DNA, 1170 bp, Zea mays
  Clone ID: MRT4577_136593C.1
cattgggtacctcgaggccggcccggcggcgtcttccactacacagcgcgctcaaggtgggctacgacccggagctcggcgcctacccgggctggctgacctcgcagccctactcgcgcatgctgccggccgccgtcagaccacctggggctcccgtcgctgcgctcagagacgacgtgcgctcacagtacggattttctgaggactgcgttgtgtgcgctggaaccactgacagcatcgcggcgtttcttgctgcccgcagaagtgaaccaggaacagctgtgacgtcgctggggtcaactctggcgatcaagctggtgagcagagtccacgtggccgacgcgaggttcggcgtctacagcctccgcctggacgacgtgtggctcgtcggcggggcgtccaacaccgggggagccgtgctccggcagctcttcacggacgaccagctcgcggcgctgagcgagcacatcgacccggccgtcccttcccctctcgactactaccccctgccgaagaaaggcgagaggttcccggtctccgacccagacatgatgccaaggctgcagccgcgccctgggagcgacgcggagtatctgcacggcatactggaatcgatcgcgcgaatcgaggccaaggggtacagcctgctgaaggagctcggcgcgacggcggtggaggaggtgttcacagcggggggaggagcgcagaacgacaggtggacggccatccgggagagggtgctcggcgtggcgtccggaaggcccagcagactgaggcggcctatggagctgcactgctagcactcaagggcgccaagagcttggctggctagtgtgtcttgttgtgcttggtagggctggacgaaaaactcgtagctcgttaactcgctcgactcgactcaatagtggctcggctcgactcgactcgtttataatttgtaacgagttgagcttgtatttcaactcgttacgataacgagccagctcgagctggctcgcgagctgactcgcgagccaaacgagttgaagtaattagtcaaactacaataatcttggatccaaaatagttaatcttgtactctactatagttaatcttgttctttgttgagtgtgaaatcttaagttgcaaactctattctgtttttactaaatagatctcctcttttcttt

SEQ ID NO: 40125 - DNA, 305 bp, Zea mays
  Clone ID: MRT4577_136594C.1
actaatgatttacagcacgtggacgttacaacttttaccgcattgtttttaaacctgctcagtgaatcaaacattaaaaaagtagtggcgggacacatagagatcctgtccaagatgctaggatcacttgacaagccactcttgacagattatatcatgaagatcaattcttctggaacatccagatgaggaagaaggagctggcatattgtaaggtttgctggattgataagggaattgatggagatgcagatttcggggggctgtacattgttgggagaccagatgtgcccaaacaccagctt

SEQ ID NO: 40126 - DNA, 200 bp, Zea mays
  unsure (1)..(200): unsure at all n locations
  Clone ID: MRT4577_136595C.1
ttcccggncgaccacgcgtccgcagctttaatagctgatgtaggangnnactttgcttgtcgtgggggtggcgaccttatcggggggggaggatgtgatgatttcgttagcgctnnactttacctcaccggcgcttgtggcggctgctaacttaacagtggtgaatgatgttgtgtatttcactgaccattgaggtgacc

SEQ ID NO: 40127 - DNA, 328 bp, Zea mays
  Clone ID: MRT4577_136596C.1
cccagttattcagggaacggcccgccattttttaagggaactgaagggggatagccactctataaaacgtcaaagcccaaccatctcctccatgtctggaacacgatgcaagccttctaacctaccacaaagttattaaccataggggcagggtgcaactgaaaaagccccttttcagtccaccccccctggaacagggcaaactggtggacaccgaaagggaaccaaccgaaagggacctctcaagactaaaaagttttcgtccccgacgccctaaaaaagcgctaaaattcgaaacccaccaatcgggtttatttcccaagggtga

SEQ ID NO: 40128 - DNA, 306 bp, Zea mays
  Clone ID: MRT4577_136597C.1
gggttgcggaaatgggcaccaacagactaggcaaatacaggccgcggtttaccaccagcacaacccgccaataataatgtatcattgttcaaaaaagggctggattatcgatcgcatcattaaggggctaagaaaaaatgccatgcgcaggacatcggttgcttgtacgggctgatacagggagtaagaggagtacggttaacagtaaaacgagcgttcggcggttcccgtaggcccaaagagtgaatgccaacaaggccgccaattctggaacaaaaaggctgcactgcagctaggcggccggtt

SEQ ID NO: 40129 - DNA, 592 bp, Zea mays
  Clone ID: MRT4577_136599C.1
ggtaccgcggcccctctctcgagtttttttttttttttttttttttttttttttttttttttttttttttttttttttttggattagaaacagccctgacagtctatgcgtggataaaaaaaacagttttccatgggggtacaaagatgcctttgaggcccagaaaaaaaaaaaaaaagcaccaacagatttagaggctcaccagttcaaacctttgaaacacttggtagggggggacggactccaggaccaaacgagggccaaaagaggggaacaaacagacctcaaaaaaaaaacccgggacggacagaaacttcaaaaaaatacacagggctcctttgagttccgaggcaaaaaaaacttggggacccaggttcgttagcatcacagccgggatattttggggggctttttgggtttccttaaaacagggggaagggatcaaccctccatggccacatgggcgctcccctgggaggcttcacctccagttagttttggggtccacaaggctaagtggtccttcaaaagctgcatcataatggggctatccttggaaactcccctcccagaatttatctcaggaggagcc

SEQ ID NO: 40130 - DNA, 370 bp, Zea mays
  Clone ID: MRT4577_13659C.1
agtgcacaacaacctactgggctatttagattaacatggttggaaagccagaactggctggatagccaatattggtcacgtcatgaaacaccagaggagcattacgtggaaaatacccgtgagactgcccagacactcctcagtttaggggaatcccagatgagggcaccccacatgattcagcagggcgttttaacagcttagtgaggcccaggtagctagcggctttctacaaaactgctcctgagggatgagacattcagatcagagccctaggaagcctgcgactcttgcttctaggcctggaacactagccttctctgatcggccttttcacatggccagaatgttatccgatatttcccctccc

SEQ ID NO: 40131 - DNA, 801 bp, Zea mays
  unsure (1)..(801): unsure at all n locations
  Clone ID: MRT4577_1365C.1
ggcccgctcgaggcncggccgggggccgggaaataaaannnnnaaaaaaaaaaaaaaaaaaaaaaaaaaaaaaaaaaaaaaaaaaaaaaaaaaaattcgtctgctcatggggccgccacacccaacctccgctccaacgctgcgcctgtgaggcgacggttggagcgcttgtcctcttccactacgggggccaaagggccaaaccacccggatccggggtcatcttccactccgggggccagatcagttcgagtttgggcaacacgagatcttccgaggacgcggtcctcgtccacggatctggccgggagaaatcattttcttcattgtttccgtcggggaggccggatcacgacctgaaattgggcttttctcctagttgttcatttgttccagatttgcatgtttttggttattttttgattttgttccttttattcctttggaaatgctgatctggctggtttcgccggggtgcacgtgtgcatcaaagctaccggcggcagttcgttttggttgagagggcgtgctttccaagtgaataatatgaactatagcgcctcttactaattttcctcttagctatttgggttagtctctgaccatagctcagtctagggaatatttttttggtcctagattctgaaatcctgatgaactatgtgccactgaatttaggataaattagagttcagatcagacaccacattatgatttagagttcatgctgtttgggttgatttggatttgtaaaagagttgcctctagttgtttggctccaggttagcagagagctgatgc

SEQ ID NO: 40132 - DNA, 337 bp, Zea mays
  Clone ID: MRT4577_136600C.1
tgggtttttttgtttttttttttttttttgggcaaaaaagcgactacaaagaactacattaccgctgttcccgttccatcgttacacacacatagcagtgatgtacaagtaaaacacacactttctctctctaaactgcgaaaacaagtgtggcgcttacaataaggtgctttgctttgaatcaacaaaaaaaaccttgcacactttctctctttctctcaccatattgctgttctattggcttccacctgaattaaccgagaggaggctctggactaccgattccatggtgggcctctttttcctatcttcctccaagcacgaaacggccagcctg

SEQ ID NO: 40133 - DNA, 1559 bp, Zea mays
  Clone ID: MRT4577_136601C.1
cattgggtacctcgaggccggccgggccgtcgtcagcccctcacgttgtcctgcccaccgccagcccctcctctgccccccgccggccgcccacctccagccccacctctacccgccgccctcctctggccgcctcccctcctctggccgccgcccaggcacccaccgccagccgtcgaggcctgcaccgccctctaatcaccgcccaggcgtccacctctgactgccgcccacctccagccgtcgaggcttctggtggaaactcgtttgctaagatggaagagggcaatgactactatgttgtcaggaaaggtgatgtggtggcagtttacaaaactctaagtgattgccagggtcagatttgctcttcggtatctggtcctgctgcaagtgcctacaagggtcactcttggagcagaggaaaggaggaatacctgtcttcacggggactaagtgatgctacatacgtaatcaatgcagccgaactcagggaagatatacttggcccccttgtgccctgtagtttccaggacatacttggttctagttcaaatcaactggctccaaatcatataggcttccataatgttatagcatctcagactggagcacaatatgttgatctgaaccatgaagccagatctagttcatccagacatatctcaccagcaaatttcaatcataccggaactgttgatgcacaacctatctcaaaacaatacatggtgggtattcttcattttgatggtgcttcaaaagggaacccaggtaaagcaggtgctggagctgtgcttatgactgaagatggaagagtgatatctcggcttcgtgagggtcttggtgtcgctactaataatgttgctgagtatcgaggcctgatcttaggactgaaatatgcgattcggcatggattcaagagaattaaagtacatggggactctcaacttgtctgcaatcaggtgaatggtgtttggcaaacgaagcagccgaatatgatggagctgtgcactgaagcgagaaagctaaaagagaacttccattcctttgagatcatccatgttcgacgggagtggaatgctgaggcggatcgtcaggcgaacatcggtatcacgcttgcaagtggcgccgtgtttgaggagcgtggtgacatctgatacatagctagcaacgtatgtagttaactaactagcttgacctttgacttgcacctttgtcgagcttctatgctgctctgcagcagccatcaggagctgaggtgatggcctgccgtctagtaggcactatatccaattactttacactagttggacctatttcaccatcaagctgctacggaagcctgatttctgctatggggcctcagtttgatgtgaaactgtgctttggaagcttgatgttgctcgataagttgatctatgaatggagaattttaatttgtcagctagcctttagatcgctatttagattttggatttgaacactctttgaaccagcattcttaggctatcttcaacaccttactcataatcatactcatattcaaactttattctgtgaat

SEQ ID NO: 40134 - DNA, 388 bp, Zea mays
  Clone ID: MRT4577_136602C.1
caaaaacgccgaaagaaaagggcccccaattttataaaaactttaaaaaaaaaaaaatgggcacttgatttttgcacagctgttttatttttcccaaaactttttggagggggaaaaaaattttaaccaaaatggtcctgaaaggggaatttttgatatgccgttttcctgcccaaatgcttaccggaaacaaaaagggggcaacctctcaaggcaaatttttttgaaaaacgccctcaaagaaagggaaaaggttccccttcaaggcaaccggcatgaggcaaagggttatttggcaaccgcagcttatagggccaagaggggaaagatcccagttttcaaccccccccaaaaaatgtcctagtatttttgggggcacaagggggtt

SEQ ID NO: 40135 - DNA, 889 bp, Zea mays
  Clone ID: MRT4577_136603C.1
ggaccctcgaggccggccgggccgggacctcgccggcgccgccatcctcgattctccaaactcgactggtcgacgtgtttccgttcccttctagcttttgtgaaccgttaagcttggcaatccttttgtgctgttttttttcattgattgcgccatattagtggttttgtgttgattttttcgttgatctagacaaaaatcgtgtgtggtttgcaagatcagcttcttgtttggaccttgaactggatccggttcaggcaatcggcaatcatactgccatcttgcgagattgaatccgagcgagcttaaactcacctggatctgacaccctcggtgattttctgggccctttcggctggcacaacttttctactactttccaaaagaaacaaatgttcgtccttttgggttgtgtttcgttgatgttcgagcacagcaaacgcactctgtcccaaaacctcgccatgttttgtggcaatttcttcgtttgcgagagggatgtacccagagatctcgtccgcgagggaggcttgctctctgatctcgtggaggattttttggaaacatttgtttttgagccttgtcttatagaatttgtttctgattttgcgtaaagtttaatatgattcttccttgttggctgatatccgagatggttatgctcaaatgaagaacggttaaaattaaaataattccattagtaccggctataaatgctttaggttttaaatgctaaatggtactcctacgagtttagggtttgagattataatctgttctgactaaataatctaatttgttttgaactaatctgcccttttggagattattccatggaatgcgcttccccgatgcatttatcatcaatggctggagatgaaatatacat

SEQ ID NO: 40136 - DNA, 278 bp, Zea mays
  Clone ID: MRT4577_136604C.1
cttatccaacatccatgctccccacatgcccaacttcatcatcacttattatcatggtccgacttcccaatatgttctttatccgtaccttgatctatgcgacttcatcgattggtcttctgtccgagccccgtctagcgtccgtccaacacatcacccgaccctgattcgaacttcgtccccaaaatgagtcaaattctctgagtcgatgtgcaagtttttatccgttcaatgcttttaagatcggtcgaatggcttagaatgtgttcttcaaaatt

SEQ ID NO: 40137 - DNA, 614 bp, Zea mays
  Clone ID: MRT4577_136605C.1
gaaacgaatgtcacatctttactatataacaagagttatgtacaaaatagctaaataattacatcatacgaagacaacgatcccttacaaccatagttgagtgggagacgacggtctagacctctcacgaactcatcgcgacatccttcatgctccttaccttgtggtacttgtccttgacctggggccaaacacgagctacgcgggcgagcaaccccccaagatgccctgtggccactggccacggtgaggcgaagaggtggtcggcacggtcatcagacgctggaacaacaccgcgcgacgagctggtgcagagcaaatgtgtgactgaggagaggactcaggtttgaaggcacgaccctcatgaactttgagtggaactcgaggacagggaaaactctgctgaactcagctttaaggcggacgaggtaagaagacagacatcagcaatgtcgaccggacactatgagcaaagacccgaagacactagcaacaaggcatggttcaggaaggatgaacgactcgaccaggtttactatggacgtgtgaacatggttaatgaaccaccggtcgagcggggtaaggagtaaggatcacatgaaactggggttcac

SEQ ID NO: 40138 - DNA, 215 bp, Zea mays
  unsure (1)..(215): unsure at all n locations
  Clone ID: MRT4577_136606C.1
aaaacaaacaacctctagggcctcagggcgcttttctgcactaaaagaactgcatnnaacagcaatattaattgttaactgagaaccaaagccttagatataggtatgaaagtgtaaacattgttaaaaacaagaaaaaacacggttgccatgaacgtagctatatagcaagtgcaccaggatacaagctgcactcaacggtaggccttggcaac

SEQ ID NO: 40139 - DNA, 243 bp, Zea mays
  Clone ID: MRT4577_136607C.1
tagccgccctagccctcagcgctttccgtttttacatatagtagcactctctcgctcgatccgctacatcggtcgcgcgcctagctctacaaagtttgaagctttgtagctctacatctacagagttcattagcatgaggcttcgcatttccatgtggcttacttggatagagcggcacgctcgtagtcgtcgtcgacgtcgtaatcatgatggagcttaccagcatctgacagtcacagctc

SEQ ID NO: 40140 - DNA, 357 bp, Zea mays
  Clone ID: MRT4577_136608C.1
cagatgacgatgaggaggctccttcggtgcgtgtccacgggggcgtgtagcgtggtgcggggcgtcgtggcagattcgatgccggcgttgccggtggccactagtggggcacgtgccggtggaggtcgacgcggagggggggatacacaacggttagtcgtccctgtcgatctgctctgctacgtcgcgtcgcgcatgagtacgggtacgtgtgtcaggggctgctccacatcccctgccttgtggcgcattttgccgcctcctctgcacgcttgtatggaccgtcgtcgtcgtcaaccccgacggtgggcttacgctcgcttgcttctccgcattcttctgatactattatgcctt

SEQ ID NO: 40141 - DNA, 166 bp, Zea mays
  Clone ID: MRT4577_136609C.1
gtgcgatttcgatctcgcagccaccttttttttgttctgttgtgtatctagtagttggaggagatatgccgtttggacttgcattggacacgaacctaaggccttaacagattagaacctgggaaggtgaatggaatggccaggtggaaaaattaagtattggggg

SEQ ID NO: 40142 - DNA, 565 bp, Zea mays
  Clone ID: MRT4577_13660C.1
gttcttcagtctcaatgcaaatgcaccataccaaacttctccttcagacgctgcaccagtcaagaaggagcccgagagccaggcatggcttggattaggaccgaatgccgtcaagtccaacctgaacctgagctagcacacaacgacacagccaaataagacggcacagcaaacctcaccaaagcctttgcaggacgatctgaaaatatgctttgccactagagtaccgaaaccatgctttgccactagagtaccgaaaccataaatatcctctcgttatcgtgttttagtgttctgtttaggccatggtcctacgccctcttgtcacatagttctggatgtaaagataagtagccagccatgaccgagagaagttttttttggggggtgttaaaaaacggcccgcgccccctggccatgctaaggaaaatgatagaagtgcaaagagaagtatatgtcttttttatttttctgaaagccagatcgtttggctctagccttgatgtatgcagaacaagtgattgtaatggattctgagtatccttgtcgtccccccccccccccc

SEQ ID NO: 40143 - DNA, 293 bp, Zea mays
  Clone ID: MRT4577_136610C.1
atatataatgacaacttttttttaaaaataaagggattaataatttttttatgttcaagcattattataaagatgctgttaacaaatctacagtagataaaaaaagcaacgtgttttaaacacctaatttacatcaaatggctaaatataaatagcttgataattctaatttgtgctaaaaatacccatttttataaatacacataccttgatccggcttcatatataactggtgctgatgaaacaaaccacctgggacctattgcataggcatgtttccaggatttaaccca

SEQ ID NO: 40144 - DNA, 1393 bp, Zea mays
  Clone ID: MRT4577_136611C.1
gccggccgggtcgggacatagccagtcgccagcttggccgggccggacagaacgccgccggccgcccgccggacccaaccctgtgcgtctcgctccgttggttatctgagagacggagccaccagccacggaggcactactagtgtcgtaacgacgccacgacggtgtgtctgatctcgcatcgcgccgaggccctccggaatcccaatcctctcctctcccgcaagcaccccgggtctgctgcagcgcctcgtctctgtggtctggcatcagagtccccgggagaatggttgctctgtcggcaggagcgctggctccgctcgcaggtctgtctccgctgccgtcgtgcagcgcggctccgttgtactgccgcaggagtccgccacttctcaaggtcgccatcgccaagacgcggccaactgttcaccaatctgctcctgcaagcttccgaaaatgtgcagctatgtcagaacatggacgtcaggaactccggaccaatgagtaccagctggatgatgatgatgagccgttttggctggcagtggtcagagaccttgctgtgggtttcaagggattggtagctttcttagctgagcagccgaggcaactgaagcacctggagtggccgggctttctacacacgctgaagacggccacacttactcttgtattggtagctatgtttattgttgcattatcaactattgatgctgccctctgctacatgctggcctggctacttcgaaaatctgcctagaatcatgctggaatatccatgtattgcttgaatatgatttagccggacaggatagtagcaggcactgcagctggaactcaagctcttgttatcgtcgaggtcagcatcagactggaggtggcaggaaggtggatcttgcacggtttgccattttatttttgggaggattgagaaaatcaaaacagctgccctacaaatagtgctgatgtcatgtgatgcagatgctcatagtggcatttcaaagggttaattagatctgtgccattataactttgctattttggaggcacaccgttacatgttgaggtccaatttaacagagaaagagcacatcatggataggatccgataactgtgtgtagtgatttgtaacttctcttttatgttaagcagacttgcttgtaacttgttggtccgtcagctaggatatggagtatttttaagacatgcggtctactttgtaggcttaacaagtcttccactctgatttctcattagtattggattggtgagttcttatctagattgtctgctgttgagctacaaaatgcaacttacatgcttttgtaattatgggaggctgcaaaattggattttatacatcagaagaaggatgcaaattttgcaaacatggtt

SEQ ID NO: 40145 - DNA, 660 bp, Zea mays
  Clone ID: MRT4577_136612C.1
gcacctcgggtctgctgcagcgcctcgtctctgtggtctggcatcagagtccccgggagaagagaatggttgctctgtcggcaggagcgctggctccgctcgcaggttgcaaccgctcaagcttaacttcacccccttgatgtatcgtctttcttggttgcctcgttcgttactcttccccgaattcctttcgttctcaggtctgtctccgctgccgtcgtgcagcgcggctccgttgtactgccgcaggagtccgccacttctcaaggtcgccatcgctaagacgcggccagctgttcaccaatctgctcctgcaagcttccgaaaatgtgcagctatgtcagaacatggacgtcaggaactccggaccaatgagtaccagctggatgatgatgatgagccgttttggctggcagtggtcagagaccttgctgtggattggtagctttcttagctgagcagccgaggcaactgaagcacctggagtggccgggctttctacacacgctgaagacggccacacttactcttgtattggtagctatgtttattgttgcattatcaactattgatgctgccctctgctacatgctgggcctgctacttcgaaaatctgcctagaaaatgctggaatatccatgtattgcttgaatatgattt

SEQ ID NO: 40146 - DNA, 259 bp, Zea mays
  Clone ID: MRT4577_136613C.1
aggaaatactgctaaaagatgaagggatgaaggccatatacatacactccttcaggtgctttgttggatgcgcgcaacattttcgtccaagagtacatacacctgcgaggtctggcacaaagttaaacatctggccatgtactccttcagccatgaaattttcctcaaagtttttgcaagagtttcaggggcctatttctttgttccgagggtgtacatatcaaagaagttgtccatagcgttacaatcctctcaaatt

SEQ ID NO: 40147 - DNA, 256 bp, Zea mays
  Clone ID: MRT4577_136614C.1
cagtgtaaaaatattagacaccaccctacgctgtgatagtgacttcaatgcatcagagctggggcagcatacatgatactcaacgaactttatgtgcgctagttatattatactaacacactactttacatcatgtgctctatcaatttgtaagatgatcaccaattaaatttatttactaatgcttacctgtcgctataattatattaattatctaaaatatttgtattctatgaatttgtattcaattgttttt

SEQ ID NO: 40148 - DNA, 376 bp, Zea mays
  Clone ID: MRT4577_136615C.1
gtcatgcgatgccaaacactgacctgtcatcaaaatttaactttttgtcgtatcacaggggtgaaacgggatgggaattggctgctgatcactcgatgtctaccggctatctatctgctgatgacgctgatgaaacgctgcaggagctttcactccagcacgtacctctctgtgaaaggagctcaagttattattcttgcagacacaggccgctccaggggcatttgactcgacaggtttggcgactacgacgacaactctcatgccactgtctggaccgaatggcgtatattgctctaccatgccaattctgatacagacctgctactcccagaacatcgtcaggtgatcctggctcctagactcctggacattc

SEQ ID NO: 40149 - DNA, 917 bp, Zea mays
  unsure (1)..(917): unsure at all n locations
  Clone ID: MRT4577_136616C.1
aattcggcacgaggggcaagcgtcagaccagtgacgaagcaaatctaccatgcgacgacatgcgatgcgagcatgacaaataccctttacctcgtccttgccgccgcggccggggcgtcccggtcccggatcgtggtgcttgccgtcgctggtgagtccatgagacgtgtgtcactgtcatccggccgttcagcgcagagcccatccggccatcccgttcgtacctaaccggcaccttcttctgcggatcaatccggcaaagccagcgcgcgcgatgcgccggcggtgggacagctgcttctcgggcggcgacgtccgcgtgggcgggcgcgtcccccccgaggagccggagccggaggtcttctccttcgccgagcccctcccgtcgtggcccacaggcgggggattcgcgcgggggaggatacgtatcggcggaggggagctggagctcgccgcggccaccgcgttccagaagatctgcaccctgtcgtcggggggggcgtgggcggcggcggcagcgccaccttttaccggccggtcggcgtcccagaggggttctcgctcctgggttactactgccagcctaactgccgcccgctccacggccacgtcctcgttgccagagcgggggagcgcccgtccggcgcctcacctcagccgccgccgccaccgctctgcaggccgctggactatacgctcatctgggaattccaagccagtggcgataccggctacggctacggtcgaagcgacgcctacttctggatccccgtgccgccggagaggtatcgggcgcttgggtgtctcgtgaccacggaaccacggagaccaccgctcgaggatgtggtatgcgttcgcgaggacctgacngacgagtgctagccgcacggctcgctgctctgcctagagcagccgcg

SEQ ID NO: 40150 - DNA, 468 bp, Zea mays
  unsure (1)..(468): unsure at all n locations
  Clone ID: MRT4577_136617C.1
acttntttttttttttttttttttttttttcttttttttttttttttttttttttttttttttttttttttttttttaaaaaaaaatggccataatggccccgggtctttcataaaaaaaacaaaaggggggggggggagaccctggggggggaccacgcaaggggcgtacttaagaacaggggggggggttactaggggacccgggccgggacccaagctgggggaaaccggggcaaaaggggttcccggggggaaatggttacccgctcacaatcccacaaaaaaaacgagcgggaagcaaaaggggaaaagccgggggggccaaaggggggggcaaacccacattatggggggggggcccacggcccgttttccagggggaaaaccgggggggccaggggattaaaggaatgggccaacccggggggggggggggttggggaatggggggcttttccgcttcctg

SEQ ID NO: 40151 - DNA, 2197 bp, Zea mays
  Clone ID: MRT4577_136618C.1
cattatcatgatcactaaatatccttctctctgcgcggcggcgccgatcggggggctgcgtcctgggagtcatgaacggtgtacccggcgttcagcgcagagcccatccggccatcccgttcgtacctaaccggcaccttcttctgcggatcaatccggcaaagccagcgcgcgcgatgcgccggcggtggtgacagcctgctttctccgggcggcggacgttccgcgtgggcggggcgcgttccccccgaggagccggagactggcgatgcatctcctcctctccttcggttggatttgggatcgtgcatctgcggtcgtgttgtgattgttgtgactgcccatcaatccacccccaccaccaactcgcgaaatgtgtggccgctagattgtttaatcgatccggcgccgcattctgccaggcgggggattcgcgcgggggaggatacgcatcggcggaggggagctggagctcgccgcggccaccgcgttccagaggatctgcaccctgtcgtcgcggcgggcgtcagaccagtgacgaagcaaatctaccatgcgatgcgagcatgacaaataaataccctttacctcgtccggcggcggcagcgccaccttttaccggccggtcggcgtcccagaggggttctcgctcctgggttactactgccagcctaactgccgcccgctggactatacgctcatctgggagttccaagccagtggcaatgccggctacggctacggtcgaagcgacgcctacttctggatccccgtgccgccggagaggtatcgggcgctcgggtgtctcgtgaccacggaaccacggagaccaccgctcgaggaggtggtatgcgttcgcgaggacctgacggacgagtgcgagccgcacggctcgctgctctgcctagagcagccgcggccgtcttcgttcttcaccgtgcggggcgttcgtccggtgcgccgagggatacgggagaaaggagtgtgcgtgggcaccttctgctgcgccgctgacgggctccccccgcgcgagcacggcatggcgtgcctgggcaacgtcgagctcgacctgtcggcgatgccaacgctggagcaggcgcacgcggtgatccggcactacggccccacgctgttcttccaccccaaggaggtctacctgccgtcgtccgtctcttggttcttcaagaacggcgccgcgttgtacaggcgagggggagacaccgcgggcgaggagatcgacggcgaggggtccaacctccctggtggcggttgcaacgacggggagttctggatcgacgttcccagcggcgagcggggccgcgccgtgtgccgcggcagcatcgacagcgcggagctctacgcgcacgtgaagccggccatgggcggcacgtgcaccgacgtggccatgtgggtgttctgcccgttcaacggcccggcgaggctcaagctgggcccgatcagcctcccgctgggcaagaccgggcggcacgtcggggactgggagcacttcacgttccgcgtcagcaacctcaccggtgagctcatgggcgtgtactactcgcagcacagcggcgggcactgggtggacgcctccgcattggagtacatcgacggcaaccggcctgtggtgtactcgtccaggaacgggcacgcgagctacgcgtaccctggcgtgtacctgcagggctcggcggcgctcggggtcggcatccgcaacgacgccgctcggagcagcctattcgtggactccagcgccaggtaccgcatcgttgcggcggggtatctgggcgagggcgccgtcgtcgagccgcagtggctgcagttcatgcgggagtggggtccgacggtggtgtacaagtggaggaagcggatggagtgggtgatcggccgcctacctccctggctcaggtgcagagcggagagcatgctgaacaagatgcccaacgagctgtccagggaagaagggccgaccgggcccaaggagaagaacaactgggagggagacgagagatggtaagactggtacgtaggaacagtgctcaacgatgtgattttataacatgtgtggcttaaattaaggggcgtgctatatttaggtgtttgaaaaacagcttcttcgcggaccatacactagtacaatttggctctaaaaaaaaaaaaaaaaaaaaaaataaaaaaaatatttttatttaaatta

SEQ ID NO: 40152 - DNA, 465 bp, Zea mays
  unsure (1)..(465): unsure at all n locations
  Clone ID: MRT4577_136619C.1
ggggggggggggggggggggacgagcgggcggtgcccccgggaccccccgaaggggggggggggccccaaccgggggaacgggccgaacaacgggacccgggggaccccccccaggacgccgggccgcacgccgatccaggggctgggggacccgggaggggggggggggcccctgaaccggccccaggggcaacggccgggggatcaaccccaaccggcccaagaaacccaggcccctcgggaactaccggggggggggcggcccaaggggcttccagggctttgggaatatagggggggggattaaatatggccatgcctgcaaaggatctggggggccaaaaaaagttgggggtggggggggggttttcgatgaacccgggcctggggtaaatatcgtggttcttcccnaaaaaaaaaaaaaaaggggggcggtcgcgatccaaaactagccggccccgggg

SEQ ID NO: 40153 - DNA, 216 bp, Zea mays
  unsure (1)..(216): unsure at all n locations
  Clone ID: MRT4577_13661C.1
acggtgacacttgtcacattacataacctaaattcacattaggaccttgctaacaaatataggggtcggaataaaaaaaccgtagccactgcaanaccaaaactcacaaacaaaacacaagcttaacttccaatacaagattccataatacatgtaatagccctatcatttacactatgtaagcatacacatacaatatatttgtgcacaacattc

SEQ ID NO: 40154 - DNA, 765 bp, Zea mays
  unsure (1)..(765): unsure at all n locations
  Clone ID: MRT4577_136620C.1
ccggccgggattcacccggctattgagcgcacaatggcttcacgagtggtgttctcaaggcgctctctggcgcctttggcgactatggcccttggtggcctggcactgactccggccactgttttcgctgaaggacctagcgacctcaagcgaaaacccatttacgatgacttcgagatcccagcttcaaagcccgcacccgtgacgccaccacccgctgccacgacgcccgtcgctgagcccgttgaagaggaggagaggcaatattcgcctacccctacggaccgattggctgtctatgtcggaagggggcgcctgtctctgtacaagtacgctgtcgctgccgagaacaagatcaacgagaccatggattcggctttcaacctcgagcagtcctttaccagcaccatcgcttcgctggctccctctcgcgaaagcggcgagcagctcatgcccggcgctatctacgtcttggttgctgccatggccggtagcgtcatcacccgcaatcgcagcatcatcctccgtgcctcgctccctctcgccatgggtatcggtgctggctggaccgttatccccgtcaccatgcgcaacgtgtccgaccttacttggaagtatgagcaaagattccccgtcgttgcccagtctcacatccgactgcggnggagcattctcaacagcgccagctttgccaaggcgcattcacaagttggtgtcnaatatgtcgatgagaaggtaacagacgcgagagaagctgttgagggc

SEQ ID NO: 40155 - DNA, 503 bp, Zea mays
  Clone ID: MRT4577_136621C.1
ctcctcctcctcctccagcaccaccacatccacttctctgcttattaccttatgtccgactatgacgtggaagcccatactagccacgccgacgctcacgctcatcagccttcttctactggtcaacttggcaacggctgcctatcgtctaggagttacactagtgggcgcgttcgacgagaactcccccggagaggctgcgcctggctcgcaaccggaaaaaggctggtgcttgacccccaggcctataactcgccgccgatcggacccctgagagagtctaggtgaagatccatgacgattgagtcctagaggcacgacgcccaacggtaacaaacctcactgtttaatctagaaagctaacacctctgtagcttgcagtcggagatactcaacaaggttgaactacgccgtccgtgtctaccaccaactacgcacgtggacaagaacctcgatgagtgatgactgaggccatcctgctccatgaccccatgctccttaga

SEQ ID NO: 40156 - DNA, 292 bp, Zea mays
  Clone ID: MRT4577_136622C.1
ggtcacagacccacgggttcacattatgttccaaaaggtttcatccaggcacaaagcatttttaaaataacataaaacctttatcacataaccgttggtagcaaaaactaaagagatgaggaaaaggtggtaccacaaccattaaatgaccgtgaagagcctattcgatctcctggagagaggcgccggtggagtgaccaccagggggggcggaagggacctccacgggagaaaacttgcccttagccttgtttgtggcgcggccccgggccttggggtcgaggagcgcctt

SEQ ID NO: 40157 - DNA, 704 bp, Zea mays
  unsure (1)..(704): unsure at all n locations
  Clone ID: MRT4577_136623C.1
gccggccggtccgggaacgcctcctccagtccttcttcgtaagccttcaaaccgacgaatttgagcaactgcacccagagcgcgatccattgccggggaagaagcaacttgttgcgagcctcctctatggcgagctccgaccatggttccaccaccgcccccaaggacgtgccgggcagctacggcctgccgctggtgggcgccgtgcgcgaccgcctcgacttctactacttccaggggcaggacaagtacttcgagtcccgcgtggagcgctacggctccaccgtggtgcgcatgaacgtgccgccgggccccttcatggcgcgcgacccgcgggtggtggcggtcctggacgccaagagcttccccgtgctcttcgacatggacaaggtggagaagaaggacctgttcacgggcacctacatgccgtccacctccctcaccggcggctaccgcgtctgctcgtacctggacccctccgagcccacccacaccaaggtgaagcagctgctcttctccctcctgctctcccgcaaggacgacgcggtgttccaggtgaggaagggcgagatgctgttcggctaccagccgtgcgccaccaaggacccccgcgtgttcggcgacaccgccggggacttcgtgcccgaccgcttcctcggcgagtagggcngcaagctgctgcagtaacggtactggtcgcacgg

SEQ ID NO: 40158 - DNA, 289 bp, Zea mays
  Clone ID: MRT4577_136627C.1
ttttgtccgtcgtgatgcacagaacatttgtgggaggagatttttctgttgatgatcgcaggctacttttccagcacttgacatacgagcgaaaaatgccacagggacataattctttctgaacatataggataaaatgatctctttccacatcagacaatgcttctactctttcagaaaaaagtcattttcaagagaatctcgaacatcttgaccagatgtttaggcctgggctggaaggacattttttgaatgaatcagactgagcttgaggctgatactctaaaag

SEQ ID NO: 40159 - DNA, 383 bp, Zea mays
  unsure (1)..(383): unsure at all n locations
  Clone ID: MRT4577_136629C.1
agaaatataaaagaaaacaaacatgcttttaaccctttttgatccgcattgncttacgggggaccgggtctgatctctctagaaaatagaaaccctaaaacagataaggtcttaaacttagctatacataacagctaaatgcgaaaaacggctcaactacaaccagtactattacctacaaaaaaaacctcttagaactgttaatacatttgagacataccaacttcaagtattgtaaacttcataagctgcctacctaactgtacatagcaactgaacctccaaataataaacatccacgacacaaccatacacgacgtaaatgattaccataagaacttagaaaataaccttgataaaatatgaatacataccctgcgaag

SEQ ID NO: 40160 - DNA, 419 bp, Zea mays
  Clone ID: MRT4577_13662C.1
agggggaacatatgctgtttaagtgggagttacaaggacaaaagtgtattaaagctcaacagaactactgttactgtaacaaatgatgatggacacgagaagataaaaagtcacacaatctaaactgtacaaaccaagttatactaagttgcttgaacaaaaaataataaacaagaacatacaaaattagaatctaatcttgctaactgaaccctatcccttcatccttatcaaatcatactaacccggtaatgaggctattatcacactggatatcatatgtatcattgacggcggatacttaagaagaagcctcgctgatcgtcttgatagtgtagaaggctagaccttagcggaagcacttagcaagctaaggtgtgtatttttgggaagatcagtataggatgctggtgtgatac

SEQ ID NO: 40161 - DNA, 377 bp, Zea mays
  Clone ID: MRT4577_136630C.1
gtggcgtatgtttttcaaatcttttttttttcaatatattatttttcactttgattttaggggggaagaattttcccaagcacccaggctcaaccctaaattcaaccacaccaactcctttggaggggggggggtgcaactctcccccatccaaggcctttattcatcgggaaactccattgagggtcggtttttctgatcttagagtacgtgggggcgaatttcaaccttaacttggcaaacgggcaacctaacccccgtttgagaaagagtcttttaatctgtccaagctctgctgggggacaccccaaccaaacccatcggggcttgacctttttaaacttggtgggctcccgttgccccctccccgcgggcgt

SEQ ID NO: 40162 - DNA, 207 bp, Zea mays
  Clone ID: MRT4577_136631C.1
acacaaggcggaagctcagtttggaccaatggctccatcacattgccgtcgcgatatacatgacaggtgtgccatgttgtccctgatccatggcagaccatcagcgatatccgcagcttcaacgcggatgaccactgaatggcacatagcaagcatgcaagctcatctgacctgcgtctctttaccttattggaaagcatcactcac

SEQ ID NO: 40163 - DNA, 177 bp, Zea mays
  Clone ID: MRT4577_136632C.1
atgcaagtgatactattcaaatatcaagggttacacactccaatggcacgattgagcactgcctgtcaagtgttgctgtgcagtacgtctctgctcggcgacgttatagctattgttattccttggccaaacatggtgtggaagggcgggagtgccacaagatttactgctaacatt

SEQ ID NO: 40164 - DNA, 324 bp, Zea mays
  Clone ID: MRT4577_136633C.1
aatggaacgcagaaggagactgggagcagagggggcgacagaaaaccgaaaacacagaacaacgacaagcagaaaccacaccactctactgacgcccgacgagcagggtaacagtttccaagagccaagggaaaggagaggactcacatcaacagggcggacattggccatgccgacaatggcaagacgaccaccactggccaccagacctacaagctgggagggcctgacaagccacagatcgagaggcgggagaaagaggccgctgccaagaacaagcggccagtcaagaaggcccgggcgcccggcaagctcaaggctgag

SEQ ID NO: 40165 - DNA, 234 bp, Zea mays
  Clone ID: MRT4577_136634C.1
ccgtccgggagaatggagtggcttctcgatcatgctcttgatcccttttttctctctcgtctcaaacaattctcctcagaggagagggatttatataagtcggctctcacagtgatatctgaacgactttcttaggacgatatcgctggcctaatacaaattctccatgcacttgactttcataatttaggcgtaattacctttcgttgaacttatactatgtttaaaaagatt

SEQ ID NO: 40166 - DNA, 334 bp, Zea mays
  Clone ID: MRT4577_136635C.1
acgctctttattttttttttttttttttttttttggttttctgtttttttatgtccctgtggttatctgacagatacatgactcctaacatgagatgtccgttgctgatgcaaagaatataccgacccatgatagggtcttggatgtagttatgtgctatgataccgcatattatgcttaacgtatgcatgtgtgctatgattgcaaccccatcctaaggagaggcactacaccggctgcgaaacgaattcttccgagtttagtagctacgccttgcttggggatctggtattcaaaggggtttaactttgactcgattgggtcctacgcccta

SEQ ID NO: 40167 - DNA, 592 bp, Zea mays
  Clone ID: MRT4577_136637C.1
aagtcaataagtgtgcctcgtgcctctagtctttccctagattgcttgcctctgtgcttcgctcgtcagtcgctctatcactcctcgctatcgtcgtgaaacttcgccgtcctttgctcctaagatcgacacgcctcctcatatcgtactgcattcccgcacaaggcacctttgttacgcgagggaactgcctgcgtgcgctttccctactggaactgcatcacaggtgaattggcctcttgcgaacacttacagtagggatgaatgaaggcactccaagaatgtgaaagcattgaggagcctcatacagttgtgacagagatcacatgaaacgctggaacgttattatgtgcttgaaccaccgctcgaacaaacgatggcgggcgcgacgctaccactctcgtccgtgtgtctgctgcactggcttgacagcaggttgaaacgctgaaaacatgagaatcaaccatattgtgatgatgaatctagatgcagctgagcaccagagttgctggtcgccattgtgtggcatatgtccgcaagaccaatggttccaatacaacgaccatcaacgtctaaccttgatgacatacta

SEQ ID NO: 40168 - DNA, 376 bp, Zea mays
  Clone ID: MRT4577_136638C.1
aattgacccgttgctcgtcgccatggccaccatgttatctcattccggtgttgaaggaaaggaagcagttgatcatgatgacaaggtggatgatgtggttgatcggctgattgatgaacagattgcagccatagtctttgtgccagcttgtatagaatctacgcttaacgatgggataaatgcaggcaaaaccgtggaggcctttgctgatcatcagtctgctgaggatgacagtggattgaaagataaggatcagaaaatatctgatatatctgaggatgggcaagctgaacaggctactccacaacaggaattgtgtgctatgccgacaaatcctagtgaccatgaaattgttgagaggttagacataagtatt

SEQ ID NO: 40169 - DNA, 191 bp, Zea mays
  Clone ID: MRT4577_136639C.1
acacattacaatccgcgaatcacagacgcgcctatctcttgttgctgcactgtgcctgtcatcatattaatatcatatcgtacgtgagcccgaccgagagcaagggataggcatggctgctccgaaactcgcgaggatggcgctgcgcgagctcctgacggcaaccgtgaggcctcccccggccgcgtggc

SEQ ID NO: 40170 - DNA, 1600 bp, Zea mays
  Clone ID: MRT4577_13663C.1
gagcagaacctgtcgtgcaaccttgagtagctgtacaagggcatcaccaagaagttgaatatttctagggaaattgttgacgcaagtggctaaccagatggaccagtccctgtcagatttatgcttggttaatttctgctcgccggtgcaggcgacgccgattggcctcgagccggccggaggcccgcgctcacgagccagagaagaagggagaggagaggctaaccaccgcggcagctgcgaaaaaaaaaaaaaaaaacctgcgaccgcgaggagtggcgcacgacgaccagcgcggaggaggtggagccggcggcggggagatttgctcgcccggctggggttgcggtgggaggagggtaggaggcagagacaaccagcgatggcggcgtccgcgaggcccggggagagggcgaccagcttcgccgtcgcgtgcagcctcctcagccgcttcgtccgccagaacggcgccgcgcccgcccagctaggcctcgggatcaaaggcgaggtcgagcagcaaaggacgccggcgacaattaacttgctccccggagcggacggcgaggagaccgagaggaggaaggagaccatggagcttttcccgcagagcgccgggttcggtgtcaaggatgccgctgctgcccctagagagcaagaaaataaagagaagcctaaacagctcacaatcttctatggcgggaaggtgctggtgtttgacgatttccctgccgacaaggcaaaggacctgatgcagctggcgagcaagggcagccctgtggtacagaacgttgttttgcctcaaccctctgcacctgctgctgctgtcaccgacaaggccgtgccggtccccgtcatcagcttgcctgctgctcaggctgatgctaagaagcctactcgcacaaatgcctctgatatgccaattatgaggaaggcttctcttcaccgcttccttgagaagagaaaggaccgtctcaatgcaaatgcaccataccaaacttctccttcagacgctgcaccagtcaagaaggagcccgagagccaggcatggctcggattaggaccgaatgccgtcaagtccaacctgaacctgagctagcacacaacgacacagccaaataagacggcacagcaaacctcaccaaagcctttgcaggacgatctgaaaatatgctttgccactagagtaccgaaaccataaatatcctctcgttatcgtgttttagtgttctgtttaggccgtggtcctacgccctcttgtcacatagttctggatgtaaagataagtagccagccatgaccgagagaaggttttttttggggggtgttaacacacggccactctgaattggccatgctaaggaaaatgatagtagtgcaaagagaagtatatgtctttttctttttctgaaagcccagatcgtttggctctagccttgatgtatgcagaacaagtgattgtaatggattctgagtatcctcatcgtcttattgttgcttcaaaaaaaaaaaaaaaaaaaaaaaaaaaaaaaaaaaaaaaaaaaaaaaaaaaaaaaaaataaaaaaaaaaaaaaaataaaaaataaaaatataaaaataaaaa

SEQ ID NO: 40171 - DNA, 593 bp, Zea mays
  Clone ID: MRT4577_136640C.1
tttttctttcatctttcattttttcagtcaggaactcagtaggtcagagctcgacgtgacgtcgaggcctaggcctttcactcttaaaagtctgacgtctgacccaggtccatatagccatttaataactcagctaaatgcacgaagcccgcatggatttcttgcagtgaagaatgtacagtgtaggataaactacagactacttttctacgaagaaaaaaaaacagagaaacatcactcttggatgaaatcatatacagtgtgaggatatagcagtgtgctgtcctccttgtagtggaggaggtagtagcatttgatgcagaagtagcaggggttgttcagagcccacttatcgtcgaccgttaccttcgtcgcaagatagatctggcacaccgagcacttctgcaagcgcctctgcagctggaacgtctggagagggaattccgcttgaatctgtgtgtatctgggtggatcaacctcatgtcccttatcacgatcgtgtgcttgcagttccctggtggcagtagaggtacccagcaccgggccggaagtgcaggtcagagatacgagtcgtttgcttttttcagattaaa

SEQ ID NO: 40172 - DNA, 674 bp, Zea mays
  Clone ID: MRT4577_136641C.1
attcggctcgaggcaccaacggcttcgacgacaagatgaagctggggcagggcgggtacggcgtggtgtaccgcgccaccgtgcccggggacaacggccgcagcatggaggtggccgtcaagcagttctccggcgccaacaccaaggggcaggaggacttcctcgccgagctcggcatcatcaaccgcctccgccaccggaatctcgtcaagctcatcggctggtgccaccaggacggcgtgctgctgctggtgtacgactacatgccacacggcagcctgcccaggcaccttcaaggctggagggatgcgtccgccaggacgacgacgacgacgacgctggactggaagcagcgctacaacgtggtcgccggcgtggcgtcggcgctgaactacctgcaccacgagttcgagcagacggtgatccaccgcgacatcaagccgtccaacatcatgctggactcgtcgttccacgcgcggctgggcgacttcggcctggcgcgcgcgctcgagtccgacaagacctcgtacacggacaagctgggcgtgccgggcacgctggggtacatcgcgcccgagtgcttccacacggggcgggccacgcgcgagtcggacgtgttcggcttcggcgccgtggtcctggagaccgtctgcggccgcgggcccgacgctccg

SEQ ID NO: 40173 - DNA, 302 bp, Zea mays
  Clone ID: MRT4577_136642C.1
gagcggtgcgggactgactgctatcctagagcacgtacctgccggccatcgtcaggggatccattcaccattggccgagtcaacgagcataagtacaagatggcccgcacgcgcaacttagataagaacatcgacgtcatagagagccagctctagaccaacatgaaggccatgagcatccagagagcacgctcgtggcaagcattccatgacagacgtgtatcagctcttgcccaatgttaataagtgataggactgaacttaggaaccattgctagttaggccagggggcgacccttggg

SEQ ID NO: 40174 - DNA, 439 bp, Zea mays
  Clone ID: MRT4577_136643C.1
cgggagtcgtcatcgcttggcgtccgcctcagcccgccgccaggagagccggctcggtcggttcgtcgaagatcccggatctgctctgtcacgaggtctttcggcgggtgttgtctcgcgaggtgtagcgagccaaggtctggtcgcctgctgctcctgccaagaagggtgatgccaagacccaggccttgaaggttgccaaggctgtgaagtctgggtcagtaaagaagaccaagaagatccgcacgtccgtgacatttcaccgccccaagaccctgaagaaggctagggaccccaagtacccaagaatcagcactaccggaaggaacaagcttgatcagtaccaaattctcaagtatcccctcaccacagaatcggtgatgaagaagattgaagataacaacacatctggtctttattgtcgacctcaaggcagaca

SEQ ID NO: 40175 - DNA, 1308 bp, Zea mays
  Clone ID: MRT4577_136644C.1
tttttttttttttttttttgtctgaaaacgacaatcagatagatgctagattgctcgtttgcttgtcggtaatataacaaaacacctttcctattttccaccatttacaccagtccacaatttctgttcacgagagaaggttgcaaattaaccttttcttgatgaaaatattccggttccatcattaatatacatcagggtgtgcagagaagctgtgagtttgcagttacttttcaggttagacagccatgtctgtttcactgatttctgagtgcatcacaaagcttgggaataccatagtaatgtccttgaggtatggaagggtcatattcctcagcacgtatggattgtctttagcatattcagtccattcttcttgatctatcttcccatcaccttttgcgtcggcctgatcaaatgtcctgtcaacaatcatctcgacagcgtcgctcgcaatatccaaatctgattcgtccagcagagccagcaccatctcctttaactcatgccgttctataaagcctgtctgttttaagtcatacaacttaaatgcaaatgcaactttctgatcttctggtgcatctggatgaaacacaccaagagatcgaacaaactcaccaaattcaattacaccatttcgtttttgatcaaacaagtcaaataccctatcaacaaagagattttgctgcttcttgcccctaaagagagcaagttggaattcttccttgtgaattagattatctctgataactgaattacttattttccggaagaggtcatgcagtgcttcaacttcactcactgtaaaagatgtttcagcagcaagggctacagcttcccgtgtatccagcaagtgcggcgatcgactggcgtgctttgtttgcagacagcccatcgcagctcctccaaatggaatatcaagcaaagtgcaaactcggagaagagcaaaacacagtgtccggaatcttgtggtcgtattctgtaaacagtaatgcctaagttcggaagaaatcaagaaacgggagcacccagaacactactgggacgaatccatctcagctcaaagcgggcctcaggaaccttgtgaagggaagaaagggagggaagaacaagtcatagagatcgagcggcaccctggccgccgctggcgctattccttgtcttctctcttgtgtattgctccttcttgtcggttcgttcgaactcgtaggctaattgactttgagacagagcatattggggccggaacaaaaaagaattgagaaatgctagaaaaagaatccgtcccggccggcctcgaggtaccca

SEQ ID NO: 40176 - DNA, 1924 bp, Zea mays
  Clone ID: MRT4577_136645C.1
gtccaatatctttattatcgggactacgaaggagatcaattgactgcatctaaactgtgagatgtgtgcaagattgggtttgctgtatttggagttcctcatagaaaaatcatacctatgctctaaagttcctcatagatttggtgctcgcgatctgccatggatttgatttaagatttgggagatcggtcgtgttcgcgctgcgagattcgattttttatgcatgttttattcacgagattgcaagaacgggactgctaggcaagatgagtatacctgaaatttaggtctagaaattcactgctatcagtctcagaataggctaggttgaacttatacatgagatatccacgggaccaggtctcgagttttttttttttttttttgtctgaaaacgacaattagatagatgctagattgctcgtttgcttgtcggtaatataacagaacacctttcctatttccaccatttacaccagtccacaatttctgttcacgagagaaggttgcaaaccttttcttgatgaaaagattccggttccatcattaatatacatcagggtgtgcagagaagctgtgagtttgcagttacttttcaggttagacagccatgtctgtttcactgatttctgagtgcatcacaaagcttgggaataccatagtaatgtccttgaggtatggaagggtcatattcctcagcacgtatggattgtctttagcatattcagtccattcttcttgatctatcttcccatcaccttttgcgtcggcctgatcaaatgtcctgtcaacaatcatctcgacagcgtcgctcgcaatatccaaatctgattcgtccagcagagccagcaccatctcctttaactcatgccgttctataaagcctgtctgttttaagtcatacaacttaaatgcaaatgcaactttctgatcttctggtgcatctggatgaaacacaccaagagatcgaacaaactcaccaaattcaattacaccatttcgttttgatcaaacaagtcaaataccctatcaacaaagagattttgctgcttcttgcccctaaagagagcaagttggaattcttccttgtgaattagattatctctgataactgaattacttattttccggaagaggtcatgcagtgcttcaacttcactcactgtaactgcaacaataggtggagcttaacaagctagacccaaaacacaagttcacaacaatacatgcgtatcagagttagtcagagaagttgcaatgccacggtgttttcgctaggcttgttacccgccacactatgggaaaaaaataaggaggtaggcatgaatgtaagcaggaaaacatggcagtatatctgaaagcaaccgtttgattcctctttcttatggaagatggaattcaattctcacgccgcagtgttccagtagcaatactggtgccgtctggaagatccactttctcacaagatgtttcagcagcaagggctacagcttcccgtgtatccagcaagtgcggcgatcgactggcgtgctttgtttgcagacagcccatcgcagctcctccaaatggaatatcaagcaaagtgcaaactcggagaagagcaaaacacagtgtccggaatcttgtggtcgtattctgtaaacagtaatgcctaagttcggaagaaatcaagaaacgggaacacccagaacactactgggacgaatccatctcagctcaaagcgggcctcaggaaccttgtgaagggaagaaagggagggaagaacaagtcatagagatcgagcggcaccctggccgccgctggcgctattccttgtcttctctcttgtgtattgctccttcttgtcggttcgttcgaactcgtaggctaattgactttgagacagagcatattggggcccccggccgaacccgagggtacccc

SEQ ID NO: 40177 - DNA, 1565 bp, Zea mays
  Clone ID: MRT4577_136646C.1
gcacgaggagaaactagtctcgcgttttttttttttttttttaactagaatagcccaccatcccgttcaccggtaatcggagtgtcagcactcagcacaatgcagctacatgcacatgttattacattactgccaccggctggactacacagcgtcacactcacacctctttagaaaacaaaaggaacctgctttctatcaattccttctgcattaggttaaatctcgtgccgaattcggcacgaggccaggagagccggctcggtcggttcgtcgaagatcccggatctgctctgtcacgaggtctttcggcgggtgttgtctcgcgaggtgtagcgagccaaggtctggtcgcctgttcaggagagtttcgagaagctgaaatggctcctaaagtttcattagctgctcctgccaagaagggtgatgccaagacccaggccttgaaggttgccaaggctgtgaagtctgggtcagtaaagaagaccaagaagatccgcacgtccgtgacatttcaccgccccaagaccctgaagaaggctagggaccccaagtacccaagaatcagcactaccggaaggaacaagcttgatcagtaccaaattctcaagtatcccctcaccacagaatcggcgatgaagaagattgaagataacaacactctggtcttcattgtcgacctcaaggcagacaagaagaagatcaaggctgctgtcaagaagatgtatgacattcaggccaagaaggtcaacaccctgatcagacctgatggaaagaagaaggcttacgtgaagcttctcatgcatgggcgtcgcctatgagacgaccaagagtggcgtcggcgtcgcctccatgggcgtcatgcgcctcaagcttgtcatgaagtctatcgtcctcatcgtcatggccagagtcctcggcatctatgacctcatcatcgccgccatcatctctgtcgggatcaaccccaaggccaagcccaagccctacttcttagacggctacgcacacctctccttcgaactcgcatgcagccttgctgtcctcgctgtcggcatggccatcagcatcgtcagagacaccagagtcagtgactgcatctaaactgtgagatgtgtgcaagattgggtttgttgtatttggagttcctcatagaaaaatcatacatatgctctagagttcctcatagatttggtgcccgcgatctgccatggatttgatttaaggtgagctccctttacttattttggcgtcttgcttggttggctcggattcgtgttatcggtcgacctatcgtggagccgagagagagatttggttctttcttcgcagatttggggagatcggtcgtgttcgcgctgcgagattcaattttttatgcctgttttattcacgagattgcaagaacgggactgctaggcaagatgagtatacctgaaatttagttctagaaattcactgctatcagtctcaggaataggctgggttgaacttatacatgagatatccacatgtccaggtgcattgtctgaatttgattagaagtgtgtaatgctagatcttat

SEQ ID NO: 40178 - DNA, 110 bp, Zea mays
  Clone ID: MRT4577_136647C.1
cacacaaaccaaaagccagggcatcccggttttgggccgttgccgccgttggccgcttggcggttttagcccggtcctttcccgcggaagggcccctaaggcccgaaccc

SEQ ID NO: 40179 - DNA, 1344 bp, Zea mays
  Clone ID: MRT4577_136648C.1
atccacgacgacatgggcctcgagctctactacaactgagtcgtcgcccctctctccctatcgtcaggaccacatcaccctcaaggactacgagatccacgacggcatgggcctcgagctctactataactgagtcgttgcccctctctccctctcatcagctgctcctgccaagaagggtgatgccaagaccaggccttgaaggttgtcaaggttgtgaagtctgggccaggaaagaagaagaccaagaagattcgcacgtccgtgacatttcaccgccccaagaccctgaagaaggctagggaccccaagtacccaagaatcagcactaccggaagcaacaactttgatcagtaccaaattctcaagtatcccctcaacacagaatcaacgatgaagaagattgaagataacaacactctggtcttcattgtcgacctcaaggcagacaagaacatcaaggctgctgttaagaagatgtatgacatttaggccaagaaggtcaacaccctgatcaggcctgattgaaagaagaaggcttacgtgaagcttctcatgcatgggcttcgcctatgagacggccaagattggtgtcggcgtcgcctacatgggcgtcatgcgcctcaagcttgtcatgaagtccatcgtcctcatcgtcatggccagagtcctcggcatctatgacctcatcatcgccgccatcatctctgccgggatcaaccccaaggccaagcccaagccctacttcttagacggctacgcacacctctccttcaaactcgcatgcagccttgctggcctcgctgccggcatggccatcagcatcgtcagagacaccagagtcagcctgaaaatgaaaagccaattactgaaagcggagatgaaatctcttatgaaggagcaaaggcaaaaagtccaatatcattattatcgagactacgaaggagatcaattgactgcatctaaactgtgagatgtgtgcaagattgggtttgttgtatttggagttcctcatagaaaaatcatacatatgctctagagttcctcatagatttggtgcccatgatctgccatggatttgatttaagatttggggaaatcggtcgtgctcgcgctgcgagattcaattttttatgcctgttttattcacgagattgcaagaacgggactgctaggcaagatgagtatacctgaaatttaggtctagaaattcactgctatgagtctcaggaataggctgggttgaacttatacatgagatatccacatgtccaggtgcattgtctcaatttgattagaagtgtgtaatgttagttcttataaaaaagcaactcaaaaagggcc

SEQ ID NO: 40180 - DNA, 234 bp, Zea mays
  Clone ID: MRT4577_136649C.1
gtaaaccatgtgtctttacaactcattaccatcagattatgtctttgatatctttagtggtccaggagcggaatttctggttttcagctactttgacataacagttgggcttagtaatgactggacctcttcaattatttactctgggcttccatttaaaacagactccagtgttgatctccacaggttcatccgatcccttgcttttgaacgtgttgccttttgctttggcca

SEQ ID NO: 40181 - DNA, 615 bp, Zea mays
  Clone ID: MRT4577_13664C.1
ctcgaggccggccgggattgattctccttacttcggccgcaccacaccctatcgccaccaatacgaggaaagccgacgccatgccctccggttccggagcatgcgcaaagctccttcgggtgcattcccgccaacacatgctgccgccgcctggcgaacgttattgccattgacctgctacgacgcccagaaggcgtgccatctcccttgctaccatatctacatggctggcgtgatccaccttcacaataagggtaacaacccttactccaactccgtatgaacgaaactcgtgacgtgggtaccttcacttccacccctcctcctggattcggtggggtcccgtcctatgtatgaactcctccaggaccccgaacactcaagtctgtctggggacgatctctaagcacaaaggcgacgagacggctctacacaaaatgaagcgacagcacatacatggctctcctaagttgttcgctgcatgcaaaagatgctgctgcctccgtgttcagctgtctcttgaaaacatgaggaactacgctgacgccatccgggaccttgctcatacccagattgagaagattaaggtgttctatcagaagaggaatcacctga

SEQ ID NO: 40182 - DNA, 1090 bp, Zea mays
  Clone ID: MRT4577_136650C.1
ccggccgggccggcgcgcattcctcatttagcccacaaggcccacctatattatgggagtgagttactcgggtccattcttaaaaacctctgctcgggcctagggtttcctcccagtcgtcatcgcttggcgtccgcctcagcccgccgccaggagagccggctcggtcggttcgtcgaagatcccggatctgctctgtcacgaggtctttcggcgggtgttgtctcgcgaggtgtagcgagccaaggtctggtcgcctgttcaggagagtttcgagaagctgaaatggctcctaaagctgctcctgccaagaagggtgatgccaagacccaggccttgaaggttgccaaggctgtgaagtctgggtcagtaaagaagaccaagaagatccgcacgtccgtgacatttcaccgccccaagaccctgaagaaggctagggaccccaagtacccaagaatcagcactaccggaaggaacaagcttgatcagtaccaaattctcaagtatcccctcaccacagaatcggcgatgaagaagattgaagataacaacactctggtcttcattgtcgacctcaaggcagacaagaagaagatcaaggctgctgtcaagaagatgtatgacattcaggccaagaaggtcaacaccctgatcagacctgatggaaagaagaaggcttacgtgaagcttatgcctgactatgatgctcttgatgtggccaacaaaatcggcatcatctaaagttaccgcgtcaggcatctgctgtgctctatttccatgtgaaaccagagtttttgtagctatggctcagtggctccatgaccatgtcttatgcacacttacgaatttgatatcatccaagtcacaggttgtgctcatcaatacttggatactatcacttattcgtattgggttggtctttggctctcacatttctttgtattgggttggtgctttgatctcacctttcttcgcattgggttggtctttggaaattggaactcggcctgatagctgttggagtatagtgtatggatctgcgttcataatgcgagcagcagcgcatggaaattggttacggcaattgtac

SEQ ID NO: 40183 - DNA, 450 bp, Zea mays
  Clone ID: MRT4577_136651C.1
actcgctaggtagcctgcaggcactatgtcccatcggctctcgtcgcctcgcgccgccgacttgcctacttctgcagctagctccggcaacacagccgatagtgcgctgcactttgtgtattcataactacaccgtctagttatagattagaatgctagtatcttgatcttgttagttcttcgattgctcacaggaaacgaattatgagatcagggcgatgtgacgataattttgtcgatttccacactggagtttgatgatcgattgcattggcgcctcctaattgctcgtagtagagatattgaaaggatcaacattgaacaaatcttcttatctctaatcgtagatgaaatataaccattagttacataaattgtgcattaaatttgcatgttgagaattgagatttatctagagatgatttttcatacagtacaaaaaagcacata

SEQ ID NO: 40184 - DNA, 1635 bp, Zea mays
  Clone ID: MRT4577_136652C.1
gggagtgagtcactcgggtccattcttaaaaacctctgctcgggcctagggtttcctcgcgcagtcgtcatcgcttggcgtccgcctcagcccgccgccaggagaggtaagctacccacagccgccgccgctgcctactcccgccccatctctcccccgtccggccgtcgtgctcttagccttcagaatcggatgctcttctttgttttgtagccggctcggtcggttcgtcgaagatcccggatctgctctgtcacgaggtctttcggcgggtgttgtctcgcgaggtgtagcgagccaaggtctggtcgcctggtagatttcctgtatctgctcatatcggtagcttttgcttttaatcgtgagaatgttttgtggggagtctcttcgaccttagtacgctgatcccatcggggtaatgatatgtatggaatacggatgctgcctaggtttctaatattcttgctatggttgatttgggcatgacgttgatttagtaatggtatttctatgattatgttttttgttctaactttgggttaacgttagacagtgaactctaatctgcacatacggttagagctagaccgagagctgttgttaatcagtagctattcatgtagatgacatcattcttctttggttccctgcatttttcatgattttctattttcttctttgcttcttcacccatctgacattgtggtcttcattctctgtttccagttcaggagagtttcgagaagctgaaatggctcctaaagctgctcctgccaagaagggtgatgccaagacccaggccttgaaggttgccaaggctgtgaagtctgggtcagtaaagaagaccaagaagatccgcacgtccgtgacatttcaccgccccaagaccctgaagaaggctagggaccccaagtacccaagaatcagcactaccggaaggaacaagcttgatcagtaccaaattctcaagtatcccctcaccacagaatcggcgatgaagaagattgaagataacaacactctggtcttcattgtcgacctcaaggcagacaagaagaagatcaaggctgctgtcaagaagatgtatgacattcaggccaagaaggtcaacaccctgatcagacctgatggaaagaagaaggcttacgtgaagcttacgcctgactatgatgctcttgatgtggccaacaaaatcggcatcatctaaagttactgcgtcaggcatctgctgtgctctatttccatgtgaaaccagagtttttgtagctatggctcagtggctccatgaccatgtcttatgcacacttacgaatttgatatcatccaagtcacaggttgtgctcatcaatacttggataccatcacttattcgtattgggttggtctttggctctcacatttcttcgtattgggttggtgtttggaaattgggcctgatagctgtttggagtatagtgtatggatctgcgttcataatgcgagcagcagcgcatggaaattggttacggcaattgtgcatgaaattttctcgaagtgcgccgtgatggagccgcgctgcctgtacacgtgagcttttctctatttaggcttacggcgtgaaccctctggtcgtgtattcgtataacgtcactttac

SEQ ID NO: 40185 - DNA, 401 bp, Zea mays
  Clone ID: MRT4577_136653C.1
ccgggggaagggatatatatataaaagcccccccaaaataaattcccacggggcccgggaattaaaaaaactaaatcaaaggagccccctttcgatttcgggccaaaactaaaaaaaaaaaaaatgaaaagggaaaggggggggggaaaaggggaaaaaaaaaaaatccaaatttgggggggccccccaaccaaaggggggggggggggaagccttaaccttcacttttaatggactaatcaccgggcagcagtcctaaggaaaccatggagggataaacggaaacgtgtccacttttaacctgggggggtcaccatcgtcaccataagggcaggcggtatatgggcatgcaaaacaaagctggttgctcggcccttaacggccaaagcccacccgtccgg

SEQ ID NO: 40186 - DNA, 334 bp, Zea mays
  unsure (1)..(334): unsure at all n locations
  Clone ID: MRT4577_136654C.1
ggacctcgagccggcggnagnaggctcccaaaggggacatccctagccattccatagcaggagccttgacgtcgacgaccagtgctcatcaacgcggtaatccacactaccgcttcgacggcacacggtggatgcacacagacacaccaagggtgggcagcaatggcttactaccacgaggtgcactactgcgctcaggaggagaggtcgacggacccaggcgtctacgggcggcacggggatgcggcccagcagcccctcgcctagggcaacctcgaggtgatcgacgcggacgcacgcgacgggatataccaccacccgacacggtgggcac

SEQ ID NO: 40187 - DNA, 383 bp, Zea mays
  unsure (1)..(383): unsure at all n locations
  Clone ID: MRT4577_136655C.1
ccaaccctaacagcaccggcaaacgtatcagatctgaccggagcctccaaancaggcgnccacgtctagccaaggaggacgaggaacttgcagagcagacaacacatcacgaggacactaatccacgccacactgagtaacaatcactttaccaatatgagaaatgcgtcaagagagttgacaatgacgatactgggcacaaacactgcactgggcaatactttgattaccggtcatgcatccacaaatgtggagcatcaaagctccataagaagctcaaatgatttgagcgaagtgatgcgacttctgacaaagtgaaacgaaaatgcataccctacacccttggaaagagtatgaactcacacatcttggaattaaacatc

SEQ ID NO: 40188 - DNA, 469 bp, Zea mays
  unsure (1)..(469): unsure at all n locations
  Clone ID: MRT4577_136656C.1
cggactcgtgggcggaagacttcagctgctaatacgtgtgacacgatcttctatcgtggaaaaggagaagctacttgaagtcaaagcagatcacctataagaaagatgaactgttcccatgcgtactactactgtctcagactcactgagtgaccgatgaagcgaacccagccttcagttgtctgagtacactgcacgagcttcagatttcaccatatgtagattgatataagtactgcaatattctatggtgactgctcgacacgtgctgctctagctaattngcatccgtgacaaggaaagtggcatcatacacgggtgctagatatgtagatacctgatagccctaaaggctgccacacataataaccagaatgcgtgtgctgctgacttaggtgatgtactgccctatgatgtgcgtgccctgctaactcttaatattatcaaggcctctaccgagattactacg

SEQ ID NO: 40189 - DNA, 259 bp, Zea mays
  Clone ID: MRT4577_136657C.1
cattttggaaacataatggtagaatatacaaacaatcacttgatgccatcaactaaatctgaaaggaaaaggtattgcaaacgtgtcccattaagtgtttattaaaaagagaagctgtcagttcagatgtagttgatggcatcaagtgattgcttgtatattctaccattttggaaacataatgagatctgacattattttgtttctgaaggaaggatcacggttgaaagtagactatgacgtgacctgggactgtgaa

SEQ ID NO: 40190 - DNA, 561 bp, Zea mays
  unsure (1)..(561): unsure at all n locations
  Clone ID: MRT4577_136658C.1
agcccccgctcgacggccgtatcgacgctctccccgcacgccgtgatgacctccaccgcgccgctgcttcgcgcctccggtatgccccccccctgcccccgctcgcgcattccgacgncgccgcgctcacggaaccctgaccaccaccgcgtacccccccgaggtgctctccccccgcgcgccccatctacaccgcccccacccccgcgcgcctgctgcgctgccccgcgcccaggccccgacccctccntacccgcccctccaacccccgcgctccccatctgatcgcccaccacctcccaccctgccctccccttgccccccaccccgtcgccatccgccggcccgtccctccccccccccacctcgccgtatgcctgcccccccctgcgtcacaccccccccacggcaacgctccccgcaccccccaccgacggacgccccctcgccccctacccctccgaagccccttacccctgcccctcacacccctgcactacccacaccggggtgggccccaccccccccctgccaccctccccccccccccccccccagtcc

SEQ ID NO: 40191 - DNA, 393 bp, Zea mays
  Clone ID: MRT4577_136659C.1
cccttgcagggtggacgcggacgcggacggcaggatgtgtggggagaaggtcagacagaccatcacgcagagggcgtccgagaacaagctgtcgaagatcacaaagcaggcggaggagtacgcccggctgatcatggaggagctggacccggacaaactcggctacatcgaggtgcgcaacctggagaggctgctggaggaccccagccagtcggtgagcatcggcaccggcaaggacatgagccagatgctgaggagccagagcctccgtccgacgcccgagccgaaccctctccggcgcacgcagtacttcctggaggacaactggcggcgcgtgtgggtggtgctcctgtggctgtccatctgcgtgggtctcttcgcctggaagtttgc

SEQ ID NO: 40192 - DNA, 320 bp, Zea mays
  Clone ID: MRT4577_13665C.1
caaaacaggaaaaacgggccccaaataacgacaaaaaaagggggggcaaaggggggggggccgaaccacaaaacagggggaacaaggcggggggcgacccccccagggaaaaccctattcaaagactcacaggctgggaccccccccgcagaggggcccgaaaggggccgttaccccacccgggggggagccccccgcaggcgcggcagatgggcccaagccccgggctaccaaaaaccccccccaagggcggccgggcccagaaggccccccgaagatttcgggggcccgggcgcgacatcaggggcggcccggcccgg

SEQ ID NO: 40193 - DNA, 486 bp, Zea mays
  Clone ID: MRT4577_136660C.1
ctcataggaaacgtgcctgactgctcgtagcgagagtatatttgagttcagggacgtggagagcgagactactaaccgctgatgctcattccattatataggataagcggctctgctacattactactacgtctatcctagagtgctgagactataccagatgccgtgctatctatcggagggcataacgtgtcatatggctaagacatacttggcggagacaagacgaggctgactccggatgaagtgatgcattctttcggcttgccatggcatagattatccactccttagccgtcatgatgaggccacttgaacaagccaggagagacgctggaccttggttgctcgcactgcttaggcccggactcacgtagtggcttcctacattgtgccctagctacctggcgcactgtgcctctgcgacctcatgtacaaatggcacgcctatagcggacgctatatgacgcgatgactcgaactgcc

SEQ ID NO: 40194 - DNA, 376 bp, Zea mays
  Clone ID: MRT4577_136661C.1
atacgaaacactggtgcgcctgcaggtcccctgccggtaccgctgcgtagtatccacgcgtgacccacacccttcgcgggattacataatattcggccctcctgtggctcgttactataacggggcatgaccaaaacatgtcggatagtatctcccagccaaacttacactatgactcgaactacgtacctatctacactgaaacaagcgatttctttttcattctagttcccattccagcgatctcctgggccatcgtcgctcggctacttgaacctgggccccggcgctgtgcacggtggcccaaaaaaccatacggagcggaacttgacttgcagtccatcgccgccggtcattggcattgaacatacggtcc

SEQ ID NO: 40195 - DNA, 588 bp, Zea mays
  unsure (1)..(588): unsure at all n locations
  Clone ID: MRT4577_136662C.1
attgggtccctcgaggccggccggngacaaagaaaggatccagagtgggtttgggaaggagtggagacctcaaatggaaaagcgagggagaggatacaagcagttgtccttgatatgtcgagtgtggtaaacantcgacacnttcaggactcactggcactnggaagaaatacacaaggagttggtgtctcttggcttacagatggctatagccagtccgggatggaaggcagttcagaagatgaaagtgtcacaggtggtggacagggtaggacaggactggatcttcatgacagtaggtgaagcggtggaggcctgtctagctgctcataagggcacagctctcgcatgttgagtatgcgttaattactactattagtactcctaaggataatcccataagcgatgcggttatttgcatcctatgaaggtgttactggaaatgcttacgaaacagaaatgcatggtatgacttgactggagtggtcgtggcgagaaacaatcctgctctgggaaggacattccttgagctccacaaaaacatgtatggtgatatcttgacggaaaaaaaaaaaaaaaaaagcggcc

SEQ ID NO: 40196 - DNA, 2242 bp, Zea mays
  Clone ID: MRT4577_136663C.1
gggacacggcgaagctggtgctgaacagccccagcccgcccagcctgcgggaggagctcgtcggcgtggtcggcaaggcgttccggccgcgcgcccacgccggggcgggtgctggcgccggtggccgcccaccgccgcgccgcgcgtgggtcctcacggcgctgcagtgcgtgttcccggtgctgcagtgggggaggagctacaccctcgagtccttcaggagtgacctcatggccggcctcactcttgccagccttggcatccctcagagcattggatacgccaatctagccaagctggaccctcagtacggtctttacacgagcgtcgtgccaccgctgatctacgctgtgatggggacatcgagggagatcgccatcgggccagtcgccgtcgtctcgctgctgctgtcctcgatgatccagaaggtcgtcgacccggccgccgacccggcgacctacaggtcgctcgtcttcacggtgactttcctcgccggggtcttccaggtctccttcggcctcttcaggctggggtttctcgtggatttcctgtcgcacgctgccatcgtggggttcatgggcggggcggccatcgtgatcgggatgcagcagctcaaggggctgcttggcctcgcccatttcaccaacagcaccgatgttgtttctgtcctcaaggctgtctgctctgcactacgacatgacccgtggcacccgggcaacttcctcatcggatgctccttcctcatattcatcctcactacacggttcatcgggaggaggtacaagaagctgttctggctgtcagcgatctcgcctctgctgtcggtcatcctgtccaccgctgcggtctacgcgacaagggctgacaggcacggcgtcaagatcatccagaaggtgcacgcgggcctaaacccaagctccgtgaagcagatacacctcaacgggccgcacacaacggagtgcgccaagatcgccgtcatctgcgcagtcatcgccctcacggaagctatcgccgttggccgatctttcgcctccgtaagagggtacagactcgacggcaacaaggagatgctggccatggggttctccaacgttgctggttctctgtcctcgtgctatgtggcaacaggttcgttctcccgaacggcagtgaacttcagcgcgggggccaggtcgaccgtttcaaacatcgtcatgtccatcaccgtgttcgtcaccctggagctgttcatgaagctcctctactacacgcccatggcggtgctcgcctccatcatcctgtcggctcttccgggactgatcgacatcaaggaggcctgcagcatatggaagatcgacaagatggatttcctcacctgcctcggtgcgtttgttggcgtcctgtttgggtcggtggagattgggcttgcagttgcacttggcatttccttcgcaaagatcatcatacagtcgcttcggcctcaggtggagatccttggcaggctacaagggacagatatcttctgcagcgtcaggcagtaccctgtagcctgcctaactccgactgtactgcctatacgcgtcgacacatccttcctctgcttcatcaacgccacttccgtcaaagaaaggatcacagagtgggtttgggaaggagtggagacctcaaatggaaaagcgagggagaggatacaagcagttgtccttgatatgtcaagtgtggtaaacatcgacacttcaggactcactgcactggaagaaatacacaaggagttggtgtctcttggcttacagatggctatagccagtccgggatggaaggcagttcagaagatgaaagtgtcacaggtggtggacagggtaggacaggactggatcttcatgacagtaggtgaagcggtggaggcctgtctagctgctcataagggcacagctctcgcatgttgagtatgcgttaattactactattagtactcctaaggataatcccataagcgatgcggttatttgcatcctatgaaggtgttactggaaatgcttacgaaacagaaatgcatggtttgcacatgatggaggcaaaatacctatggtatgacttgactggagtggtcgtggcgagaaacaaacctgctctgggaaggacattccttgagctccacaaaaacatgtatggtgatatcttgatgatgtgtaactgtacttagtaagtaaacaagtctttttgttttaaaaaaaaaaaaaagaaaaaaatgaaaccttgactt

SEQ ID NO: 40197 - DNA, 304 bp, Zea mays
  Clone ID: MRT4577_136664C.1
gccagggtttgacagggaatgagttcctgataaagccccctcgcggaagcaacaagatttgttccagcttgagacaggagctgcggctgcggaggaattcagcaaaggcatggttctttccggaacgcagggcaacctgccgatggcaacaatgcacaccggcgggtctccgtacctgaggctgcacgacaggcacacacagcatcacagacatagcgctaacggccggtacatgtcgccactggatgtggtggctgcagaggtcaacaaccagcaactcacggtcgtgcccgtgggcacagga

SEQ ID NO: 40198 - DNA, 697 bp, Zea mays
  unsure (1)..(697): unsure at all n locations
  Clone ID: MRT4577_136665C.1
acgcctgcaggtttcggtccggaattcccgggtcgacccacgcgtccggtcgggccagtggggaagatggccacgctgcaggagagtgaagtcaaagtggatggcgagcagaaactaagcaagaatgagctgaagaggcgtctgaaagctgagaagaaactggcagagaaggaggccaagcagaaagagctgagtgagaaacagctaaaccagactgcttccgctcccaaccacacggctgacaatggcgtgggtgctgaggaggagactctggacccaaatcaatactacaagatccgaagtcaagccgtccagcagctgaaggtcactggggaggatccgtacccacacaagttccacgtggacatctcactcactcagttcatccaagaatatagtcacctgcagcctggggaccacctgactgatgtcaccctcaaagtggcaggccgcatccacgccaagagggcctctggagggaagctcatcttctatgacctgcgaggagagggggtcaagttacaagtcatggccaactccaggaattacaaatcagaggaggaatttgttcatatcaataacaaactgcgccggggagacataattggagttgagggcaatcccgggaaaccaagaagggcgagctgagcatcatcccccaggagatcacgctgctgtcccnctgcttgcacatgct

SEQ ID NO: 40199 - DNA, 2328 bp, Zea mays
  Clone ID: MRT4577_136666C.1
gtacaaacgatttcttcagtcctgttatgtttttctgcttgcggcagtccacacgccgaacttctcgaccgtggagctggtcccgctagcccgtggcgactacagttcctaaagttacttcaatatcctgctcgcgtgcctggtcttttttgagtggaagtccgacgtccgagaggggctcgccattgggcttggcatgggcacagtcatgctgctcctcttctgcgcgctactcgctggtgatttgatatggctctaagctgatcctggagatggtgtacaccggagccaaggtcacaacatgatctttgtagtcctcactggttctcttttctcaaattgaccatggtgttgtaaatttgatcaatgaagaagattcaagaattaccgttttactggattgccatgggatttcgccattcagatttccaatgcaaatgatgaggtcgtttatcactgtggttcaagaaaactacccgaatcgtcttggggtattgtttgtcatagggcttcctccagatgtcacagttaatgcacatacctttcctagcaatggacattaacctggtatccgtgaagctgattatgacattggagccactgtagctcagggggcatccttagtcggcaaagtagcctccatttagattgatgtcatagatgatgaatcaatgtgcaggcgtactccccaatttggatctagcttgccaggtcctaatctatgggttaagaagcaggatatctggacatggctctttaatcccaaacttaccagcgatcgttaccataattcttactgcttgcaagcccttttagaatattactgctgggaggttcttgcaagtccttgatgaagaagtcggagataacgaacgccgtggcgagcaaccttatggacgccaagaacctcacagcacacctcctcgtgatgctcttttctccaaggtcgtctgaaatctacatgcaggaaaaaatctacatgttgatggcgtggatcagaaaaatggtaagttttgcttcatagatgtattaatatttggaatctcaataaacccctcttgttttccgtctgctaacatattcgtatggaacccagcacaaaactcaacgagaataatgatgcaatgatacatacatgtccacagtccatacgttttttttgaagaaataacacttttctagatgagataattagcacatgtgcaattagccaattactgtcttgtgttatgtgagccattggatttgatttttatatcctagaaagtgattcatgttacacttgacctgagattcatggaactaatgggttgagctgcacattcaaattgtatatgtacagggctcttaggacgccttttgtcaagttgggtcataactctaccctgagaattgagatagatgatcatgtggtgcaagatattgagtccctaatctttgatgacacacataacaaatggtaagcgtctccgtggatggagcctgaagtatattcaaattcaaggcatgccacaaagcatctcgcgtgtgggatgctccggcgtgtggaaagtagaaaagccaaataaatgggtacatgtacagcaggcgtgagttcttaaatactcagattccttgtccataggcaaatgcatagttcatacgaatcagagtacacgatgcacacaacttgatgtctctatcgttgttttcaacatgatgaacatgcgaatttcgtggtattaattgggaccgtctgatttcctctgagatgcaacaacgccatcagggctgcgataatcggcctgctggtggtgggcatcttcgtcgcgtttctggcatggatgatcgaccttgcatccgttccagccagtgcctgaaagcgtgttgaataaagcatgcacgtacatgtagtgctaatttggatgcatgcatgctgtattatcttggcacggtgtttgagtgctgtcgtcataccgcgatagagcgcaatctgccagtttgagctagcgcaagaatagtgttagatcattatgtggtgcaagatattgagtccctaatctttgatgacacacataacaaatggtaagcgtctccgtggatggagcctgaagtatattcaaattcaaggcatgccacaaagcatctcgcgtgtgggatgctccggcgtgtggaaagtagaaaagccaaataaatgggtacatgtacagcaggcgtgagttcttaaatactcagattccttgtccataggcaaatgcatagttcatacgaatcagagtacacgatgcacacaacttgatgtctctatcgttgttttcaacatgatgaacatgcgaatttcgtggtatt

SEQ ID NO: 40200 - DNA, 465 bp, Zea mays
  unsure (1)..(465): unsure at all n locations
  Clone ID: MRT4577_136667C.1
atttaaatgactgaaaaattaaaataaaaaaaaaattgctggtggggtcaccgttccgggaaccgcaggcgcanccactcgtattcattcgtcttcatcctacgcgagggcgaaacccacaaacgctctccctcccgtactgcggactacacatacagggacgatgacgctgggtagcttcgggcccggatcgagcgtcgtcggtccccgaaacttcaggctattagaggagctcgagcgtggaaagaagggcattggtgatggaacagcgagctatggaattggatgatgcccgtgacatctacatgcgggcatggactgggaccatcattggccctgacaatactggacatgagggtcgcatttaccagctgaaggtggtttgtgacaaggactatccggagaaagccaccttctgtcagatgtcactcaagaaataacatgacatgtcgtaattacgagaca

SEQ ID NO: 40201 - DNA, 485 bp, Zea mays
  Clone ID: MRT4577_136668C.1
gctactggagaggcgaaagcgtaacagctggcgattacagatagagcgcgctagcatggcctttttttttttgagataacaacggtggagaggaggagatggcgtgcaccatcacctgtgtgaaggcaaaggcagatctttgacagcagggacaagcccaccttagatgcggcacgcgagactcagcgcattgcaggtacgcaaggggggccggaccaagaggaccattcactgccatatatgaagacattggagtggacggatggaggacacgatgatatgacgcgcgggttgatctaacgcgtggagacccgctaacaacattatcggaccaacgatcgctggaaaggaccacattgaccattgtgagactgacaacttcatcggccaacagctggaggtgacctcaatgaggggggctggtgcaaacagaagcttcggagcaaatgccatgcctagcagttacactcgctgtgtgcagagct

SEQ ID NO: 40202 - DNA, 518 bp, Zea mays
  Clone ID: MRT4577_136669C.1
attataattatttttagaaaccaaacgcctttaaacacaataataatagtgtaattcccctggtgatacaatagaatgtatatttttttctgcataaaggaagatgagtgctggggtgtgggctctgtcacttagcacccgtgccgcgaccgtgagcaccagggaaagaaatcacatcacgtcaacggggggcgagtagggagaaacacgccaccggcgggtgaactcgttgacggggtcgttcaccagcttcgaccctgaggggtttaagggcaggatcctggtcccgggccggagcacctcctggtgcgggtggttaaagccaacccaggtgcgcgcgctagaattctgttagcgcctagtagcggggaggatggggagaaagatttccttgggcaaccaggagcgggcttggcagaagcagcggagcctgaacacgtagggtgggagcccagaggagttcttatgcgtcgaggggccaactgttttgaagctggcgaaggggggacaatgcaccg

SEQ ID NO: 40203 - DNA, 290 bp, Zea mays
  unsure (1)..(290): unsure at all n locations
  Clone ID: MRT4577_13666C.1
gcagtgtcagtcattgtaacctagatagcgtattacatctggcaccacatggcattctacggtgcgaagctctctctgctcgcagccatggcgaagaattacccaaccgtgagcgccgagtacagcgaggccgtcgagaaggccaggcgcaagctccgcgccctcatcgccgagaagagctgcgcgcccctcatgctccgactcgcgtggcacttccgcgggacgttcgacgtgtcgncgaggaccggcggtcccttcggtactatgaagtgcccggcggactggctcac

SEQ ID NO: 40204 - DNA, 908 bp, Zea mays
  Clone ID: MRT4577_136670C.1
cattgggtacctcgaggccggccgggaggtcactgcgcatcaggccgggatccgacggatatcaaatccgtgtgtcatctccccgcgtcctggttgccccgcgtcgggcgactcggacgctccccataatccctagtagccgccgccgccccttcgtgggcctctccctgccgcgccgctgcctgagctggccgccggaaggttcggctgcttgcggggagggcggcggcggggcatctccgtctccctctggtggatctgggcgggcacagccgccaaggtcaccgtgagttgctcgtcggcgtggtcggccccggcttcgccccctcgcgactcgggtggctgccaactcccctccctccccatctctttgccttgccgccgccggagctagctggtgggttgctcgcacggctaggggtgaaggcgtcgggcgggtgcttgctgccttgtcgtgcgtccaacccacggtggcggcgtccgcccactcaggcaacgggcctgtggctgggtgcgcgcccgcgaggctagcccggtggcggcgcctgcgtgccgcgacggcaatcgctgctgctcgggggttggaggtgtgcctggactgtgtgctcgcgtacctgatgcgcggagggctggatctggcgcccccagggggagcggcgttggcgcgcggaaggctggatctggcgcgcgaggttggcggcctccgcatgccatccgtcggaggcggcggcaggctggtcccgggctagcgcatgagccgggggtggaggtcggcgttggtgcgccggcaggcctgcgcagtcggccggaattgcagtggcgggacctcctctcgtctgggcagcatcggctagtcgatcgggctagcgccagggtggtggtggcggcaggcccaaatcttcatcatt

SEQ ID NO: 40205 - DNA, 142 bp, Zea mays
  Clone ID: MRT4577_136671C.1
cccacgcgtccgatttgatctgagaacagagactttttggacttgggaaagcctgtagtcagtgcgtacaaacaaagttggcttgaaaggtcctatggctacacctataggaaaggggcctccgagctttggaattttcctt

SEQ ID NO: 40206 - DNA, 256 bp, Zea mays
  unsure (1)..(256): unsure at all n locations
  Clone ID: MRT4577_136672C.1
ggtttttggagagagtttcttgtacacttacaaacataacaacaaaactggncctnccaaatttacatttttacatngcggcttggantggccactacaagggacatgggacagntcagaaggacgncctgaccnancctggttaganggttccctgnctgaccagccacaacnttgggaaagtttcccananagatcacagncttatacnagaanccagggttcatcnacntnancctgaangaatnatnatctt

SEQ ID NO: 40207 - DNA, 287 bp, Zea mays
  Clone ID: MRT4577_136673C.1
gcgccgccgacgggggaggcgacggcgacgacaaggaggccgtgaagcgcgcggtgccggtgttcagggagatcgcgctggccgagctgcgcgccgtcaccaagggcttcagcgccgacctcatcgtctcggagagcggcgagaaggcgcccaacgccgtctaccgcggccgcctcgatggcggacggctcatcgccgtcaaacgcttctcgcgcctctcttggcctgacccgcagcagctcctcgcggatgcggtgggcgtggggaaggtgcggcacaagcgcctc

SEQ ID NO: 40208 - DNA, 398 bp, Zea mays
  Clone ID: MRT4577_136674C.1
ttttcgcgttcggcacggggatctgaacgtggatgtgaccgacctggagccctaccctgggctccactttatgctttattacaaggttccagtcatttctgctgggaaggacttccacgaggagttccacgtgctcgtaatcgcgaacaggaccttctgagactgccttcatgatggccaagattagggccatgcatgacctgcacattgtatactgcctcatataccgtgtcgttgcaaatagtacggaggttcacaaggttgtgaacactatcaagaccaagctcactatcaagcgcgcgatctggggcaagaattgctgcaagtctggattcaactgtccagctcactgccaggtccccagcgaagacctgctcagggaccagcctgccgagtgc

SEQ ID NO: 40209 - DNA, 443 bp, Zea mays
  Clone ID: MRT4577_136675C.1
aaaggcaaacacaaccctgcattttaaaaggcaaaacggaccggcccgtatataaacagatatggccggcccaacaaatggggggtcgccaccccggccaaataaagggccgaaagcaagcaaattttatccccgaacaccaggggggccacccaccgcccaggtccccccgggctataaacaaaaaagccataacttgccccactaaagcccaagcaggaccacaacattttcggctctaatttcgaaaactggaccagccccccggtaaaaccccaaagctgtttccccaacccctccctcctcgcaagttggctcgttttccccacgtggaaaaaaaaaaagaacttcccggccacccccttggggggggggccaagcccaacgaaaaaagaagttgcacccccctggggaacattctcccacaaaatgaaaggggcaac

SEQ ID NO: 40210 - DNA, 180 bp, Zea mays
  Clone ID: MRT4577_136676C.1
caagtaataaaggctaccaatgacgtaaaatttcttggtgtagattcggtactatgggttggtactcgtcaatctttacgtggtgcctggggctgtaatagtgattcgtatggtaagtgtgtcgaattgcaaaggagggactccagaagtgaggcagacgagcgatgctatcttggttct

SEQ ID NO: 40211 - DNA, 518 bp, Zea mays
  Clone ID: MRT4577_136677C.1
gggttgccaccccccaccccttctttttttttttcaacaaaaggaaaatggcattaattcccctaaaaacatgtgccgaaaagggggaattaggaaggaaccctcaggggaacaaaactggggagaaaaaaagggaagccccgcagctgtttcctctcttttttttttacacttgggatgcagctggctcgctttgaaaacgggctcttttttttttttcccgaattccgaaagaaaacaagggtggtctactgccctgaggaggaaaaaactagctttttttttaaactacacatcccactgatgtttgtttcacctggatgttctgaaaaactgactgcctaaagtcacgggtggggtaccttcccccatgactggtgggaggctgatctcctgctcgcggatcccttgttttttaacctccaccgagctcattgacgggcgctgtttgctcgttggatttacccaccgggctgtcaggctcaacaattcctttatgctttgtgagggaaaacccc

SEQ ID NO: 40212 - DNA, 428 bp, Zea mays
  Clone ID: MRT4577_136678C.1
ccggccgggcttttcccctccccagggtacacggtcgccggcacctgccctagccgcaggagggagcgttcgccgccccgcaccgacctcggtctcgcgtcggctcgccccccgagctccgtctgccgcccctctccggagaaatgtctgagtatctctatgagggcaccttctgcggcactagactcgagcctgatggaataaagcgtgatatagtttctcgtgccggagctcgccgagagtgagttacatatgtatatgcagctagatgtcgccacagatgtgttatcctatgcctgctggtgaaaaattcaacatggctatagcgcctactctgaatttggatggcacaccatatactggctactatactcagggtggcagaacaactctggaaggaaattagtgagtacgtgtgcaagggaagc

SEQ ID NO: 40213 - DNA, 807 bp, Zea mays
  Clone ID: MRT4577_136679C.1
cctcgaggccggccgggccgggggatcgaatcaagcaaaagccaaggaacagggggggcaaggctgctggctgctgcccgtgatgtgctgcggcggtgacggcggcgacggccgcgagtgccggccgctgggttggctgctggggctgccgttcgcgctgctcgccgtcctcgtctccgtcgtcggcgccatcatctggatcatcgggctgcccatatcgtgcatctgcccgtgctgcctctgcgtgacggtggtgctggaggcggcggtggagctcatcaaggcgccgctgcacgtcatcacctggttcacctccaagataccctgctagacaggcagtcggaggatggtttgtgagcgatagccaggtgcatgggcagtttatacaggacacggggtttcggtgcagaccagattaccagaatctgtcatgtttcttcgtgcttctggattgccgtttaacttttcaaaataggtcaaagtaaagagttgcagttgcacagcaattctaagaacagtatagaggggtcagggatggttcatacaggtcatgtttgacagggctccggcttctggagaaccctgccaaatggtcacttaaaattggctctttatatatatgaagtctgaaggagccagagctgtttgtatatagaggagttggtgcagctgaaatatggtaacgatagagcaaatggtgagtatacagctgaaactacccgtcacccagcatatataggcgcactggagcagagcaaatgagttagacaaaagagaggttaacactatagttttacaggtttgaac

SEQ ID NO: 40214 - DNA, 419 bp, Zea mays
  Clone ID: MRT4577_13667C.1
cttctactcatcaacatcctggagcccttagtagccagccaaatatacctggagtcggtgggccattttatcctgccaggaatcttcctgatggaccatcctctgctgagactaataacatgggttttatgaactcacctgctcaaatgcatcaaggtggagcagatacaaactaccagaaaaaaccagttagtggccatacagttccaaatcatgttggtccatcaccaattcgacctccaatggggttcgatatgggtaatagtgttggacactttgaaagagatgaccctcactcttatggaaggtttgatggagcaaaggctctccagcagcagccaaagcttgctgctctcccaacttcacaaaattccatggtcatgcataatggaccgctttatcctcggccgacagcaacg

SEQ ID NO: 40215 - DNA, 125 bp, Zea mays
  Clone ID: MRT4577_136680C.1
tcggggggtgtacatgaaatccccgatcctggacagatttggctcaagtacgggccggaactttgcaagatattggttagggcgaaatgaaggaacagcggggcgggaaacaggataaagggggc

SEQ ID NO: 40216 - DNA, 409 bp, Zea mays
  unsure (1)..(409): unsure at all n locations
  Clone ID: MRT4577_136681C.1
tcgtccgcggcctgggcgtaggcactcctcgcggggcccctgtgggcggcggccctcctcggcctgctgctcggctgggcctggcgcccgctctgggcattcgggctcgtcgtcgccaccgcggcagacggtgggagggcccccgccgaccggcagtcgcgcttcacggacgcgcgcgtggtgggtgggggggacgacctgatgaactgggcgcgtctgggctcggtctggcccatgaccgnggggctcgcctgctgcgcggtggggtatgatgcacgtccccgcgtcccgcttcgtcttgttccggttcggcgttatcgttcgttcttcttctctccttttcttttgttttttttttttttttctttttccttcttgtttttntttttctttctcttttttctttttc

SEQ ID NO: 40217 - DNA, 881 bp, Zea mays
  Clone ID: MRT4577_136682C.1
caggactagcccaccaccattgcactcgaaagcttcagctcaagctcaagctccacatcaacaatggcgagcagcagctcaatgctggccgtcctagccaccctggccctgctgctctccccagccgcctcagccctgtcgtccacgctgtccccggacttccacgcggagacgtgcccgcagctggacggcatcgtgcgcgcggcggtgcaggccgccctcacgagcgaaatcgccatcgccgctggcctcgtccgcatctacttccacgactgcttcccgcagggctgcgacgcctccatcctcctcaactccacctccgcccgcgagacggcgctgggccccaacctcagcatccagccgcgcgccatgcagctcgtcgagtccatccgctccacggcgcacgccgcctgcgggcccgttgtctcctgcgccgacatcaccctgctcgccacccgcgccgccattgtcgcctccggcgggcccaccttccccgtgcccctcggcaacctcgacagcctcgccccggcgtcacaggacaaggtgttcgacctcccgtcgccggccaccgccagcgtcgccgctctggtgcagtccttcggcacccgggggctcggcgacgtggccgacctcgtggcgctctccggcgcgcacaccattggtcggtcgcagtgtgggtccttctccgaccggtctcagcgcgccgacgacaccttctcgaggaagctcgccgccaactgcagcaagaacccggaccgtctgcagaacctggacgtgatcaccccggacctgttcgacaacgggtactacaaaggcgctggggttcaaccaggggcgtcttcacctccgacatggcgctggtcaagaacagaccaccgcac

SEQ ID NO: 40218 - DNA, 1593 bp, Zea mays
  Clone ID: MRT4577_136683C.1
atgtcaagaacaaacacagagaagattactaaagagattctagaagatttgtttgaagatactgatgacagtgatagttatgatgtggagagtggagacgaagattccgaagatcgaccgtggcgaccaagccatactgtcttcgggaaatcgattgttaaacagagtcatcttgacaatatgagaggaaggtactttcgcgacatatctatcatgagagttggcggggacaacacggcccctgtccctgaggagaatgaagttgttatctaccgaagcttttttaaggctggtcttcggttccctttaagcaagtttgttgttgaagtgctgaagatattccagatcttccttcatcacatcaccctcgaagctataatgaggatggggatttttgtctgggcagtaaggagtcaagggctagagccaagcgcgaagtgcttctgcagtatgcacgaacttttatatgagatgaaggccactggtaaggaacagtaccacaacaacttcggttgttatggatttatcgctcgccccaacgcaagccacctggtgccaacattccggaagagatggcccggagcctggatagaggaatggttttatgtgaagaatgatttaaaggcaagggaagacaacaaagatatcatccagcgccccatctggtcacgctttggccttcgaaggtcgaaggtggaaattgatgatgctgtcgaagcgtgtcagagggctttcagcactgtttgctccttcattggcataagagatttgattcaagaacatatatccttcagggtatggccgcttgtgaaaatctgggaaatgccaaaggagaccaccactgattctagtgatggtggtctggtccgactgaaatatacattcagaattagggagaagtttgatgagccaaacgacgattggctgaaccttcggaggttgggggaagaaaagactgaacagggttttgatgcaatcgacttcatataccccgattatcggtacccgctgcgagggcaagagaaaaagaggaagattgctgctttggtcatcctagctgagcctgtgccgaagagcaaaagggtgaaggttctgacccaccggtcgcgttatattgaaccggccgtagtgcctaaattcggaacagggtcctcctcagcagccgaagcaacacaaactgctctgattgcacagagcactgaagaggcgaccgtagcgccgaaggtacccatagccgagcgagtcgaggctaaggttgataaggctaaagagtcaaacattgaagaaataatgaaagtgccaagaattctaagccctctgacagagacaaaactgtcgaaggtgcaaaaggcttctgtcgcaactcccaagaggaggaggatggctaatgtgctggatgctatgctggagagtacaaaggccttgagtcctgcacctataaagaaaattgctgaagctgccatagcgcaaaccgaagccgaaactgggcaagcagaagtcgaagctacaaaaactcaggctgaggccgaagctgggccttcagcgccagccgcggtgaagcctgccgcgcctaaggaaaagacggcagaatag

SEQ ID NO: 40219 - DNA, 571 bp, Zea mays
  Clone ID: MRT4577_136684C.1
gacgcctgcaggttccggtccggaattcccgggtcgacccacgcgtccgaagcgagtcagcggagctcgagccttcgtggtatcgggctgaggcattggtggttgactacgctccccctgcgtgacactgtgcgcttttctttgcggagaatggaggatatgagcactcgggggcctactgaccttgatgccccaacaccttgcataaaagccatgatctgatcgaggaccacgagagcgttggaaaggacagggaggccgtgctggctcgagtagatgcctctgtctaccctggcgaacgccgtgacactctgtgatgttgacagagctgggtctgctcaccttgcgccagaccattagccactggcacctgcttgatattcgagtgagtgttcagacacagccattcagtcttggaagactgagtgcagcactgtataaatggctgtttccttccgtaacatagagctctatgacggtgaggatacatctcacatacgtgcttgaggggccggaagaactactccatagactactggttcacagagctggtaccgaggctgcgactgag

SEQ ID NO: 40220 - DNA, 833 bp, Zea mays
  Clone ID: MRT4577_136685C.1
gggagctcacaaagctacgcgtgctcaacctcagctacaacaggatttcgcggattgggcatggtaagcacgtgtctccatacttgaggttactgctgcttgtatgcacagtgcacatgcactcataaagatgcgatctgagtttatcatcttcccggccggtacagtctgtcggtgtggatcagagactccgaatcattgaacaggacaggacatcccacattgcggtaccagttccatgtcttggcttcgagtggccagcggtggacataattgtctgggaccggtgccgttgagatgaccctgtcctgattcgtttatgcatttgcttttctgattgaggtggcccatgatggaggaaggacccactgctgccgactgacatgcatcatcttcgattaattgcatgccttaagcaatcacgaatgcatcagtttgttttgtttgctttgctcatggattcctctgcgatgctgcgcgccatggatcaggtctgtcgaactgcacggccatccgggagctgtacctggcgggcaacaagatcagcgacgtggagggtctgcaccggctgctgaagctggcggtgctggacctgagcttcaacaagattacgacggccaaggcgctggggcagctggtggccaactaccactccctcctggcgctcaacctcgtaggcaacccggtgcaggccaacatcggcgacgacgccctgcgccgggcggtcacgggcctcctcccgagccttgcctacctcaccagccagcccgtgaagccgcagtgcatcgcgcgggaggtggtcccgggcagtatcgtgcgcgccgcgctcagcg

SEQ ID NO: 40221 - DNA, 315 bp, Zea mays
  Clone ID: MRT4577_136686C.1
ctcagcagacaagcacaaggagcttacatctaatgagctgtgtgcatggactaaagaagatctacatagagcagaaggtgcaatgctcaaggttctccaggtcgtccaaactggacagtgggtatcttggcgggcactgaggggtgctgcgtcgaaggctgttgattcgcaagagctgcttgattattctctccgaggactgggtgggaaacaactggataatggcctttgtgttgctgtccgttgcaatgccggtactagtgcaatcgagtacaggctggaatcttcctccgttcggtctccagcaaatgcagc

SEQ ID NO: 40222 - DNA, 303 bp, Zea mays
  Clone ID: MRT4577_136687C.1
aaaaaaaaaaaaaaaaaaaaaaaaaaaaaaaaaaaaaaaaaaaaaaaagaaggtaaaagaacaaaacaaaaaaaaaaaaaggtgggtggacacttccaggggccatacttaggattggaactggcgggaaagattctaaaaattgctcaaggtttaaaggggctaaaaaaatattttaagtttgaaccgacttccccaattttttcgagttgccccgtcctccctctttagatttgggggcctttgccctttgaaccaaaaaaaaggggccttttcctttcctccaaataaaaataaaaataa

SEQ ID NO: 40223 - DNA, 460 bp, Zea mays
  Clone ID: MRT4577_136688C.1
attcggctcgaggtattgcaaagagggcaatgagaagaaagcactggaggtgtttgaggagatgtctcagaaaggggtgcgtgcaactgcagtgacctacacgtcattgatatatgttttttccaggaaagggcaagttcaggagacggataggttgtttaacgtggctgtgaagaagggcatcaggcctgacgttgtcatgtacaatgctctgatcaatagccactgcacaggtggtgatatggaaagagcatatgagatcatggcagagatggagaagaagagaatccccccagatgatatgacatacaatacgctgatgagggggttttgcttgcttgggcgacttgatgaagctcgcacgctcattgacgagatgacaaagaggggtattcaaccggaccttgtcagctataacacgctgatcagtggctatagcatgaagggtgacataaaggac

SEQ ID NO: 40224 - DNA, 372 bp, Zea mays
  Clone ID: MRT4577_136689C.1
gttccttagggctggtcaaattgcgattttagatatgcgccgtgctgagattttggacaacgctgcacggcacattcaaggccgtttcagaacatttatcacacgcaaagaatttgtgaaaacaagggaggcttcaatttctatacaagcatactgcagaggctgtttggcaaggaagatgttcgcaaacagacgagaaacagcagcagctgtaattgttcagaagtatgtccgaagatggctgctacgtagagctcacctgcaagcatgtttggcagctctccttattcagtcttacattcgagggttcatcgctcgccgctatttctctgtcattagggaacataaagctgctacagtgatacagtccac

SEQ ID NO: 40225 - DNA, 329 bp, Zea mays
  Clone ID: MRT4577_13668C.1
cggacgcgtgggtcatcctgttccatggcctcccccaaagccctatcacgctgggacgggtgccatactagcgccccaaacccacacaacatgtacctcgtgtctcactctctttctcgcacgactttatcacaccaacccttacacctgtccgcgtctcgtgaatacctaccgctcaattcaagctgatcccctccgacgatacgtcttccacccttactctcttcacggctactccaatttaccgcctgtcagtatctactgaatatgaacttgcactttgaccctagtcccaaaaagcaatgactgcaccagcaccgatctgctct

SEQ ID NO: 40226 - DNA, 355 bp, Zea mays
  Clone ID: MRT4577_136690C.1
gagatttctcctgtgatcttagccgcagccatgcaggcacccgtgctgaccgacaaggtgaaggtcaaggccgggctgggaaccggcgtgtgatccgagatctgcttcgagatcgcgcgccacgtcgcgcacgacggcatgctgggccgcatcatggggggcctccacaaggtcctcgacaaggtccgggcccagctcctgccccatggtcttctggctggagatgtccatagccatgagcacacccacaaagaccctgccagagcacttgctcattcaggtgcgcattacggtaaggtgaacagtgctgctaacagcgcacttggttacccggttgatttgacggccgatggga

SEQ ID NO: 40227 - DNA, 320 bp, Zea mays
  Clone ID: MRT4577_136691C.1
aatcggtaggaagccataatacatactacttgcacaaacctggttcatagttgcgtacatcgcctactgatagtgttgactcacttgtgcatagcatttatgaacaaacgagccacagctataaggggatcggtctatcatcgaagtgactctcatctgcgcgacgaaagacatatgtaaatgcttagcataaccgatgagctaaggggccggagacacagcagaggggcagaagtgcatgcctggtacatagactggcaaaccacatgcctgcacaaatgctatccagtgttccctctccctagactatgaacagtacg

SEQ ID NO: 40228 - DNA, 1107 bp, Zea mays
  Clone ID: MRT4577_136692C.1
gggttctgttgttctcctctgagtgccatcgcatgcgcgtccgacttcttccggattcccgaacgccaaatcccatccccacccccaactgctgcccctttgtcaaccccacttctccccaccgccgtcctccgtgctgacccctctcgctccccggagccaccgcgacaagctcgccgagaggtcgccgccatggacgaggagtacgacgtcatcgtgctgggcacggggctcaaggagtgcatcctcagcggcctcctctccgtcgacggcctcaaggttttgcacatggatagaaatgactattatggtggagattccacttctctcaaccttaatcagctctggaagaaatttagaggggaagacaagcccccggcacatctaggctcaagcaaagattacaacgtagacatggttccgaagtttatgatggcaaatgggacattggttcgaaccctcattcacactaatgtaacgaagtatttgtcattcaaagctgttgatgggagctttgtcttcagcaaagggaagatccacaaggttcccgcgactgatatggaggctctgaagtctcctttgatgggcctttttgagaaacgcagagcaaggaacttcttcatttatgtccaaaattacgatgaagctgatccaaaaacacatcagggattggaccttactacgttgacaactaaagaattgatagcaaagtacggcttagttgatgatacagtggatttcattggccacgcgcttgctctccatagggatgatcgtcacctcaatgaaccagcacttgatactgtgaaaaggatgaaattatattcccacactcttgcgtcattatatttattattttgtttcttttctttttcgttttgtttatttaagatccaagtgggttttggtgtgttttcccatgctggtttggtttgtgatctcaatttcattattgatttctgaaattatattatgggtacaggccattcatggccttctgctgtgtttcttgtgaggtgttattgctcatactttgtgctgtcctcaggaattatgatcctgtgcagctcgaattcatccaatccgaatgtagaaaattatcagttg

SEQ ID NO: 40229 - DNA, 712 bp, Zea mays
  unsure (1)..(712): unsure at all n locations
  Clone ID: MRT4577_136693C.1
gtggtcggtggggcggcgccgnngcgccggcgccggtagtaaggcgacgccaactctggcctgaccgcgannaccgacgctcaccgtgaagcnntgctggcaccggagggcgcgggagaagtgctacaagaaagacggtggggngaggaggcgacgttcctggagatcgccaaggactacttcaaccagttcaaggaggtacccgcgcaaaagcactggatctgcttcaagagctacttcgaccagaagcgcggctcggtgttcggcaagcagaagatcatcgaccctgcggtcaaggatgagactccggaggtggtgaagcccgcagcagcagcagttgaatctcactgaggcctcgccggattgcacctggaatcgttccagctaattaaagtttatataaattagagaagcaatccggttagaaatcgttcctacccaccaatccggcacaaacgaacaagacctgaaggggttatgatcgtctcagggaaacaaaatgtaaataatccttgcgtgttctacgttggaaactactttggtctcctcagaaactagtatgtcatgctagaagtcgtagtagtggtttggcaatggttggtccagcaattcgtcatggactctgtgtttctgcttcaaattcttagaatgtgaacctctatccgtgcatgaaattgaatccttactgcagccatttggcatgattttgtac

SEQ ID NO: 40230 - DNA, 471 bp, Zea mays
  unsure (1)..(471): unsure at all n locations
  Clone ID: MRT4577_136694C.1
ctctgagcggccgcggcggccaccacctcgggcccggcccggcggcaccgcagcgccgcgaccaccctccggnacgacgccggcgacagcgccgccagctcggccgcccaccacccgggcggagcactgctgcggcggcatccggggcttgctgccgtgcttcattaacgaatacttcagtggcatgcttatcggggcgggaggggtgcgatcttatgatgttagattatttgccaattggcggtaactagcgcgaatctcatttgtatgcatatggcatggcctacggggctttagcttgaaactggttttgctcatgagtctttgccctgcaccggtctgttggagttggattggacggggatataggggtccggtgctatggtggcgccgtgtatgcttaggccttggatggctggggtgttcatgcgccccgggatgcccagtatcccctttgctttttgagggggg

SEQ ID NO: 40231 - DNA, 378 bp, Zea mays
  Clone ID: MRT4577_136695C.1
gaaaacataacagagagcatgcagatgaagtgatggtctaaaaagggccccagaaatggagccagccagggctggggcctcagccacaatatgcatacatttgaaggatgcaggatccaaatggtcgcacgggcggacataggtggagcagacagtaaataacgacgctctacatatacggccgataagctgtactgtttagaccacagaggggaaggccggtacaggctcttggaggccccgacaacacagcctagaggtcccaggcacagggcggggaatctgtgaggcacccaacccatggagcctggggatgcacatctccctgggggccacctccggccaactattggtacttctcaaccccgtggcatttga

SEQ ID NO: 40232 - DNA, 540 bp, Zea mays
  Clone ID: MRT4577_136697C.1
tttttttttttttttttttttttttttttttttttttttttttttttttttttttttttttttttttttttttttttttttttttttttttttttttttttttttttttttttttttttttttttggggaaaaaacttccccagttaattggtttttcgaaaattaagggggtggtttccatgttaaaaaaaaatgttaaaaaaattcttggcggggaagaaccttaaaggcccccccaagcccaactttttaaaaagggggttttttggggccattttttttaattgggaattggccaattttttaattttatggaaaccacggggggaggaaggggggcatgcataaactagtaagggcctttaaaggaaaccctttttgaagggggggttcaccacccccctcggggggggggaaaaagtttttgccattgagctgttgggggtgaacttaaaaaagcccgttgttttgttcccacccatggggcaataaaaccgggggggtttccccaagtttttttaaaaaaaacttttttgttt

SEQ ID NO: 40233 - DNA, 316 bp, Zea mays
  Clone ID: MRT4577_136698C.1
ctcgcaaactgactgaataatttgtgcttctaatgatggaactgtttttgactaagagggtgatattattacaacaattcatctttgggagaatttccttgcaaaccttggtccaatttttacaagactgttatgttactggatatgataattaggacgataccttgctctgaccaactctatccggatagattgatgtgctactagctcaaataaaagtttgatgttcgtatgggtatgacactcgtggcgatgttaatctcaacctgctatcatatccagtgagttatgtattctgatacaagatcaccaatga

SEQ ID NO: 40234 - DNA, 440 bp, Zea mays
  Clone ID: MRT4577_136699C.1
gggggggggggttttttttttttttttttttttttttttttttttttttttttttttttttttttttttttttttttttttttttttttttttgggaaagggaacctcttatttttggggggccccctccctcacccaaaaaatttggggggggggggggggcaaaaacccatctaaaaaagggccccccccatgatgtgtttttgggaggaggcccctccgtctttcaaaacaagttggacaaagggccacaatttttgtatttttaaaagggttgccgggttacccccaaactgctggtaaaaaggcagcaactgttgctttttcaaaaagaaaacccggtttgctgcacctacctggctaaatgggaataatatttgctgctgcaaataacccgcggggttcacggcccccacattgttaaatgaaaaaaatttttt

SEQ ID NO: 40235 - DNA, 281 bp, Zea mays
  Clone ID: MRT4577_13669C.1
cagtaactatagcctcaggcagccaaagcatttgggaacaggtttcacgaaagttgcattcctgtgagcgctaaaaccatattattgcaaccatcatgtattacaacctgaaaactagcataaataggggatatttgaaagaagaaacgaaatgtgtgcagttgctcatggagcccaagcacaacatggatgcctggctcattaaccatgctcaaatcagcaagctgtcctggatcaattctgggtgacaccgcctaccgcgaagaaatgccacttctcag

SEQ ID NO: 40236 - DNA, 304 bp, Zea mays
  Clone ID: MRT4577_1366C.1
ggaaaaaaaacctcccagcttttggacccctaaatgggcaaagattatacccctttttttgggtttacaagtttttccttccggatgaaaaaattcccgcttttggtggaccccttttaagtttgggccggaatcaaaccctgccctttttttttaaaaaacgagggccttatagttgtaaaaattaacacaaaatttgaaagcctccccaaaatgtttgttcccccccccccccatttttggggggggaaaaccccccctttgtgtcccttaactggaaacacccccctccccgtttttttat

SEQ ID NO: 40237 - DNA, 333 bp, Zea mays
  Clone ID: MRT4577_136700C.1
acgcctcacgcgttcttcggagcgtggcctatgcacacatgttccattccagtcctagatgatcatcttggggtccggagggataaaaagaagctcggccattgtgaagagagatgtcactgacctgccaccatctaagaagcggatggcctaacgagacactgtcattttcacaccattctgtaaccaccggactagtgtgtaaagcctaattgacattacaactctgaatcgcgaaccatctttggaaacatgtgacgaaaacttgatcacaactgttgatgcgcctactgagccgcttgatctatatatggaacggagagatgcatgtta

SEQ ID NO: 40238 - DNA, 543 bp, Zea mays
  Clone ID: MRT4577_136701C.1
aattgccgggtcgacgagctttcctgtcggcggccgcgtccagcctccggcgcgtggcgcgcggcctgctcgccgcggcgtgcaccttcgccgcactcgtggccgcgctgctcgtgtccgtgctcctgggcttcgttctcgtccggcgctgcgtcgagggcccggtcaccgtgcgccagcagctcttcttcgactacacggaggcgcagcccagcgccgcggtgctcctcggtggagcgcgaggcgccgtgctgccggcgggtcactccgtcagcgtgtccatggcgttgctccttcctgattcctaccacaaccgtgaggttggcatgttccagataaaagcagaggcggtctcggcaagtggagtcaccatggcatcagcgacacagccgcacatgcttcgctacaagagcggaccagtccggctggcgcagaccgcgctgctgtgcgtgccgctcactctgggcatgcgcagcgaggcccaggccgccagccttagggtgctgcagtacagggaagggcacggccggcacaggagaacag

SEQ ID NO: 40239 - DNA, 2152 bp, Zea mays
  Clone ID: MRT4577_136702C.1
atatcacatgcttgaatgacctagactatgagccagagcatccccatgatgttggtgacgaagatgactgcatgcatatcatgaacttaacagatatccgagtgcggcttttgaatggtgtgcaagccgcgtactggggaatgcttgaagaaggacgaataactcaagttacagcaaatattctgatgagatcggttgatgaagctatggaccttgtttctggacaaacattatgtgattggaaaggtttaaagtccaatgtgcagttcccaaattactataggttccttcagaggagtaggttaccacgaaagcttgtcacatacttcacagtcgaaagattagagtctggatgttacatctgtgctgcatttcttcgtgctcacagaatcgcaaggcggcagctacatgattttcttggtgatagtgaggttgcaagaactgttattgatgaaagtaacgctgagggggaggaagctagaaaattcttggaagatgttcgagttacattcccgcaggtgctacgagtgctaaagacacgacaagtcacatattctgtgctgacacacttgagtgagtatattcaaaacctccagaagactgggctgctggaagagaaggaaatggtccatttagatgatgctctgcagacagacttgaagaagttgcagaggaatccaccaatagtgaaaatgccaagagtcagtgatcttctgaacactcatcctttagttggcgcgctgcctgctgctgtacgtgatactttgctaagcaatacgaaggaaaccctgcgagggcagggcacaacgctgtatagagaaggatccaggccaaccggtatctggcttgtttctattggtgtagtgaagtggacaagtcagagattaagcagaaggcattccttggatccaattttatcgcatgggagcactctgggtctgtatgaggtgctgattggaaagccatatatctgtgacatgaccacaggttctctggtacacgctttctcacgcgtccgtgaaaagatagaagagctgctccattcagatccttcgattgagattttcctgtggcaggaaagtgctctggtgcttgccaggcttttggtccctcatagattcgagaaaatgggaatgcatgagatgagggttctggttgctgaaaggtcgacgatgaacatatacatcaagggagaagacttggaagtggagcagaattgcattggcattttgctggaagggttcttgaagatcgagaacctgactctcatcacgcccccagcgttgcttctgccatggaatgctgacttgagcttattcggtctcgagtcctcagactactgccatactgcacgcaggtatcaggtggaagccagagcgcggatcatcttcttcgacgaggcagaggccgcccatcttcatgttcagacaagtgcgtcgctgccccaaggtgagccagcacggagcatgagcaaggagcacagcggcttgctcagctggcccgagagcttccggaggtctcgtggcagcctaggcttagcagctgagatgctgccgggcggcttgtcttccagggccctgcaactgagcatgtacgggggcagcgtggtgagcctctcctccggccagcagggtcaccggcggcagaggccacgtcatcgcgtgcaggcggccacgacgatgacaaaccagaagaagcacagctcttcctaccccaggatgccatccatatccaaggagcggcatctgctctccgtgcagtcggagggctccaacatgaagagagtggcagctctacctgaggttgctgccaccgctcctgctccggcaggggcagcacaggggcagcggagggctatgaacttgcaggaggaatacaactcgagcgaagactccgccggcgaagaagtcatcgtcagagttgactcgcccagcatgctctctttccgtgagtccaccgccgtgcctccgccccaggagcagtagctggatgcctggatgtggtcttctcttctcgtgtattgtattgtactgtatgtattgtatcagggaagctttggcgcagtggtgtggtgtggtgtggtgtggtgtggtaaacaaaataaataaaacacatttccgcgttccatattttctcttcatgatcaccgaat

SEQ ID NO: 40240 - DNA, 959 bp, Zea mays
  Clone ID: MRT4577_136703C.1
gaatcgaagagctcggtctaagctgctgcgatatggtgacagacagaggacttggtttccttgcggcgggatgccctaatctcaagaaactcgacttattgcaatgcacccggctgaccgatcaaggtctcatcaatcttgcaagtggctgtcacaaactcgaagaggtcattctttacgagtgcgaagaagtcggtgatgagggtttgatggctctctgtgagaactgccccaatctccaagctcttatgctttcaaacacttcgattacggacagaaccttgagacacattgctgcttactgcaagaaccttcgagtgcttcacttatctcgatgcgcagtctcttctgctggaatcgcagagatatctttggagtgtccaaacttgcaaactcttgtcgccaactcttgcaagaacgtggatgacacagcgttggaaaagctttctcgtggatgcaagcagctcaacgttcttcacttgagtggatgcccagtcaccgatacgggtatcaagaaagtatctcgcgagtgcaaggctattcaagtcttgaacctcaatggatgtgctcgcttgactgatgaaagcattcaatccatcgctttgggatgccctcaactgcacacaatcacgttgaacaacattgagaacatcaccgatacttcgttcgaagtcctcatcaacacttgcaaggacctccaaaaggttcatatcatgagttgcccaaacatcacatctcaggaagttcaagctgttcaacagaaatcaccaaagctgtacattcagtctcaatacaacctttcaccagtggcgccttctctgatgaagtgaagttgagagtgggatagaagaaagaaagaagaaagaagaaagaagaaagaagaaagaagaaagaagaagaaaaaaaaaaaaaacagatagcctgtacaataaaacaaaaccttgtagattataaagatt

SEQ ID NO: 40241 - DNA, 568 bp, Zea mays
  unsure (1)..(568): unsure at all n locations
  Clone ID: MRT4577_136704C.1
tttttcttttttttgctcggaacgcacacacagcccggnccccgatctccgatccccgcggcganccaagangcagancnncgncaagacncncacgggaaagacancacccncgagggggagnccncngacaccanngacaacgncaaggccaaganccaggacaaggaaggcanncccccggaccagcagcggcncaacnncgcgggcaagcagcncgaggacgggcgcacacnnngccgacnacaacanccagaaggagagcacccnccaccnngnncnccgccncaggggaggcangcagancnncgncaagacccncacnggaaagacnancacccncgaggnggagncnncngacaccancgacaacgncaaggccaaganccaggacaaggagggcancccnccggaccagcagcggcncaaaanngcgggcaagcagcncgaggacgggcgcacgcnggccgacnacaacanncagaaggagagcacccnccacnnggngnngcgncncaggggcggcaggcagancnncgngaagacccngacnggcaagacnancacc

SEQ ID NO: 40242 - DNA, 350 bp, Zea mays
  unsure (1)..(350): unsure at all n locations
  Clone ID: MRT4577_136705C.1
ttttggcttttaatcagcaaagacagncaagggagggtgatcaatcattagtttgacattgactaccacacaaaggtctagcactactactctagcagcaatactcctgaatttcctgatccgaactcacctaattgacatactgaaaaaagactttcgaaagctttacattctcaaaaatatccaactttatcagcctacaatctattccacccttaaatatataatagatctaaatagagtaccacactaaagaaatgtagagcacttacctgacctagaacactctcactatagatattaaacccaccatctatacttttttaacgaatatacaacgtatccactca

SEQ ID NO: 40243 - DNA, 473 bp, Zea mays
  unsure (1)..(473): unsure at all n locations
  Clone ID: MRT4577_136706C.1
ccccgcgtccgcttgcgcccggggggggggggggggtggttttcttctcgcgttggggcgtctctgtgcggcccgcgtctttcccctccttttgctccttgctctctctccctgtgctgcttgcccggccgtgttgccctttttgctttcgcgctcctctngctcccctttttgggtggggtggcggtccgtcccttgtggctcgcctgtgtgttttgcgcgggtgtgcggccgtctccgcttcggcttgctctcgcggcccgctccatgcctttctcgccctggttgcttcggctgtcgccggccctgtctttggtgctgtcgttggttctgtccgtccgggcgctgctgctgctgctcctcgcgcttccttcgttcgtcctcgtggctttggcttgcttttctgccttctctcgtgtgcgcgcgtctcttcccttccgccgcctgttgtctgtgggccctgctggttgttt

SEQ ID NO: 40244 - DNA, 314 bp, Zea mays
  Clone ID: MRT4577_136707C.1
atttcatgtaatttctctctattgttcttgatctgttcaaccatttttgaattttattcagctatttttgtttatttttttcagacatttcagttttttcagctattcgtgttagttcagacattccatagttagccatctcgactggtgccagccaccttgttttttgttcagcaatttgtgatttttggttcagtcatttctaattttgttcagtcattcgcgtttgttatccatttcatgtaatttctctcagttgttcttgatctgttcagccatttactatttttattcagctatttttgtttgttttg

SEQ ID NO: 40245 - DNA, 436 bp, Zea mays
  Clone ID: MRT4577_136708C.1
taccgaataagaattgacatgccatcgcgtgtgaactattattaacaataaaaaagtttcctcttattatcaaaaaaaaaaaaaaaaaaaaaaaaaaaaaaaaaataaaaataaaaaaaataaaattaaaaaaaaaaaaaaaaaaaaaaaaaaaaaaaagggaaacctgcccgggcggccccttcaaaagggcaaatttaaaaaaactgaatgccataaaaatgggatccgaacttagaaaaaaccttggcgaaaaaaaggtaaaaaaaattacctgtaaaaaatttttatccgttaaaaatttcacacaaaaaaaaaccccaaaacaaaaaatgtaaaaccttaagggcctaaaaagggagctaaaaaaaaataaattaattgaactaaatgcccgttttccaaatggaaaaattttagtgccaaaagcattaat

SEQ ID NO: 40246 - DNA, 108 bp, Zea mays
  Clone ID: MRT4577_136709C.1
gttttgatctatcatatcctttggtaaaaactgcaaatctctcagcagtttcagtacagactcgaaaaggggaaagatttgcagttttgatctatcatatcctttggt

SEQ ID NO: 40247 - DNA, 314 bp, Zea mays
  Clone ID: MRT4577_13670C.1
gaaaagagggacgcaggggggggcttaaaagggaaaaccggatacatccagacaacaagacctgcgagctgagatggctcaggggaaggacgctacaggaccgagcacgacgaaggacgatgcggagcacgggctcgcccgagatggcaaaggcgagagagggcaggcgtgcgaatgacaagggcaggacaaacggaggcgagctggagaagaagaggacggaccgccaactaacggtaaagatggacaacaaggccagggagatggtaggggacgacgccggggagcgcgctaccagatacaaggagtccaga

SEQ ID NO: 40248 - DNA, 442 bp, Zea mays
  Clone ID: MRT4577_136710C.1
tacgtaagctcggaattcggctcgtggtcttcaccaccggggggttgcccggccggccgtctctagtgactaccgggggccattacacggtcctgcgggtgctgacacgcaagccagcagctcagcggccagcttcaccacctgctggaggtgcgaacagctaaaactacatctgaagctagaccccacggtggtaccagccgtgctgaccaagaacatcgcgggacgcgggcaggttgcaaggattcgatccgacacggatggcaactgtacatgcagggctagattgcactacacaaccgagcagagaagatgcatggaaatggtgcgcgagcgcttgtatatctatgcccatggcgcccgcccgcttcaattgtccagtgccaggaaccatgcaggaccatgcatgctgggacgcgcctgcaaaatcaaagggttcacc

SEQ ID NO: 40249 - DNA, 183 bp, Zea mays
  unsure (1)..(183): unsure at all n locations
  Clone ID: MRT4577_136711C.1
aataaaattgtgatgtcttatggtttagaataaagtgagtatacaataatgaaatggtacatgcacaatgtggccaggctaaatcttatcgagttcgtcgtgcctgatctctgccgcctggttttaaaatggaggtatgtttaggttccttactatcnatcaagccttgattntctngttttc

SEQ ID NO: 40250 - DNA, 1624 bp, Zea mays
  Clone ID: MRT4577_136712C.1
gggtcctgagttgctgcctgcccgggcgcgtctccgccctgacagcctcccgccgccgacacccacctctcccccgtcggcacatgtgtagttgccacttcgctttcccgttctctctcaccttacctcacactcctctccatcgattaatctcctccccctcaacaaccgcgagatcttcagctaccgctctctccggtcgcgtttgcatccgcattcctcagatccagattcgagccccagccccgcttcgagatccagctagctctctatcaagcatccggcggagcgagcagcggggggctcggcgagagagaagatgaagcggaagacgcggaacaagatcatcgtatggacgctggccctggctgcagtggcgattctggtgggcggcacgattgcgctggtgctcacggcggggacgtggaaggccaagataaagaagtcgcaggagaagatctgtaacaaggggtgggagtgctcggggagcaagtactgctgcaacgacaccatcaccgacttcttcaaggtgtaccagttcgagaacctcttcgccaagcgcaacacccccgtcgcgcacgccgtcgggttctgggactaccaggccttcatcaccgccgcggccctcttcgagccccaggggttctgcaccaccggcggcaagcagatgcagatgatggagctctgcgccttcctcgggcacgtcggcgccaagacttcatgtgggtacggcgtggcgaccggcgggccgacggcgtgggggctgtgctacaaccacgagatgagccccgaccagacctactgcgacaagacctacacccagtacccctgcgtcgagggcgccgagtactacggccgaggcgcgattcctgtctactggaactacaactacggcgctgccggtgacgggatcaaggcggatctgctccaccacccagagtacctggagcagaacgcgacgctggcattcatggcggcgatgtggcggtggatgacgccgatcaagaagagccagccgtcggcgcacgacgccttcgtgggcaactggaagcccaccaagaacgacacgctcagcaaacgcctgcctgggttcggcgccaccatgaacatactctacggcgagtcgatctgcggcaagggatacgtcgacgccatgaacgttataatctcgcactaccagtattaccttgacctcatgggcgtcggccgtgagcactctggcgacaaccgtgattgcgccgagcaggcaccgttcaacccctccagcccgacggatgaccagaagcagcagcaatcaggaagctaagacggactcattgcgccattgccactgatcaagcttccacagcgctagattgagctacagattcttcaggatgcgtgaagctgcatgcatcgtgttgatgttgttttgaatagactgtatgtactgtctatgtgaattgcgagatttgtggttatttactaccatgttgtccatagatagtctgttttggtttctttggttctgtcagatacgttatacacatgtttaaagagaactgaacataccaggaccctttttccgcttgaaaaaaaaaaaaaaaaaaaaaaaaaaaaaaaaaaaaaaaaaaaaaaaaaaaaa

SEQ ID NO: 40251 - DNA, 571 bp, Zea mays
  Clone ID: MRT4577_136713C.1
tcgcccttttttttttttttttttttgggggggggggggtttttttttttttttttttttttttttttttttttttttttttttttctaaaacgggggggcaaaaccctgctttgctttgctttgaatctggtttatttgggggagctgggggggccctggggtctaaaccagggggggggtgcggggccacccacaccaaacacggggggggaccacaaaccggtttttttgtttggaaaaacagcatctcccgtggggcatggggtcgcatcgcccagggcccaaccaagacgacagaacccctcccgttttccaaaaacaccccgggccgggcgtaacaaaacgcccccccccggggcaacaacccctttcgccaaacaaaccccggcccccaccggccttttttttcgccttcactcagggccgggactgtttgtcatccgagacccccccaggcaaggcttaccggggtgagggagcgggggcccttcaggcccggcctttggtgggggccaggtgccccgccctgaggtccgcggggtcgggggggggggcggcccctttggggg

SEQ ID NO: 40252 - DNA, 1554 bp, Zea mays
  Clone ID: MRT4577_136714C.1
gcgggggtcgagttcgcatccgcattcctcagatccagattcaagccccagccccgcttcgagatccagctagctctctatcaagcatccggcggagcgagcagcgggaggctcggcaagagagaagatgaagcggaagacgcggaacaagatcatcgtatggacgctggccctggctgcagtggcgattctggtgggcggcacgattgcgctggtgctcacggcggggacgtggaaggccaagataaagaagtcgcaggagaagatctgtaacaaggggtgggagtgctcggggagcaagtactgctgcaacgacaccatcaccgacttcttcaaggtgtaccagttcgagaacctcttcgccaagcgcaacacccccgtcgcgcacgccgtcgggttctgggactaccaggccttcatcaccgccgcggccctcttcgagccccaggggttctgcaccaccggcggcaagcagatgcagatgatggagctctgcgccttcctcgggcacgtcggcgccaagacttcatgtaacatccttgctccctctctggtgcttgggctgcaggaggaaccgattgactgactagcggctacgaaactgattgcaggtgggtacggcgtggcgaccggcgggccgacggcgtgggggctgtgctacaaccacgagatgagccccgaccagacctactgcgacaagacctacacccagtacccctgcgtcgagggcgccgagtactacggccgaggcgcgattcctgtctactggtaatgctggccgctgaatcaattcgaaagttggagagcagtagagattagcaaccaagccctgaatctctctctggtcgggcacttctttcaggaactacaactacggcgctgccggtgacgggatcaaggcggatctgctccaccacccagagtacctggagcagaacgcgacgctggcattcatggcggcgatgtggcggtggatgacgccgatcaagaagagccagccgtcggcgcacgacgccttcgtgggcaactggaagcccaccaagaacgacacgctcagcaaacgcctgcctgggttcggcgccaccatgaacatactctacggcgagtcgatctgcggcaagggatacgtcgacgccatgaacgttataatctcgcactaccagtattaccttgatctcatgggcgtcggccgtgagcactctggcgacaaccgtgattgcgccgagcaggcaccgttcaacccctccagcccgacggatgaccagaagcagcagcaatcaggaagctaagacggactcattgcgccattgccactgatcaagcttccacagcgctagattgagctacagattcttcaggatgcgtgaagctgcatgcatcgtgttgatgttgttttgaatagactgtatgtactgtctatgtgaattgcgagatttgtggttatttactaccatgttgtccatagatagtctgttttggtttctttggttctgtcagatacgttatacacatgtttaaagagaactgaacataccaggaccctttttccgcttg

SEQ ID NO: 40253 - DNA, 283 bp, Zea mays
  Clone ID: MRT4577_136715C.1
ccactacgccagagctgagccttctatttaaaccgatgagataccgatattaaatcaatatataaccattcaaagcgtgcatatttccatgcatcagcagacactatctcaagtcccccacaaagatcagcaacacgggctagtgctaacgatttgtgatcaacagaaataagcacttccatttttgctcctaagttaactttcgaatcgcgcatggggaagagaccccagtcgggcggagtaaccgagcgcggtacacccgaaaccgatccatttcttgagg

SEQ ID NO: 40254 - DNA, 283 bp, Zea mays
  unsure (1)..(283): unsure at all n locations
  Clone ID: MRT4577_136716C.1
tcctgttttcccccactgcccacgctagccaagtccaggttctgaggttcacaaatcacaaccctagttggcggcgctcagatccggtggcatcctcctcccgcgaccctgtagctgcctccgacgacgaccttgtagcggcacagtgtggcggcgatcgagcaatactgaagttaaagaagcagcagaaccatggnctcccgtatcttgggacagggggacagtgagtcttaggaggaggacgcggcagaacttgagtcagaacatggcagtgatagtgatg

SEQ ID NO: 40255 - DNA, 562 bp, Zea mays
  Clone ID: MRT4577_136717C.1
ggggtttttggtggtttttttttttttttttttttttttttttttttttttttttttttttttttttttttttttttttttttggggggaaagcagttattcaaaaaccacaaaaaacttgggcaaatcgcttacaaaagataatcaaatagggggggggaacaagacaaaactgggtcggggaacccacattgcctcaccccagccgactacaccatttttcttaaaaaaaagcaaaaaggtccttccctccccctcaggtcaagcgataaccataaggaaacccgctacccgactgcgtatataaaaaagcaaatgcacgcaaaaaataaccgacaggccaggggagcgaacttaatagcacaaaacggcccaagggagccccaaaccgggtgctggctgcccaaaacccggagggggcaagcttgtagggaccctcaatcgggaccctgatgtaacccccccaaaacttggggagcttgggaaacttggccccaaacttgcccaaggggaaaacaacaaccctctaaaaaaggggcttgggggacaaatacaccttttt

SEQ ID NO: 40256 - DNA, 804 bp, Zea mays
  unsure (1)..(804): unsure at all n locations
  Clone ID: MRT4577_136718C.1
cgggaatcccccaaagcagctccccccagtcccagctcgctccacactggccagcccgcagcccctggcacgctagcttgctctagctataagctagcagggcctcccgcgtggcattgcctcgtcccggccgccggcgaggggatccagcttggctaataagggcaaggcgggcggcgagcgagctagcgatggacgcggcggtggggctgccggatgcgtggtcgcaggtgcgggcgccggtgatcgtgccgctgctgaagctggcggtggcggtgtgcctgctgatgtcggtgctgctgttcctggagcggctctacatggcggtggtcatcgtcggggtgaagctgctcggccgccggccggagcgccggtacaaatgcgaccccatctgcgaggacgacgaccccgagctcggcagcgccgccttccccatcgtgctcgtccagatccccatgttcaacgagcgggaggtgtatcagctgtcgatcggcgcggtgtgcgggctgtcgtggccgtcggatcggctgggtggtgcaggtgctggacgactccacggaccccctcatcaaggaaatgggttcggatggagtgcgagcggtgggcgcacaaggggatcaacatcacgtaccagatccgggaggaccgcaaggggtacaaggccggcgcgctcaagggcgggatgaagcacgggtacgtgcgcgagtgcgagtacatggtcatcttcgacgccgacttccagccggaccccgacttcctgcaccgcaccatcccctacctcacnnacaacccggagatcgccct

SEQ ID NO: 40257 - DNA, 278 bp, Zea mays
  unsure (1)..(278): unsure at all n locations
  Clone ID: MRT4577_136719C.1
agtcctacgctgccgggcggagaattcattaataacgcagcnatatacctagagatcgtattcacgcatgtccactgctaatcctcctctcttctgccgaatgaccgctggcggcgcccccgttttccggatcgtgatgaagcgggacgccgacgaggtgcccaataccgcgttagaacttccgagcgctgtgcactgataagaaaggcgagggctagtcccacaatgccatcgactaccacgaatgccccctcttgctgttaagcccccaacacctg

SEQ ID NO: 40258 - DNA, 390 bp, Zea mays
  Clone ID: MRT4577_13671C.1
acccaccgtccggcgaaaaaagggtgtctccactacacctgtgtatcctcctgtttttcgcgagctgctggagctgctgctttttccgcatcgggcaatagcctctgccgccgtgagtttccgtgtccgcgaccgcatgctggagtcagcctgagcaaaggtgtgttatgcagagcgtgattatgacgctgttttgcactgaagtctaaagagtaagtaagataggtgtcagataggaaggctgctgaatggactctaaattgtacactataaaatttatatggtgtttggtttgtttcattcaaatttaggtggtcatcatgagttcatttcttaaatatggtgtgatgactcaattctttatattagtactaactggtgtgatgactc

SEQ ID NO: 40259 - DNA, 357 bp, Zea mays
  Clone ID: MRT4577_136720C.1
cacactcttccgctagcatcattgaatttacaaatgtataccatcattcacaggcatgatataccacatcattatcctcttaggctacctctcaacctcagcaatcgtatcaaaactactacatctctcacactctcctatatcctactttcaatcttaatacctcataataacattgacattctgtgtgtcaacactcatatgatcactcttacaagctccaacaagcacatctaaaatcgcatcttataattatcaaaccagttctcaaagcatccattaactctattactataaatacctttcgaccatacttactatcaaatcatcaagctaccacaactacaacaacttata

SEQ ID NO: 40260 - DNA, 273 bp, Zea mays
  Clone ID: MRT4577_136721C.1
agaggagaggaaaacgtatatgtcctcacaaaagagaaacagggagccgtagatgctcgaacatacctataccactggtatgaagagaaacggtcccaagtacagctctgagacatgcatattgccgtatgcggtgtctgtggccatgttgctgctagcgtggactaatagacgagccaggctgggtacatacatttacatcagcggtgggatgtatcaggcataaaaaactatgggacgagaggaccgaacgtaagtttgtgcaaggggctt

SEQ ID NO: 40261 - DNA, 626 bp, Zea mays
  Clone ID: MRT4577_136722C.1
aaaaatactcaaacacacggaagaccccctccattccctctcgcttctctcccactgcgcgtcctacccgccgcgctccacgacctcctcagctaaagcgtgagatcctgcatacaaacaacagatcaaatcggtgatcaacatcaccgccaacaccacctcacctgccaagatctcatgcgctgatctccactctgactttccatctgcctttgatccaaatgctgaggactctgctgatgactctggagactgatcctgaaacgaatgagcatgtgcatgagcgcatccagcaaaacaacctgacaacaagcctgactacaaacaaagagctcaacaataacaacatctacaacgatatcctcaaggaactctacaacgaagtcacctgcaatgatacatgcagatctagacccagacatacgcctccacagtcatctccaaaggaatcatcctactaatgtagctactgttctaattccggctgagaatgccatcaaaaatcacatcatcattcgcgacctgctaatgcacctgaccatagattgtgagccatcacgtatgcctccacatattagcatagacaggaacaacgacaggcactattcaatgctaacttatataag

SEQ ID NO: 40262 - DNA, 271 bp, Zea mays
  Clone ID: MRT4577_136723C.1
cttgattgccggttaaacgcatcagggggaggggaaaaccccgcaccaaaaatcaaatgttaacagtacaacccaatataagtacaacgaatgaaacccggtttcccaaaaaaacccaagtaaggaaatgttttccacatggggcctactaccaagaggcacaacaactgggttttgggctaaaaaagcccctaaaataacagaggccaccaaagaggccacctgcaaaattagaaaccagccgttccggaagacctggtaaacaattgct

SEQ ID NO: 40263 - DNA, 323 bp, Zea mays
  Clone ID: MRT4577_136724C.1
tttcgagcaagaaggtgtttggatatacagacaagagacggggagaggtttaagtactgcggaggaccttattacatgacggataggccgtcgaaattggaaagctaaatgtaaagtcaatatgtttttttaggagaggcgagcgtacggtacaacacacgggtgtacgtatgcttgcgctcacgtgcgcacaggtgctccccggatcggactctctatgtggtgtacaaacccaaactacaaacctgtgacgcaccattcagtatcttacatacattacagtttgaatgatggcccaacgtatgattatcggactttttgtt

SEQ ID NO: 40264 - DNA, 578 bp, Zea mays
  unsure (1)..(578): unsure at all n locations
  Clone ID: MRT4577_136725C.1
cggnagcgtgggttttttttttttttttttttttttttttttttttttgcgtgcagatcagttgcccacacaagaaccttgtcttagaaattaaaggtttcagtaacgacgattgtacacaaccagattctcaaggatcattcacggcctcacccgtctctctctctctctctctctctaccaccgcaacactagaagctgaatcctcagtggcctccagctccatgtcgcctccatgtaaccgcgttcggagctgcgctttccgctcgcttttcctcgctctccacctcgctgcaagatcttgagacgcctccttccttgggcggtcgcccatgtctactactaaacccaaaccagacgccatgtttccatcggcctcctcaacaccagacggcctcctcctcgtcctcgtcctcgtcctcgcggacagcacgagaggccggacccagcaaacagcgaggacggcgtacacggaggaggacacccacacgcatagcgtccacctgaacccgcgcgccaggctcttcgcccacggaagcgccgtctgcacgaccacctttgccctgtacacctggggc

SEQ ID NO: 40265 - DNA, 625 bp, Zea mays
  unsure (1)..(625): unsure at all n locations
  Clone ID: MRT4577_136726C.1
tagagtagtatagaaacacccttaattaaaattagttgataccaccagataccgacgattgtacacaaccagattctcaaggatcattcacggcctcaccaggctctttctctctctctaccaccgcaacactagaagctgaatcctcagtggcctccagctccatgccgcctccatgtaaccgcgttcggagctgcgctttccgctcgcttctcctcgctctccacctcgctgcaagacaatcagacgcctccttccttgggcggtcgcccatgtctactaaacccaaaccagaagccaagtttccatcggcctcctgaacaccagacggcctcctcctcgcggacagcacgagaggccggacccagcaaacagcgaggacggcgtacacggaggaggacacccacacgcagagcgtccacctgaacccgcgcgccgggctcttcgcccacggaagcgccgtctgcacgaccacctctgccctgtacacctggggcaggctcaccgtcgcggctctcggctgcagcagcactctgatggcccctgttctcctgtgccggccggcccttcctgactgcagcaccctgaggctgcggnctgggcctgctgcgcatgccagaggagc

SEQ ID NO: 40266 - DNA, 256 bp, Zea mays
  Clone ID: MRT4577_136727C.1
cttctcgccgcagttgtgggacctcatcaccaccactgcctggttccgcgaccactggtcccgcgatcgcgcccaccgtggacgagatggccgagcagatcgacgcggcctgcctcctccccgacgacgatgaccgcttctactacgaccagctcgagcaggggcccgtcgccgccgcccttaggacagattcggtgctcaaggcgctgaacatgacctccccgaacgctatcggcgacgcccgcgggggttccgg

SEQ ID NO: 40267 - DNA, 330 bp, Zea mays
  Clone ID: MRT4577_136728C.1
gtacctgtacctacgtgctgccgggggggggggggggggggggagctacacgtctcctctcgccatggacgccggtgtagagaagtgcggcgacgcggcggcggagggcggcggcgacctctacgctgtcctcgggctcaagaaggagtgctccgacgccgacctcaaggtcgcttaccgtaagctcgccaagaaatggcacccggacaaatgctcctcctcctccatcagcgtgaagcacatggtggaagccaacgagaagttccctgagatccagggcgcctattcggtactctcctacgccaatatgcggctcctctacgatgtggg

SEQ ID NO: 40268 - DNA, 298 bp, Zea mays
  Clone ID: MRT4577_136729C.1
acccaagtctgatcttcctaacaggtctcaacataatgtgttgggtaggaattctctgacatggtacttgatttacatacgtggcttgtctcacatcatgctctcgccgtgccgaaccatggagtctattgagggtatctgtacccagtcacacggctgaatatctttttcaacgaaggactggtatgacacatgtacatctcctggtcatcaactgctagtggtgtttattggtgtggatgagccgccgccgtcgtgcctacaggtgctggtcaacggccacgaccctggactttgc

SEQ ID NO: 40269 - DNA, 834 bp, Zea mays
  unsure (1)..(834): unsure at all n locations
  Clone ID: MRT4577_13672C.1
ccacgcggatgagcggatccctccctagcctaaacccctcgcgccgccgccggcctacgccgccgcagcctcctcccatgtcccgccgccccgcctgttccctcctccctctgctccgaagccgccgctgcctttacgacgccaccaccgctaggcccttcacctccgtctctgtcccacccgacgtgatctcctccacctggccgccgcactccccgtcgcctcttcatcctccgcccgatccggccgggacgtggtgctcagcctcttgttcttctacctcgccggcgctcccgccctttaccgcatcccatctccgagccgccgtctccttgctcgccacctcgctcaccgcgctcccggggcctgacccggacccggtgtccgccctccacgaccactccttccctaccctcctcgccgtctcgccgctcgcgtcacttgagctcctctcgctgctccggtccaggcctcggttagggctcgctgtattctcattccgccgtgtgctctccccggtgccctctatcagtgagtttgccctcgccatctcgctcgcgggccgcgccggagaccatgacgcggcggccgcgctctttgccgacggcaccgctattcattcccctaacctagggctttacaacgctcttatgtcggcatacatgcacagcggcctccttgaaaacctgcatcgaggtcttcacgcgctggaggcgtttcccaggtgcgttccgcctaacgtggactcgtacacatcctcttcncgccctgttcggtcgtttccatcctcgntgaccacatggagcgccggctccagtcngctggacgcttctg

SEQ ID NO: 40270 - DNA, 594 bp, Zea mays
  Clone ID: MRT4577_136730C.1
cagtaaagcggcacacgagcctccggtgctccctctctatctgtcctcactcactcactcactcggtcactccacagcttaattgctcccatttctcctccgcggtttggagcctgcttcctctctcgctgctcctttggaagccccaagcccgccagggcgcctgcaaggagagacgacgacagcaatgccggtggtggacaagggaggcgaggccgccgagttgcccccggacatccgtgggctcggcgtcggcggggagaccagcaggccgtcgcaactccacggtggttctggctcgccaccgatgtagtccaatccaaggcgtccaccaccgccaagcgccgccgcgagacttggggctccaagtcggtgcgcgcgtcgtggaggtggtgtggatgcggcggtgcgtggaggtggaaggacaaggatgccatggtcagtcgcaagcgaagcgagcagggagggaatgaagccgtacggtccgggagctgctgtcgtcgtatacatgcatgcataaatacatatatatattttttcgtgtaccagtaattgggtaactggttaattgttagcaacggtccatttgaggct

SEQ ID NO: 40271 - DNA, 295 bp, Zea mays
  Clone ID: MRT4577_136731C.1
acacgcttcatgtatatgaactggaatccacatacttctctcatacatcagtctatctctggctaccttcctttgccttcatgtcctgtggctatcatctgacttcaaaccatgaggggggatatgttgtactatacactctgatcggggcatggttcactgtctccgtagattctttcattcagactgggcacttcttctccccgcatgatgttatctccccatcattcttctctacaccatcttcgggaccagaaccagttgcacctcgtgtgcccactaactaatcttacac

SEQ ID NO: 40272 - DNA, 210 bp, Zea mays
  Clone ID: MRT4577_136732C.1
attataattcaggtacagcacacaatgactttgtagatactgttactgccaatacattttcttctaatgatatgcgggcgtcagaggtcacagccaactctggtagtggtgcaatttattctggtattgttcaacaagatgatgataataagaagtcagatccactgatgaaagtcgaggcgcttcaaatcaagtttctgcggttagtat

SEQ ID NO: 40273 - DNA, 311 bp, Zea mays
  unsure (1)..(311): unsure at all n locations
  Clone ID: MRT4577_136733C.1
ctatatggaaagctggtgcgcctccagatacccctacccgagttcccgggggcacccacggcgtgcgggcttcaaaccattacctttatctactccatagcgcagaaaaacccgatccacaccatgagggggtggctcttggccctctctctcctggctctccctgcgagcgccacctgcacgcatacaagcggggggtgcggctgccagccaccgcgccgtacgncgcatctacccgcggcggtgcatctgccacctccgggacacctgccacctccggggcctctcccaccggcgggccacctgccccc

SEQ ID NO: 40274 - DNA, 148 bp, Zea mays
  Clone ID: MRT4577_136734C.1
cacgcgtaagattttttttttttgtttttcgagcacaatctgctgttaggtacatatgatgcaaaggttgtcgattaagaagcgtatacagctggtgataacgttgcgacatccagacagcgtgtaggatgcctatcaggcgaaacat

SEQ ID NO: 40275 - DNA, 338 bp, Zea mays
  Clone ID: MRT4577_136735C.1
gcggtgggttatggccacatggtctttgagctcagcgagctgcccacaccgggagtctaggtcaggaggaagctctatggctggagctacgacacccaaaacccgtctgggtctgatgactgcactatgatacttcgtcaggtacttgaatttctttatcggagtgatgagctgaacaccactatcaacgcatcgcactgtggctaagtctttacacacacatagagaagcttcaaacttaaataggcagattccagttattgcactcttgactcctactgttgtcaaatggaaatatcagtgcgctggacattcttttcatcgtacggagagaatta

SEQ ID NO: 40276 - DNA, 611 bp, Zea mays
  Clone ID: MRT4577_136736C.1
attgacacatgtctctctctagacggcggtgcgactctctccaagaacgaggacgatccacacgcatgtcactctcgatgacgatggaggccgtcgcggttgtgcgcctggtcttagctcctgctcccttagacggagagcatcgagtggcacggaggaccagtggcaggttccagaggcccgacgtcaaagccttccttcagaccgcctcttcgacggccgcgttgacccctctggggtcgtgatgacacctagggcactccgacccctcgtggtacacgcgcgagtagaggtcacgacatctctctgctatcctgtgttactacacgcgcggtcccgagcaatgtccgacctcccacacctggtcactacatctccgacaggtaccttcttctgaattcggagtacagaggagctcacgatgcaatgatcgagaatcccatcccttccccttcatgatgtacatgtgtggtggtacttgaatgctactgttccataaaaatatgcagatttctgtctctagaaataactgtgtgaacggttggatgctaccattgcaatctcgcgcaggggtacataaacatttgcttctggggagcataataataaca

SEQ ID NO: 40277 - DNA, 595 bp, Zea mays
  Clone ID: MRT4577_136737C.1
ctatatagcgttgccgtcgctgtagactcctccttttcgatcccttcaaaagcggcgccgtccccgcatcgaacatgcctccgaagaaggataaggccccgcccctgtcgacgaagcccgccaagaccgatggtggcgagcacaagaagaagaatcgcagcacggcaacgctaacggagaaggtggacaacgctgcgctgctcgaccacgatacctacgaccaggtgctctctgaggtgcccaagtgacgagcagataaccccctccatcctatccgagcgactcacgatcaatggctccctggctcggagagctatcaaggaactgatggtgcgtggtgctcgatccgcgaggactcggatcactccatccagcacatctacaccaaggcaacaaatactctaaagatgggattaccttgcttgccctctctgtaggagcatcgtcttcgttagaagagctggcatctctgtctagagtttgctaatgatatgtcagatgagtgtagattggattgcctattataccttatctgacctcaatagacctttttacatggcaaatctgacgtgacacatctgatccgcgattatgc

SEQ ID NO: 40278 - DNA, 624 bp, Zea mays
  Clone ID: MRT4577_136738C.1
caacccggtggagatgactcgggcaagggtctcgcatttccggatgctgattgagaccttgctacagaaagacgatgcacgcgtgtggaatgtcttcactcgtgtcgctggccttccagagctcgaggtattgagggatggcattgtgatgttcatcaagcagcatgtgatcgccgaggcggggaaggacttggctagcaaattcaagattgcgaagaaggcgctcgacaatactgccggagttctgatgtaactctgcccttgtcgaacattctgggcatctccaagcgaaacaaagttattagaacattctgctggagtcctctgttctcgttttgcgtggtccttcaggggataaaccaaccaattctgtagagaacggttgtggtagattgatgccttgttattagaatgcttctccaagagacctttcatgggttttgaatgcttacccaaaaaaagggctttgatggtcatgaagatccttagaagtactctctgtttattgtttagctgcacatgaagatccttaggctatctgcactgccacatgaccattgcttcccccaaaaaaaaaaaacaaaaaaaaaagaaaatatttacatataaacaagggaagaaggg

SEQ ID NO: 40279 - DNA, 2242 bp, Zea mays
  Clone ID: MRT4577_136739C.1
aattcggcacgagggaaaaataaggagaaaaaggatgacacagtgatggaggaaccagatgacattgatgaagagaatggtcggaaaaagaagaaaaaaaagaagaaggatggtatggagaaggaggaactggttgatgtaggtgaagagaatggtcagaaaaggaaaaagaagaagaagatgaaggatgactcagagatggacgaaccagatgatgaaggtgttcacatggatgaagagaatgatggagcagtcctggaatctgaggatggagtgtctaatgtggttgaactgcccaaagaatcaaaagggaagtatgtacctccgagtctgcgtaatgcttccaattcagaatcagaagaaattgcccagatgcgtcgcagagacttctgaacagactttcagagtcaaatgtggagtccattactcaggaaattgccacactttttcgatctgttccacgaagtgatggctcccagataattggggatgaggttttggctagttgttcccgaggacctcgtggcaatgaacagtatgccgctgtctttgcagcctttgttgcaggtatggcatgtttggtcggtgttgacttcagtgccaagatccttgcatctattgctaagtcatttgaggatgagtattcaaaagaagatggtctatctttgagaaaccttaccttactcttctgctatttgtgcatatttggtgttacctcaagcgatcttgtgtatgatcttctgtcgattctgagcaagcgcttgacagagctagatgtctctacagtgttgaccatcctacagtgctgtggaatgaagctgcggggagatgatccatgtgctatgaaagattttgtccttagtattcagaactctgtgaatgatcttaaattgcactctggtgttggagcagacgggaagactgatatacgtagcagaagaatggaatttatgcttgaaaccatatgtgacattaagaacaataagaaaaggcctaaagaggatccttcacaccatactcgaataaaaaagtggcttcaaaagcttaaggcagaagatgtcctcttgcgtgggttaacatggagcaggcttttggaccctgataagaaagggcagtggtggttgtctggggatgttccatctacagtagctaagattgaagatgttgcagctgttataagcaaggatgttgcagagacaaaaaaacttcttcagcttgcagctgctcaacggatgaacactgacatacgaagagcaatcttttgtattataatgagtgctgaagactatgtagatgcttttgaaaagctcttgaggctgggcctttctgggaagcaggaccgagaaattataagggtcattgttgactgttgtctgcatgagaagatgttcaataagtattacacagtccttgcttccaagctatgcaaccatgagaaaaaccacaagttcagcttgcagtactgcatctgggaccattttaaggagctagataatatggagtcaagtagatccatgaaccttgcgaagctagttgcggagatgctgttgaacttcacgctctccctcgcaactttgaaggttgttaacctggccaacccggtggagatgactccggcaagggtctcgcatttccggatgctgtttgagaccttgctacagaaagacgatgcacgcgtgtggaatgtcttcactcgtgtcgctggccttccagagctcgaggtattgagggatggcattgtgatgttcatcaagcagcacgtgatcgccgaggactcagggaaggacttggctagcaaattcaagattgcgaagaaggcgctcgacaatactgccggagttctgatgtaactctgcccttgtcgaacattctgggcatctccaagtaaaacaaagttattagaacattctgctggagtcctctgttctcgttttgccttgttattagaatgcttctccaagagacctttcatgggttttgaatgcttacccaaaaaaaaaaggctttgatggtcatacattgtaccatttcttagaagtactctctgtttattgtttagctgcacatgaagatccttaggctatctgcactgccacatggtatctattgctccaaaagtgcgctgtaacaaatagagcaaaattgctccaggacgccaatcactacggcaccgtttgtttgggctttccaaaaaaaaaaaaaaaaaaaaaaaaaaaaagtactctgcgttgttaccactgct

SEQ ID NO: 40280 - DNA, 655 bp, Zea mays
  unsure (1)..(655): unsure at all n locations
  Clone ID: MRT4577_13673C.1
ggcgcaacacatgccattgattttcaactgtgtaaaacaaaacaagttgaagttttaacatggctatctgttttacatgaaggaaaacaaacaaaaatgccagagagactactaatttcagacataagagggactacacataggacatagccctccagcagcacagacccactcacctccctgtgctcaagtccttcaacgtttaggattggctgctacaaaatgcttggttgctcgttattgcgcccttcgcttgcaagccaaaaaggcaggacctccaccacaaccttctacaccagcttatcctcccggaagccattcaaaaaagcgaagcggagctttctctatcctctctgaaatgtgaaatccaccaacacgctgcacaaccctcactttaaagttagaggttagactcctaaggatgcaagttagagtcacctcgcaggagcttgcatttttggcctctatattgaacattacatttttttacaatttacaccttggccataaggatgcaagttagtatccattaagatattgaagttgataatatatttgagcaagcttttttgtcagctgtggcttcctgcacttcggtctcaggctaaggtaggtggctncgttgagggcagcgcacgaggccacgaggcctncg

SEQ ID NO: 40281 - DNA, 126 bp, Zea mays
  Clone ID: MRT4577_136740C.1
atctatactaggaaacacagagggctgacttgttgatgacactgcacatagacccgtatgacaacaatccttacctatagactgtcgtataggaatcctggggtattcagagcaataccgtgcaag

SEQ ID NO: 40282 - DNA, 376 bp, Zea mays
  unsure (1)..(376): unsure at all n locations
  Clone ID: MRT4577_136741C.1
aaaggamgtgaatttacccatacataaagggacaaaargatggtgnycaccggaggtgggcaggttawrgacawkgtgakcccccagggatgaagaaktcaggacaaagggttaagttacycagtgtttttgttggaraggyaaaaararaggttgyagtsatgagaagsaacatgtgggtcagstccagsatgaargtcaggaacagsatsaggrgggtsaacaarratgwcccagrcaatgggtgggaaggtrccaccaccacmacccaaggwttyagtaatgggtgtgsaccaaycaaagrggacascaragggagggttaaagsagccascaggdgataagrcaggagggtgaaagtcagcagsaacatgaa

SEQ ID NO: 40283 - DNA, 323 bp, Zea mays
  Clone ID: MRT4577_136742C.1
aacccgaaaacccagatttaaacttccattccaaaggctggatttataaccaggggggtttacaaagaaagggaccaccctaatgggggggccaaaaacgcccgggcacaaaagggggggtcaaaaaaaaaggcccagcaaaaggggaagggcatcaagctaaccaaaattttacattaccacccccccggaaatgggaagccccgggccagacaaaaagctagcggggggggtaagggccaggaacccaaccaaccctgaaactttctggggggggccaaatctccctaacgggaggggggacaagattttccggggcccgg

SEQ ID NO: 40284 - DNA, 362 bp, Zea mays
  Clone ID: MRT4577_136743C.1
aaatgggcagggtggtctgcgcggctcttcggaagtgccgcgtcgcggttcctggggacctgagcgagctgcacgagctggagcccgatcactacgccagcaggaagaggtttcgcgtgaacccgacgagctccatggggttcctgaacagggcagcggtgaaggtggcgggggaggaggaggtctccggcgggtggacgctgtgcacggtgactgaggtggaggagacggcggcggtggagagccggaggctgagcttcgcgagcaggagccacggcgccacggcaggcggcgagctgccgctgaccatcttcgtcctgctcccgcagttcgtgctgatgggcgccgccgacgcgttcctg

SEQ ID NO: 40285 - DNA, 144 bp, Zea mays
  Clone ID: MRT4577_136744C.1
ctctctctctttccttcagtgccttctgcctgtgttgagagtcccaagaagcactgagaattttgttgcatctacccttgagagtgaggggagctaggagctctctgggcgccattggccttttcttgctcgctctctcatcat

SEQ ID NO: 40286 - DNA, 293 bp, Zea mays
  unsure (1)..(293): unsure at all n locations
  Clone ID: MRT4577_136745C.1
ccctggagcagcctcctgttcttgccgttgagaaaagcntaatnctcgatgcttaaaagattttnttcttgataattnntattaaaaattcncccaaagaaggtgtttttttttgttgggggccgcaagcaggggctgatggggcattgtgcttttgacaggtccaacttggcgcccgcgctcgcgactgcncattgtgctgttnngaggtgcnggctcacccactgctgcctatggtanngtgttgctctgnaatnncggcagttcaaactncattggtgntggaaaaattg

SEQ ID NO: 40287 - DNA, 112 bp, Zea mays
  Clone ID: MRT4577_136746C.1
gcctcctcccctactcctggccgagacggggacagtcgcattctcattctgcggcgccaatcgataggggtcagcgagtggctgtgatgacgaccacctatgctcacaacat

SEQ ID NO: 40288 - DNA, 433 bp, Zea mays
  Clone ID: MRT4577_136747C.1
ccctactgagctcccttgctaggtacctcgttggggtcttttttaaagatatcggcggcatcagcacacgtgttgttactgacgctcacttcacatctgttgacactgcaatctatgccaatttttcatattcggagacttccaactctttggtctacccaaatcttgtgagctctccaaggacgcagaggatttatgcctaaaatttatgcgtctcctagacgctatctcaatatatacatgggaggtaggtctctgtccaacaatcctcgctccttgcgaacataagataccttaatgagggcggttcctgccaaaatcttcctcctagaaccaccacgatttccatggggagattctgccaaaaatatcctgcagctgatcaagatttcttttaaggggagggatttgccaaagtttattttgtgtgacg

SEQ ID NO: 40289 - DNA, 393 bp, Zea mays
  Clone ID: MRT4577_136748C.1
attcggctcgagggcgtgtgaaggacaacttttattctgatgggcccattttttacaatgttctggagcacaggcgtcaaatttcgtgagcacgatggccttttcctgatgcacaggagtatggcagaccgattgactcttacctagcgcatgagtgcagttgtcgtgaagatggccaaccttgttgaaggagaatttgtgtgtcaacagcattattatacagggcaagttgatggaacagttccttcaacggagatgcagattatagtggctaacaaaaaaaaggacaaaaatgttgacttgtccgcgtacttttgacttaaaatgaatcagcttgactgccccttaccacttatgaatgaagaacatggttttggccattgaaattaccaa

SEQ ID NO: 40290 - DNA, 355 bp, Zea mays
  Clone ID: MRT4577_136749C.1
gcaggcacgcctgcagggagctggtcctgacagtatatagccgggtcgtcgagctcttgtgtcggcggccgcccttgtttttttttggtggaggaccttagaccaacggaaatgtattcaggtgagtgaaagagcatgataccatgccgataccttcaattggagcacacttttaaaagcgttatggtagctgaggactgacttgtcccattcgaatcccaacgccaactcattttaatgatagcccatcgtcgactccttccgttacaagaacctcagtaccgatggtgatataaccgctcccggtgagacacgaacaacggctttctgttgagggaaatagcatagattaaaa

SEQ ID NO: 40291 - DNA, 389 bp, Zea mays
  Clone ID: MRT4577_13674C.1
atggggtcaaaatttattcagggcttaagagaaaaaaaatggccttcatcaaaggaacccctgggggggggggcccacactgcacttggtttggaatttgccttttttcccccccgctttattaaagggtgggtgtctcatttgttcccaacaaaccgctttaaaccatacaagggaactggcttaaaagagggagaccaaaaccaaaatggggaatcctgagcattgggtccctttgcttggtcaataccaaacttgggcttgaaggggtcctggggcttcatccacattatgtggccctacctgcagggcttttgcccataccacgaggaaggaggccccccaaaagcgctttttctttaccaggttggacaaatccaccccccccc

SEQ ID NO: 40292 - DNA, 598 bp, Zea mays
  Clone ID: MRT4577_136750C.1
ctcatgttatcattaacggatcagagggggtccaagaggggcctttcaactgtacaaataaaccggggaaatttttctgatttttacgtaccctcatgaatcactcacagagcaggggttcacaccaagaattaccctgaaaacagaaaaaataaaaattctgcaatcacaaaaggagggcttttttacaaaaaaaggaaaagagtaatgattcacgttaatgaaaaaaaacttaaaaaaatcgatttttttcaaaaactttacaagagcaacaaattaggaaacaaagtcttccttatggccctgtttggcacaacttattttcagcttcttcacaaatttaagcaaaagttctgccaaacatttagcttctgcagcagcttatcagttcagctgcttctcaaaatacactaaaagcagctaacaagcaaaagctgtttttcaccagcttataaaataagctgttttttcaacaagcagcagttgtgccaaacagggcctatatgtgaacaaagcaccggatggcttctcattagtacgtgaaagaaagccatgggccctgtagtgcttcatcggctgtgggtcttttcctggggtt

SEQ ID NO: 40293 - DNA, 218 bp, Zea mays
  Clone ID: MRT4577_136751C.1
ttttgtttttaccatacaagcttaagcagtgagggagttgggggtttatcatgaactgcaaaaactaaaaacaaaggacgaaaaagacaaagattaagcttgttgaacggaaacaaactcatcttggcaaacagacagcatcaaaggggcccactaaaaaagggagatatctcccacggctaaaccaggaggaaagatgattttcacgtaacgggcat

SEQ ID NO: 40294 - DNA, 177 bp, Zea mays
  Clone ID: MRT4577_136752C.1
attaaaccggctctctttttttttcaaaaaaaacgggaaacgatcccggacctaattcaacgcaaaccaactgggcctaatttagaaagttaccctttaataaaaaaatcccggccctccgggtcccaaatagtccaagccggttttggcgggcttagtgtggcctcttattgggcc

SEQ ID NO: 40295 - DNA, 670 bp, Zea mays
  Clone ID: MRT4577_136753C.1
aactcccataccctacactaccgtcgcggcgcggcggggcgcagcacacgaaggagcatccgatgatgatgtggttcctctagtccggccaggccggtatcctcttctactgccgcttcgcctccacgaaagcaattatcgtgtgcgggttctaggagaggacccgagaccgcacctatggtatgtgccttgtctcagggctcgcctagtacccaaagaaggtgatccgctaggactccgctcagaagactgcaaagaaatcaagcgtcgagtgcttcgtttagttcggctacttcactcacctcatgtcctgccgatacactatcgacttcaatttcaaggatgtcatcaccgcagcggccgacgcaatctctactctagacaagaaggtaaccgcctgcaatacgagaaaagcgcgccttgacgagaggataaagaccggaaagaacaggagagtctttaccttgctccgcttctatatgatcggcctccccaatagaactgctctagttgacgagttgatgtatcggatacactccatctctgctctggtattaccatgaatatttcatgtctagtccaggggttctcatatataagtttgctaagatatgacgtggctgtgttacatgacatcgtgacaggactggtcagaattatgttctgttct

SEQ ID NO: 40296 - DNA, 178 bp, Zea mays
  Clone ID: MRT4577_136754C.1
ggggcgcctccaaaattgaaacctgattgtttatattcttaacaaagcacagaagagctacatctttgtgaattcctttcaggacggtagcagttatactaaacactaaatgaccacgtgtcccaaaccagcctggctcctgggtgtcaggggcaccgttcacatttatttcttagct

SEQ ID NO: 40297 - DNA, 411 bp, Zea mays
  unsure (1)..(411): unsure at all n locations
  Clone ID: MRT4577_136755C.1
ggggcaaaactaaaaagggcccgggaagaaatattaacaaaaagggtttgctactaggacaggggccctatgacagggacaaaaaatttgccagccccccttaaaagggacaatatggttaacaacatggttttagggaaccataagggccaaaattcaacgggaaatttttttatgcagaggaaaacatgaacggggggggggtgcctgcctcggggccggggggngnaagggaacaggaggggaataactggcctggcaaaaacatacaatgggacccaaaaagggggtcaagtcccggccggaaaaactttggaaactgggggaagaaaccgcaaattttcttaatttcccccccccccccgggggggccccccctaaaaatttttgcctgaagaaaaagggggcctt

SEQ ID NO: 40298 - DNA, 366 bp, Zea mays
  Clone ID: MRT4577_136756C.1
gtgcaatatatctcaaatattgtacatactatttatgcagatttagcattgtgcataagctagtttctgaatgaaatatgttgatcatcctccctccaatccaaagaaaattacaatcgaataaagtcaggaagtattcactgtcaatctcctgcaccgagaataatgccaacaatccgaggcagtcgattcctccagatgttgatccaccaaagcaaatgaagcaactttatgttaggtgtaatataaagcgatctgcaggacgagggaaaaaagaatccgacgtaagtgaaaacatagatgatgatgatgatttcatgcctgcctccaagaagaaccagcatgtcagatttgatgagaaaccaa

SEQ ID NO: 40299 - DNA, 273 bp, Zea mays
  Clone ID: MRT4577_136757C.1
accgccgccggtgcatctgccaccttcggttcacctgccacctactgtgcatttaccaccgccggtgcacctgacgacgccggtccacctgacaccgccggtccatgtgccgtcgtcggttcaatctgtcgccggcaccatgccactaccctacttaaccgacccgggctgagcctcatccccagccacacccatgcccgtgccaacagccggatacagcccgtgccaggtgcatggaacctgaggcgatggcagaaccccaatgctgggcca

SEQ ID NO: 40300 - DNA, 176 bp, Zea mays
  unsure (1)..(176): unsure at all n locations
  Clone ID: MRT4577_136758C.1
ctctgtcgacccatatgtttagtggttggggaattggggaaagcggtagaaaggtgtgatgttttagtcctttttggttgaagcggcnnnngagtctttgagaagccatttggnnnnaattcttctttcgtgattggggtcggccttgtgtgcaggttacgcagatgtttcttttt

SEQ ID NO: 40301 - DNA, 789 bp, Zea mays
  unsure (1)..(789): unsure at all n locations
  Clone ID: MRT4577_136759C.1
ggttgtccccgccggcggggtttttcagccctacccccctcacttccctgggcgtcaaatccacacctcccgacgtcggaagcacgtcttccgcctccctccggcgcgagcacgtcctctccttcctgcagcctccctcgtgagcagcggcgggctcagcctcatcacgctcgcctcttcttctctctcgcaccagtagcgacgcctcgggtggtcatctccatcctgcgacctccacctccctccggatctgctcctcttccggcctttcccgagcagatccggtggcttctttccaagatcaggacactggtagtccactatggaggcgccttcgtcatcccctactctgcaagatcatctctcccggccaactggccccttgcatctcaaagtatgggaggttgtatgcattgccttgggagtgttcatggcggtcgtcttctttttaactgtctggctcactatgcggagtaggaagaggaccagacgagcatctggaaatatcccagtcacccaaatccctgccatttccaaggaaatcagggaagtcagggtggagcaagtccctgcaactgactttggggcgcatgacggagtcctgctaacgatccaagacaagcctagtgaccgggaatcagacaaggtcatggtccatttgngtgtaagcaaatcgagacgtggggacgagagccactcagggtcattccgttacatggacaaggatgcaggctttcatcagctgaaagaagagggtcgggaacttttcgtcaagcttcaattcatgga

SEQ ID NO: 40302 - DNA, 1932 bp, Zea mays
  Clone ID: MRT4577_13675C.1
gcgggcccggtccgtcattcgagcgttcggtcacttctggctctgacttctgagcgaggagtggacgagtggtgtgccgtcgtccggttcccgttggtttggcgatgaggcgcgctcgcggtcgccgcgggctgctgcttctcctcggcgtggcgctctcggcggctgcgctgctccgtggctgcgcggggcagcaaggggaggacggctcggacgcccctgcggcggcggcggcggagacggcccccatggaggagaaggagcgcagggcgctgtacgccgccatcgagagcttcgtcggcaaggggtggaacggctccgggctctacccagacccctgcggctggtctcccatccagggggtgtcatgtgatctcttcaatggcctgtggtacccaacagtgatgagcattggcccagtccttgacaactcgctgcagtgcggccccgacgccaagttcagcgcccagctgttcgacctgaggcgcctccggacgctgtctttctacagctgcttcccggcgagcaaccccacggccatcccgaccggcagctgggagaagctggcggggacgctggagacgctggagttccgcaccaacccgggcctgaacggcgccatcccggcgtccctcggtcgcctggccagcctgcagtcgctggtgctcgtggagaacaacctgacggggcccgtgcccgcggagctgggcgcgctgtcgaggctgagacggctggtgctgtccgggaacgggctgtcggggccgatcccggtgacactcggtggcctcacggggctcctgaagatggacctgagcagcaacctgctgcagggcagcatcccgccggagctcgcggggctcaggagcctcacgctgctggacctcaggaacaacagcctcaccggcgggctgccccagttcgtgcagggcatggcgtcgctgcaggacctgctgctctcgaacaacccgctgggcggcggcctgccgcagtccggctggggggcgctggcgggcctggccacgctggacctgtccaacgtcggcctcgtgggcgccataccggggtccatggcggccctgacggggctccggttcctggcgctggaccacaaccgcctgacgggggccgtgccgcccgagctcgcccggctgcccagcatcggcgcgctgtacctgaacggcaacaacctgacggggacgctggagttctcggccgggttctaccagcgcatggggcggcggttcgcgtcgtgggacaaccccgggctgtgctacaacgtcgcggccgtggacgcggcccacgcgccgtcgggcgtggtggtgtgcaaggacctgcaggagcccagcgtgggcggcggcgcgcgggacggggacggggacggggacgcggaggaggacgggacgaagcccgaggcgggctccagcctcgtggcctcctcgtcgtccggcatgccggttggcagtgtcggtgggctccggtacctggtggtggttcggggaatggcggctgcggttcttgggttggtgtccctcctacaatagcaagcaagcaggttcagaagaagaacacggagaaacttgaagtaatgctaggtaggttagcacgaagtagtttctgcgcgttctctgtgatcttttggcatttgtttttggctgctggtggcttaccatcgtcagatggtgacggaggaaggagggaacatggatctggatggtgtgagccacagattacattacagtagtagagtaaactatgagagttcttgtggactgaaggtgtgtagtggtggatagggtagcttctccggggttcttttgtgtgtaattagcctgtgtcgccctgtggtgtcatgttacaacagcaagtggaaatctaagctggttcgtccgttgttggagaatcaggaaaaaaaaaaattgtcgtgcttcattc

SEQ ID NO: 40303 - DNA, 235 bp, Zea mays
  unsure (1)..(235): unsure at all n locations
  Clone ID: MRT4577_136760C.1
cccacacnttcgtttacgctgtgggcgtacgcgcatatttccacgtcaaccactcctccttaggtcggggagcaagtgtagggggagactctttgtccaatacgcaattcaagtctgagacgtgtgccgtgagccttcctggcgttagcatgtcttcctagacgacggtaagatgcccgacgacatgcaccatggggtgtggtgaagatgcttcaaacaccttttataactagac

SEQ ID NO: 40304 - DNA, 390 bp, Zea mays
  unsure (1)..(390): unsure at all n locations
  Clone ID: MRT4577_136761C.1
tccggacagcccgcagccccttctttttcatccgccttgctacaaccgcgtgcgcggacgcctcctccaggaaagcgagagcttctgcataagaacaacaacaaaagcttgatcagcttgggcctacaaaacctcaacaacncaagttatgtctgatctcgacgccagcttccatctgcctttgatccgttgctgagcaaatgctgagactctggtgctggtcctggaacgaagatatctgcatgtgcgcatcagcagcgcncggcagacagagtctgactacagtgaaggtctgaaaaagagttagcttcacaagatcctaaggatctgaaaaagaattctgctgcaatggtactgcagttcaggacccagagctaggccaggtcattc

SEQ ID NO: 40305 - DNA, 825 bp, Zea mays
  Clone ID: MRT4577_136762C.1
tgggaccctcggggccggccgggtaccatcccctaccctatgtcgcgagctcggccggcattagccatggcgacggcggaggcggcgctgctgctgctcctgtgcgcgtcggcgttcgtggagcgcggcgcggcgctgcacctctgcacggaccggctgttcaacgacacgaaggggcggcacgacgacggcctgccgcacctgaccccgacggaggaggccacgtggatgtccctcctcccgcgcaggctccgcggcggcggccgggccgagttcgactggctggcgctgtaccgcagcctgacgcgcggcgacgggccggacggtggagccggcaagccgggccccgaggggctgctgtcgccggcgtccctgcacgacgtccgcctccacggcgacgggagcctctcctccatgtactggcgggcgcagcagaccaacctcgagtacctgctctacctcgaccccgaccgcctcacctggaccttccgccagcaggcgggcctgcccaccgtcggggacccctacggcggctgggaggcgccggacgggcagctccgcggccatttcgtagggcactacctgagcgcgagcgcgcacgcgtgggcggccacgcacaacggcaccctgaggaagaggatggcgagggtggtggacattctccacgcctgccagaagaagatgggcacggggtacctctcggcgtaccccgagaccatgttcgacctgtacgagcagctggacgaggcgtggtcgccatactacaccacccacaagatcatgcagggactcctcgaccagtacacgctggccagcaacgagaaa

SEQ ID NO: 40306 - DNA, 204 bp, Zea mays
  Clone ID: MRT4577_136763C.1
tttttgggcacatcagtgatctatagaccggctcgccctaaaggggccagacgggcacagcatgtcacaggatgcaacatgccgagcttgccaccaggccaagctaaagcatcaggctcctgggtggttttcgaggcctgggccttgagggtgcctattgcataaggggggacctcaataccacggcatatgggttttaatggt

SEQ ID NO: 40307 - DNA, 752 bp, Zea mays
  Clone ID: MRT4577_136764C.1
acacgcttccccttccctcccgctcccattcacgtcgtctctttcctcgagcctccgcttcgccagcgacgcgcccttctcacccacctcgccgaggaagtatttaccgatggagacgccgctgtcttccaggaggatcacccgctcgctcgccgccgcatctgcccagaagagcgccgccgccgggccggactccgccgccctcttctcccgcgccaagaacgccgccgctggggagacccagcctcgcgccgccctgcacgacatcaccaacgactcccccatcgtcgggctcgcggcgggcgccctccacgccaccgataccacccccgcctccaccgccgccaagacccgccgcagggccccgcgtcgcacgcccggctccggggaggcgctcctgcgcggccaggccaaggcgctcctccacaaggtcgaagaggagcagggctgcgccgccgcggccctcgtcaggcccgcgcgcatccaggcgctgctcggtgtatccaggtcgccggcccagcttcttgcgccgacgccagccaacacgccgcagatcgagcccgtccccactcccagggaaggcctcctcctgcttgatggcgctagggtcatgccctgcgtcctagacgaagaggaactgctgattcctaagcttcaggtcattgcagcttccctacctccacctcatcaggcagaggagaagctcggggactgccagctgaaccgtgcgctggtgttcgatgactcccctg

SEQ ID NO: 40308 - DNA, 603 bp, Zea mays
  Clone ID: MRT4577_136765C.1
aaaataaatggaataagaatctgtttaaccatctttagatttcacaaataaaacaggtttcaatttatctttgtaaaaaaaaaaaaaaaaaaaaaaaaaaaaaaaaaaaaaaaaaaaaaaaaaaaaaaaaaaaaaaaaaaaaaaaaaaaaaaaaaaaaaaaaaaaaaaaaaaaaaaaaaaaaaaaaaaaaaaaaaaaaaaaagggggggggcctttttaggggcccaagttttcctccccgggcttggcaaggtaaaattttttttttggggcccccaaaataaattcccgggccggggttttaaaacggggggggggggaaaacccgggggttccccaaattaattcccttggaaaaaaacccccttttccccgggggggaaaaaacaaaaaggccccccccgatccccctttccaaaagttgcccccccctaaggggaaaggggaccccccctttaaggggcctttaagccgggggggggggggggttcccccccagggggccctttactttggcagggccctaagccccggttttttgggttttttcccttccttttttgccaaggtcggcggttttccccggaaagttttaaaaggggg

SEQ ID NO: 40309 - DNA, 361 bp, Zea mays
  Clone ID: MRT4577_136766C.1
ggagaaaaaaaaaagatttcgtaaactggggggggttttaccgggattaacattagggggggcatttgtccttttcccccggctggggaaacccagggaaaaagggggaattttccggggcccttccccttatttttgttcccaaaaccttttttcttttaggaactggtttgtttttcgacaaaaattttaaaacttttttttcccggtggttgggggggggggaaaaaccctttcaaattttcaagttttttcttgggggcaaggaaaaacccaacttttcccaatcttatttatttctcgggggttttctttttttacaaaggggtcgggggcctcttttttttaaccttgggggggg

SEQ ID NO: 40310 - DNA, 873 bp, Zea mays
  Clone ID: MRT4577_136767C.1
gagttcaaatcataaatttttaatcatgcagctctattgctgggtaaaatggtagtctaaaggagtgacaaagaattgaaaggtgacgtgattccacctctattaacaacgttgcaatcatgaggagcgatacatgtctggacttttgtgtggccatcgatcccgtaggcctcagtgctagcttccgccatactgtagttttcggacttagtagccaccgccgtagccctccttggtggtgcagactgtggtcgtgccagtggagatgtaagtggttggcttcttcgcagtttccgtaatgacggccgtagcggtctttgaggacgtaatggtctccttagcagtggagacgctagtcttgtaggaagtagcggtggagacaaatggcacggtctcgcacttggtagacgacttgacttcgctctccacaacggtgttgtagatggttgtcacagtcgagtaggttttggtgtcaaagtgggtagtgtactcagtcagagtcttcgtgctagcaccagtagtggtgtatgggcagggctccgtagtagtgtggagcttctcggtgacagtggtgacaggaacgacttcagtcttggtagacaaccaggtagtctcgtattctccgacactagaggtggtccatgcagatgcagtgcaggttccagtctccttctcagggggaggagcctcatatccggaagacttagccggttgaccatagccgggcaaagcagcaaccagggaggccgaagcaacgagggtgacgaggttgttgaagagcatttttggctagagatgagagtgatctgggccgtgggaaagcgagtgacgatgtgtatagatctgaaggaatggactattgcggacgcgtgg

SEQ ID NO: 40311 - DNA, 155 bp, Zea mays
  Clone ID: MRT4577_136768C.1
ttctctcagttcctttttcttcatatcctgttttgagcgagtactttgcagtgattgatgcaagtgaaaatatatcctgttatgaacttataagttacgatgtttcaattttgctttgtttggcagtacaatttgacatgtgatttttttcctcg

SEQ ID NO: 40312 - DNA, 647 bp, Zea mays
  unsure (1)..(647): unsure at all n locations
  Clone ID: MRT4577_136769C.1
ccctcgagnccggccggggtcttcgctcgaccgacccaaccgaccgcacctccacaacaacaccaccagtccaccaccacccacctcccacatgtgcacacgcgcccacctcccgtcaccaccgctatatatcccagcgccccttcctccctcccacgtgcttccctccgactgcgtctcaggaccaaaccaaggacactcccaatcctagataacaaaaataaaaaanaanaataaaagaaactaagaaaaaaacatgaagccccannncacatgngaggaaaaacaggntataaataaaaaaaaaagaaaaaataaaaaaaaaaataaaagaaaagaaaaaaaaaaaaaaaaaaataaataaaaaaataannnntannnanannatnaaataaaaaaaaaaaaaaaaaaaaaaaaaaaaaaaaaaataaaataaaaaaaaaaaaaaaaaaaaaaaaaaaaaaaaaaaaaaaaaaaaaaaaaaaaaaaaaannnnaaataaaaaaaaaaaaaaatagaaaaaaaaaaaaagaaaataaaataaaaaaaaaaaaaaaaacaaaaaaaaaataaataaaaataaaaaaaaaataaaaaaaaaaaaataaataaaaataaaaaaaaaaaaaaaaaaataantattaatt

SEQ ID NO: 40313 - DNA, 539 bp, Zea mays
  Clone ID: MRT4577_13676C.1
ccacgcgtccgcgaccggcagctgggagaagctggcggggacgctggagacgctggagttccgcaccaacccgggcctgaacggcgccatcccggcgtccctcggccgcctggccagcctgcagtcgctggtgctcgtggagaacaacctgacggggcccgtgcccgcggagctgggcgcgctgtcgaggctgagacggctggtgctgtccgggaacgggctgtcggggccgatcccggtgacactcggtaacgaccgccgcgccgacgagctgctgctgatcgtggacctgagcaggaactatctaaccggctctctgccttcgtcgctaggtggcctcacggggctcctgaagatggacctgagcagcaacctgctgcagggcagcatcccgccggagctcgcggggctcaggagcctcacgctgctggacctcaggaacaacagcctcaccggcgggctgccccagttcgtgcagggcatggcgtcgctgcaggacctgctgctctcgaacaacccgctgggcggcggcctgccgc

SEQ ID NO: 40314 - DNA, 868 bp, Zea mays
  Clone ID: MRT4577_136770C.1
gccggccgggttccgatgcttgtcatcacccgccgccattctcctcctggacgccgcccgccactaacctccttttggtagcgcttgtggcctgtggtctgccctccttctgggccgtggccgtccgtgctcgcttcctcggccgccagtccgccacctgccgtccctcaagcagcacagctctggatctgggggcatgctgcctatccactgctgctcccttgtggaacactgatgtttacttgtacacaactacacatgcatgatgtgtgcagattgccatctacctggcacgctatgcatgtggactgactgcaccacctgcttcgaaggttgtgctaccacagctggcgagtgtggtggttgcttgggaggtgctggggaagctgggctaccgctgcttctcatcatgggggttattgtgcttgggcttttcacagtcatcggcatattctacagtgtcctggtcgcgacaatggttggccagcggatctggcagcggcattatcacattcttgcaaaacgaatgctaaccaaggagtatgtcgtagaggatgtcgatggcgagcacacagactggtgtccgccgccgctccctgcggagcacatcagccagctgaggtctcttgggcttctataatagctaggggactcggcgtggcattacccagctgtacagggaggcgatacaaaagcaggaagtcaggcatactgcgttgaaatgtggcaatattgatatcttcttattttgtacattgtaatgacaacagtttcttcctgacaccaaaaaaaaaatataccaagtcaaatcacgtactttacgaagtctgcgtggcttctcactaaaaaaaaaaaaaaaaaagcggcc

SEQ ID NO: 40315 - DNA, 415 bp, Zea mays
  Clone ID: MRT4577_136771C.1
attcggctcgaggggatgctccctgtttttctgaaaggggtaaccgatttcgatctggcggcctgttctgaggtctctgggagtgcgaaggcgcttgtaggagtagggctgaatcctatcccagcagagcgcttaacaggacatgacgttttatgtagcccatggattggtgaccctggagctgctgctgatcatgctattgatccaactgccctgattcgcatggaccattcgtaagcgatgaacacggtctagaagatctccttgcaggccattgctgagagcctctacgtgggcgagattgcaggggtgcacgaaaggttcatggcaaaggatgcacataacagccggggagtgtcctatgatataccgaaggaaggctcgagagagtctgtcatcacatcaaacgctactg

SEQ ID NO: 40316 - DNA, 1143 bp, Zea mays
  Clone ID: MRT4577_136772C.1
tgcagaacgtgcaaagtctaccatgaacgttatgaggcggaatggcctttgtcctgatctgattagctggtctatactcagggatatttatggatcttctcaaaatagggatggagctgttcaggcactaaggagaatgcagcgagttgggatgagacttaatgtctctgcatatactgttgctattaaggcgtgtgttgaaaacaaagatttgaagttagcactgcacttatttgaagaaatgaaaacacaccaactgaagcccaatttggtgacgtacaaaactctcctggcagcacgcatcaattatggatcactacaggaggtccaacagtgtttagcgatatatcaggagatgaggaaagcagggtttcaggcaaatgattattatctcaaggaattaatagtggaatggtgtgaaggagttctgtctagtcgcagtgataatcaagatttttacaatttggatctacaacctgagactgagaggaaagaatcgttcaacctgtttcttgagaaagtcgtaacagtcttgcaaaaagatactgatcagaaccaaattgtcgatgttcgtggcctttcaaaggttgaagctcgaattgttgttctctctgtccttcggaagatcaaagagcaatacctcctaggaagagtggtccaggatgatgtggttatcatcacgggtcatgagaagacatcaacaactgaagctgaaaccacaactagtgcagttgacgtcgtgcaggcaatagttactgttttgacggatgatctgggtcttgaagttttgattggacctggaagctgccctcccgtttcatcaaaacccaaagcaccgactaaatctagaagtaatttagagcaaatatccaaagaatttactaggagaccacagggaatgataaaaatccctatcaactcacttaaccattggttaaggaagaaagccgtgaggattgcagagtgacatttccttaaaggcttaaactacctttttggtccatttagtataccagtaaatcagcacagctattccaggattgggtgtacatatgaaaacaggttactgctcctggtattccaggcaccctgccacgacttgaaaaggaacttgttggcaaacaaaaaaaaaaaaaaaaaaaa

SEQ ID NO: 40317 - DNA, 548 bp, Zea mays
  Clone ID: MRT4577_136773C.1
tcgaggccggccggagattggattgagcacggaagctggagagattgtgagagaaccgcggtaggatggcagaaaaccctgcctctcgtatctcttgcccgtgttcgcgaggcttgatctgcaggggtgtccgctccggaagggtgagttaatagggaggtcctaggacttgttccattcgataatggcactgcgagcgacagctcgggcgagggcggaacatgccggataggatttcttagacgcgcggcttcagattcgctcgatggatcaactcaacctgcaaattgtcaagtattttcttttggatctcttcagcgcaggaacggactcaaacacgatagcgacggcagtgtaccatgaccgagctggtccgacaacacgaggcgtgatgtacaagggccgcagcgcagctgcatcacgcgctgggatcacaagccgcgcccggacgaagacctactccgtaggctgccctatgctccgcgacgtggtgatgcacatgatgcgactccacccgacgagcccgatgctggtagagcacctgccat

SEQ ID NO: 40318 - DNA, 968 bp, Zea mays
  unsure (1)..(968): unsure at all n locations
  Clone ID: MRT4577_136774C.1
agggctaaagtgaaaccctaagtattttttttcttgcagccatccgtccgtccgccgacaacacgagacgtcgcgacactcacccgtccggccgtccgccgaccgccgtccaggccatcctgctgttcgccgaccgccgtccaggttgtcctgctgttcgccgaccgccgtcgaggccgtcctgctatcgccaacactgctgtccaggcgtccaggcgtcgttctccagccgtcgaagccgtcccgtcggtccagccgtccaggcgtcgaagacacggccgtcgaagtcgtcggtccagccgtccaggcgtcgttctccagcctccaggctccatctgccgtctgccgagccgagtgccgaagacacggccagtaccgcagccgcagtacgtacgttagttgagactcgatatgtctcactctggaacaggacccggaggaggaggagcacgccattcagactcaatgcctgcggagtcagagactgggaacaacaacctaggtttggaaagcatattgccactgcctccacagccgcagcgaccaccactacctccttctgtgagaggcagcagcagcagctctgtttcagcaggaaacaagagaaaaacaagtggaagctctatgggtgcaccaattgttcagtcgtcatcttcagcacaagcagctgaaaataaagatgcaaataaattggttgtcgcagacacaagtaatactggtactagagctgtagcttctgttgatatagcgggccttgatgatgatgatgacatacaagaggagatgactggaacgggaaagagacaaaagaggtgcacatctattgtatggaagtactttaccaaagaaacagtggaagtggaggtgaatggcaagaagtttgagcagttgtgggcctactgcaactttccanaatgtagcagagatatgtgtgtgtcggtgtgtgagtgtgactataagnctattac

SEQ ID NO: 40319 - DNA, 853 bp, Zea mays
  unsure (1)..(853): unsure at all n locations
  Clone ID: MRT4577_136775C.1
cccgtgtggcctctgccttctcccanaccgcttgttgcccaccccctctgccttgtccttgttatgctcgtcactgacgcccgtgccttctcctggctgcacccatcacccgccgccattctcctcctggacgccgcccgccactaacctccttttggtagcgcttgtggcctgtggcctgccctccttctgggccgtggccgtctgtactcgcttcctcggccgccagtccgccacctgccgtccctcaggcagcacggctctggatctgggggcatgctgcctatccactgctgctcccttgtggaacactgatgtttacttgtacacaactacaagtacacatgcatgtacaccgtgctcgtcatatattctcacaggttgtgctaccacagctggcgagtgtggtggttgcttgggaggtgctggggaagctgggctacctctgcttctcatcatgggggttattgtgcttgggcttttcacggtcatcggcatattctacagtgtcctggtcgcgacaatggttggccagcggatctggcagcggcattatcacattcttgcaaaacgaatgctaaccaaggagtatgtcgtagaggatgtcgatggcgagcgcacagactggtgtccgccgccgctccctgcagagcacatcagccagctgaggtctctggggcttctataatagctagggtactcggcgtggcattaccctacccagctgtacaggaggcgatacaaaagcaggaagtcaggcatactgcgttgaaatgtggcaatattgatatcttctttttttgtacattggaatggcaacagtttcttcctgacaaccaaaaagttttatacc

SEQ ID NO: 40320 - DNA, 993 bp, Zea mays
  Clone ID: MRT4577_136776C.1
gcgattgggaccctcgaggccggccggggcttgttgcccaccccctctgccttgtccttgttatgctcgtcactgacgcccgtgccttctcctggctgcacccatcacccgccgccattctcctcctggacgccgcccgccactaacctccttttggtagcgcttgtggcctgtggcctgccctccttctgggccgtggccgtctgtactcgcttcctcggccgccagtccgccacctgccgtccctcaggcagcacggctctggatctgggggcatgctgcctatccactgctgctcccttgtggaacactgatgtttacttgtacacaactacaagtacacatgcatgtacaccgtgctcgtcatatattctcacaggtggttgtaccaacatttgttcaatttcaggatgtgtgcagattgccatctacctggcacgttatgcatgtggactgactgcaccacctgcttcgaaggttgtgctaccacagctggcgagtgtggtggttgcttgggaggtgctggggaagctgggctacctctgcttctcatcatgggggttattgtgcttgggcttttcacggtcatcggcatattctacagtgtcctggtcgcgacaatggttggccagcggatctggcagcggcattatcacattcttgcaaaacgaatgctaaccaaggagtatgtcgtagaggatgtcgatggcgagcgcacagactggtgtccgccgccgctccctgcagagcacatcagccagctgaggtctctggggcttctataatagctagggtactcggcgtggcattaccctacccagctgtacaggaggcgatacaaaagcaggaagtcaggcatactgcgttgaaatgtggcaatattgatatcttctttttttgtacattgtaatggcaacagtttcttcctgacaaccaaaaagttttataccaagtgaaatcacgtactttacgaagtctgcgtggcttctcacc

SEQ ID NO: 40321 - DNA, 195 bp, Zea mays
  unsure (1)..(195): unsure at all n locations
  Clone ID: MRT4577_136777C.1
tagccagaggtaccgctctcccaccagggaagggacacccaccagcgccttagattccctccttcccgtccaaatccttggccgagccgcgaccgtcgagggatcgccatggcgttgagggcgtcccccgtgtcgcatggcaccgcggcatcttcttttcccnccttttagccgaagaagatatgcccctggggg

SEQ ID NO: 40322 - DNA, 285 bp, Zea mays
  Clone ID: MRT4577_136778C.1
gcgacctactactcaagtatccatccttattgagtacagtggtgatccatggactcataacgcgttgtatcagcgaacgtggcagatgcgactactataccggctatccaagtagacgtgcgccgttagcacggccgggatgactgcatctgctgatcctgaccgtcaaatccggctggaagtcctgtccatgctgctgcggacctacgtggatttcatgatgagcccggcgctcaagtcggcatacggagcgcattgagtacctcatgactgtgagcgactgct

SEQ ID NO: 40323 - DNA, 204 bp, Zea mays
  Clone ID: MRT4577_136779C.1
ctcgactcggccgctctcgcgcttgtgcggtgtgtgccgcgcgggtgctggtgcgggatgcctcgcctgtcctagcgctaccggctgccgagctgggtgcgggcgcgacgagtcgacgggtagacaagggtgcagatttatgagtgaacccgggcacactgtacaagtccctaacctctcgagcagtgtatctgacagtgatct

SEQ ID NO: 40324 - DNA, 298 bp, Zea mays
  Clone ID: MRT4577_13677C.1
gaactcgtacagctactcatgcaatgcttgaccacatcatccactcactacaacagcggtttggggtcggtcagaggaccttgcctatgatcatcctctagctcactatcatactcttcaccctgaaacggctgatgcaaagattccagctgctgcccacgcggagctggacaagataccacaccactgataagctcaggcagctaagcaaccacatcatcgaacataccaccatcgtctgcaagcccctctatgcctagacctcaatgcgtcgaatcctgcacgcgccctcagcata

SEQ ID NO: 40325 - DNA, 405 bp, Zea mays
  Clone ID: MRT4577_136780C.1
acccacgctgattaacgcatatgaacattttacccaatgtgaggttataataaactgaaggcggttgagatggaactcaaaacccacaaacaactctgaaagaaaatgcacaaattaaccgtggaactgcaaagggggcgttggtgcatcaggggggtctatggagagccaatagcacggcaacggaccgcctctcaagcagttgcacagcttgaaaggcgaatgacacacttcgtggcccggggaaccatgcgcgaccggtgccgtggtttcgcccttctggaacttggccatcgcaagctttttagccctcttttcatcctgggtttttttgagccgctccttgatcttacgtaaagcatcttctttaccaataattcggcccttcgttttttcaaccctttt

SEQ ID NO: 40326 - DNA, 279 bp, Zea mays
  Clone ID: MRT4577_136781C.1
agagggtccaaaaatagatcaattacaaatataagaaaaagaaaaaaggacaccctatggcgtgtcgggtgtgtgtaggtggtggcctttttaggtgttccttcatggatgtttcatgtattccaagtaggaaaaattatagtatgcagaatctagcaggtgctaatagatttttgcttgagttgacatactctcaaatttcaattatgtcacaacgtaccataagagcattctgatacagtaccaccatttatggaatggtgtttagaaacagctgta

SEQ ID NO: 40327 - DNA, 419 bp, Zea mays
  unsure (1)..(419): unsure at all n locations
  Clone ID: MRT4577_136783C.1
gggaaaaaaaaaaacactttgcaaaaacaggttgaaagccctggaacgggcaaaacccccccaaaataaaaagggaagcccccccatgcttgggggacccccctgggaaaaaggggaatgaaagtaacaacccccggaaaagcccaaaaaaaccaaaaccaatttggtccaccgaaaaaaaaagggagccccgtttaggaagttccccccaaccccaaaaaaaaaaaaaaccttgcccccctacacctgggtgggaaactttccgtnncccccaaaggggtcccttgccttgttgggcggggaatcggccaactccacgggaggggccacctttttggggtcccccacctccgggggggggggggggggctttcccttgccgggcggggggggggggcccttgtttttccgggagcccg

SEQ ID NO: 40328 - DNA, 501 bp, Zea mays
  Clone ID: MRT4577_136784C.1
gtcgcagcagtaagaaaaattcattaatttttctctccagaaaaattaaaatccaggttatataaataaaaagaaatgatatatatcataatcaaattttacatcgtatccgctagaaaaataaggaactttaatttctctaattgacaatgacaatatcatcgaggccattcattcggtctaaatatgtccacatacgatatcttttccaagtccacgtaaaatcaaatcattgaattgattaaaattcaatcgttcattttcaataatttcttcttgattaatatatcgtaataaaatatcttttgttatatccggagaaataatcattaagaaactaacaagttcatcaagattaatcatactcgattgatttcgatctaataaatcaaatgcagtatctaattcatgttcattatacgaacccatcataatcggccgtaagatttgcacgaaatcatcgaataataatcgattattactattattattattcgacat

SEQ ID NO: 40329 - DNA, 546 bp, Zea mays
  unsure (1)..(546): unsure at all n locations
  Clone ID: MRT4577_136785C.1
cattgggtacctcgaggccggccgggatgcccgcgcctccctcccgcttccccaatccctaaccgctcccgctgctgccgtcgtcgtcggagtgggggcgccgagaggggagggcatccggccgctcctcccggaggggagcggcggcaggcaatggcgcgacgggtgcggccgtcgcacctgatgctggcggtggcggcgacctatctcctcctcatctccctcaagttctgtcgcgtgctggacctggccgccgccgacctcgcggcgaccccaccgccgctgccgctgccgccgccttctcctcgccgtcctcctacgaccacctgcccccgctcgggtcctcctcgtcctccgacgccaccgccacttccacagcctctccgttcccggtccgccccttctggcaccgctacgatcgcgtgtccctccccggtccgacctcgcgtcccgcaaccgctctgcgctggaccgcatggncgacgacgcctgggggctcggcctcaccgcctgggaggacgctgccaccttcgcgggggacccctg

SEQ ID NO: 40330 - DNA, 487 bp, Zea mays
  unsure (1)..(487): unsure at all n locations
  Clone ID: MRT4577_136786C.1
gctgttttgggttttttaaaaattttttttttttttttggggaattttaatttatttttttattataaataggaaaaaaaaaaaaaaataagggaaaaaaaaaaaagtacatataaaatgaaaattaaaaaaaaaaaattaaaaataaaggggaatgtttgggaancaaaaaaaaaaagaaaaaaaaaaatggcaaaaaaaaaaaatggtgttgaaggaaagaaatgaccaatgggttagacaaaggcaatgaaaaaaggaaaagaaactgctaatggaagaaaaaaatagagttaatgacgcaaggaccgaacaaaaaatgggaaaccgggacctacacgggaattacctaaccctatattgaggcgtattaaattttagtataatgagggtaataaaaggttggtgtaaaaaaagaaaatgcttttacaattgcaaaaaagatatcagccgaaaacataaaaaaaaaaaccaggggggagtaaaa

SEQ ID NO: 40331 - DNA, 751 bp, Zea mays
  Clone ID: MRT4577_136787C.1
ttttttttttttttttttttttttttttggttggttttttttttttttttttttttttttttttttttttttttttaaaaaaaaagcgacaatccgcccaaacggttatttttttttttttgggttctcacaaaagcaacagtctacagttgggctcagatatactaaaacattaaaccaccaaatcgcgcttaccatcgccgagagagctgtagacagcaacaaaaatagcttaatggaacaacaaaatggaactttctttccaagactggctgcttcatcaaggattcaaggtctactcagaatccacatccagacatcctgaagccttgtcgttcaacgatttactccagaaacacaaccgggaaaaaaaatgtcattaacaatactattccaaagaccaagatcctcgctatcccttgctctcaaaagtatcgcactactcccatgctagtcgcgccctgagcctagccggaaccgacgataatgttgttgatgggaatgaagatgagcttgacgaagaagccgacgaagcccatgacgacgaaccctatcgccgtccgcgctgccaccttggtgaactccttgcggtcaggcttgtggcaacgcttgacgaggcggacgctgtccttggcgaagtcgcggaggggatccaccacagaatcgaccgcgtccatggcgacggggcgagaagcggggggctggattcagttaaaagcaagccgacgcgagaatgccccggcccggccgg

SEQ ID NO: 40332 - DNA, 312 bp, Zea mays
  Clone ID: MRT4577_136788C.1
cccacgcgtccgattactcatatgttgcctcaaaagcaaacaaccatgcgcgaaactgatcatttctgtggttctagcacaaaagggacgactctcacatgaatggagctgaccattcccatctttattgcagtattcatctcagcattcaacttcataacactggattttatctgcatttatgcacactgaaaactgtcagcgatcatacctgctcttatatcattgacccatctttcacaaagaaaaatgaaatctccttcatcatataaacatactctacctggcagaaatcctgccatgctgatacta

SEQ ID NO: 40333 - DNA, 190 bp, Zea mays
  unsure (1)..(190): unsure at all n locations
  Clone ID: MRT4577_136789C.1
ccacctcgcctttaccacaccaccacnccnccggtcctgctccaatttctaggattgggacaacccaacnncccnagccccccaaaaccagcggcgcgcacctacacacgcgcaaggaaccgnagacgcgcccccgcgcctcccctctcaaacgaacaccaccacccatggacacggggaaaggctgcaa

SEQ ID NO: 40334 - DNA, 799 bp, Zea mays
  Clone ID: MRT4577_13678C.1
cacgcacgaagagatcgaggacatgaccaacagctaccgcatcaagatcggcgccggcgggttcggcgccgtgtacaagggcgagctcccgagcggctcgcaggtggccgtgaagaagatcgagggcgtcgggatgcagggcaagcgcgagttctgcaccgaaatcgccgtcattggcaacatccaccacgtcaacctcgtccggctccgcggcttctgcaccgagggccagcgccgcctcctcgtgtacgagtacatgaaccgcggctccctcgacaggtcgctgttcaggccgaccggccctctgctggagtggaaggagcggatggacgtcgccgtcggggcggcgagggggctggcgtacctccacttcggctgcgaccagagggtcatccactgcgacgtcaagccggagaacatcctgctcgcggacggcggccaggtgaagatcgccgacttcgggctcgcgaaattcctcacgccggagcagtccggcctcttcacgacgatgaggggcacccgcgggtacctcgcgccggagtggctcagcaacgcggccatcaccgaccgcaccgacgtgtacagcttcggaatggtgctcctggagctggtgcgcggccgcaagaaccgcagcgagcacgtaagcgacggcggcggcgaggcctccaattcctcgaacgggacagcgggcagctcgtcgcgcggcgcgaagagcgactatttcccgctcgccgccctggaggggcacgaggccgggcagtacgcggagctggctgaccctcggctacaggggcgggtg

SEQ ID NO: 40335 - DNA, 382 bp, Zea mays
  unsure (1)..(382): unsure at all n locations
  Clone ID: MRT4577_136790C.1
canagaaaaaaagaccaggggcatggtccttattttataacgtgcccccccttctcccactatcataaaacaaatccaccagatcaacatttaagtgaaacacattaatcctccctttaaaacataaataaaacctgttcccaatacctcatcctcacacttggtatcactcataataacccacgataaatttcctaaaatcaaacaaactgcattaaccttatcctcgtcaacctcacaaaaaatctgtcccattgacgttacaaatcataaaacctttaaaaatcaagcttactcctcaaactctttgcctttctttttctttcatttgacatatacttggataaagaggcctaaaaagaccattacaacactcccccat

SEQ ID NO: 40336 - DNA, 367 bp, Zea mays
  Clone ID: MRT4577_136791C.1
atccttaagactcatcctacaggtctatttgcgatctgggggtaacaagccaagttcttactcataattccatctcatactgtcactcactcacaaatgactattgtcaaccaaagttccaagctgggagccaatatcatatatccactttttaaagagatgacatgctgcctgatactaacgtctaagaggctccagcagacacatataatttgactacaacgtgtggattaacagaacagactattacttgtttggaaacactcacacaagtaccatatatcctgatgagccatacccgcttaaaccggtcagggacaactgcctaaccagaactactacccgagcatccaaccaaactatattc

SEQ ID NO: 40337 - DNA, 852 bp, Zea mays
  Clone ID: MRT4577_136792C.1
atgagaaccatagactcacaattagaacaaatcttagacaagagtattataccttctagttatgataagaaaaatgcttccgaggaagatcaaagatgtatacgcttatactatcttgcttatgacatcttaagtaattctcttagcaaagaagattatcgtgccttcataatgagatatgatgaacctattcatgatgcgcatgatatttggactaaaattaaaagtaaatttaatgagtccaaacatgttagttcatatgatgcttctacttcctttagtccttgtgaaactaaccctttgaaggaaaaagaagaaaatgaacgttggagaccaaacgatgaatccacctctccaaaagcaagcaaatcctcctttgagctagaatttctaggaataaaagatgatacatgtcaagagctcaaggaagaaaatgaaaggcttagaacgagcttgacacaactaaaagggaagtgcactgcacaaccttctcaagataaccgtgattacatggtgaagaagtttgagataggaacaacagtggcatgcacaaaatcccttgaagaaaatgtcaaggacttgaggaatgtcaaggggaaggaacaaaagaagaaaatcaatacctctgccaaaaacctcaaccgtgcctccatgcaaggtaacatccaaggtaatgatcaagccacacttcacactaagaaaagtaagaagtgtagtgaatgctttgaaaaggggcactttattaggtcatgtccctatattaaagaaaatggcttaattcttaacaaggatgataaacgttgttttaaatgctctaagaagggacatttagttaagtcattccctatgtaa

SEQ ID NO: 40338 - DNA, 270 bp, Zea mays
  unsure (1)..(270): unsure at all n locations
  Clone ID: MRT4577_136793C.1
cctgcaggttccgggccgaactcccggtcgaccccgcgtccgacacgtacgctagcagagcagcactaagatcaactgatcgatggaacantcggcatgccacgttatagctctgctgtcgtgtcagctaagttcaatatacatggccggcgttatacaacggtgttacgtgggtatatgctagcttgtctcaactttagccgagggcagcttatacctgtttctgcagctggcgatctagctgaacaggccatatatagatcgttcttg

SEQ ID NO: 40339 - DNA, 1395 bp, Zea mays
  Clone ID: MRT4577_136794C.1
atggctcgaagaagatcccaaaagaacaagaagacacctccgaagaaaaacaatgaggtaactcttgaggtattactttccgattgttctaattatgcttcatggtccactagggtgataaatgcttttagaaccatagactcacaattagaacaagttttagacaagagtattataccctctaattatgataaggaaaatgcttccgaggaagatcaaagatgtatacgcttaaactatcttgcttatgacatcttaagtaattctcttagcaaagaagattatcgtgccttcataatgaattataatgaatatattcctgatgcgcatggtatttggacaagaattaaaagtaaatttaatgagtccaaacatattagttcatatgatgcttatacttcctttagtccttgtgaaactaaccctttgaaggaagaagaagaaaatgaacgttggagactaaacgatgaatccacctctccaaaagaaaacttaaaatcccaacaacctcactcatgcacatgtattcaaattgaaactatattaccatgtgctaatgcttgttgctcgtcaacaagcaaatcctcctttgagctagaattttcaggaacaaaagatgatacatgtcaagagctcaaggaagaaaatgagaagctaaggacgagcttgacacaactaaaagggaagtgcactgcccaaccttctcaagataaccgtgattacatggtgaaaaagcttgagacgggaacaactgtggcatgcacaaaatccctcgaagaaaaagtcaaggacttgaggattgtcaagagtaaagaacaaaagaagaaaatcaatacctctgccaaaagcctcaaccatgcctccatgcaaggtaacatccaaggtaatgatcaagccacacttcacactaagaaaagtaagaagtgtagtgaatgctttgaaaatgggcacttgattaggtcatgtccctatattaaagaaaatggcttgattattaacaaggatgataaacattgttttagatgctctaagaagggacatttagttaagtcatgtccctatgaagaacaaaaatgcatagttttagaaaagaaaatatttactaaccatgtagcaagcaagaaacaaggaaagaagaaatcttcaagatatgatgatcgcctttggtacatatgccgaaagaaaggacatcaatgtaaggattgtcctattggtaactatcccgcccccaacttgtcaattgattcatatgtaactaggcaatccaaaattgcaacttgtgctagaaaggtaatgagtttaccaagtgctagcacaaaggacatctgggttcctagatctctgatgactaaccttgatggacccatcaagagatggggaccaaaatatgcatga

SEQ ID NO: 40340 - DNA, 389 bp, Zea mays
  Clone ID: MRT4577_136795C.1
agcgaaccaggctctggtcaccatggcaggtcaattgctcagtccgctgcagcctggaacgggggattaccgcctgctagctcgcggtcactagtactttacagattctcctgcacgaacgatacccgtgcacagccatctcacaaacacgtgctacttaatcttgcgaggatcatatagcaccgacattgacgatacatcatgcaacgattctacagagacaggaagcgttgacaagaattcagccaaagatgtcaggcacatcttgaatacatgcgacaggtctttccaacgaacataatgacttgacactcatgatattgactacactcttgagaaatagggtatgctctctctcaaatagttggcatgaacctcagcggtatcat

SEQ ID NO: 40341 - DNA, 327 bp, Zea mays
  Clone ID: MRT4577_136796C.1
gacaagctttttttttttgttttctttatttttcttcatttcttgttagttttcttttttttcggtgttgtgtttcgttttgtcacccatcaccatgggtggctgtgtgagcattgtccttgtttgatcctttgtattggaaggacttatatataaggaaaaatgatgtttgttttttcttttccctttccccctaaagaagccacggcaaaatttggggggccgcctcagaaggacacgcgttatgacccaaaccccccacgtgcccccattaaattccctccgggaagaaaaaggggccccggggtgagcccccccctcgccccc

SEQ ID NO: 40342 - DNA, 101 bp, Zea mays
  Clone ID: MRT4577_136797C.1
atcaagaaaggggattggtttgatgagaatcaggtcggatgataaacttcctttccctcaaccaggatgataggctccaatctccacctggcattattggg

SEQ ID NO: 40343 - DNA, 303 bp, Zea mays
  Clone ID: MRT4577_136798C.1
gggttattccttttttttttgttggggagcaaggggtgcaccattgtattaaataatgcgggcgagagttgaccactaagggaaatgattcacccattttatcagtacactaggtccctggccaaataacctagcctttggggagtcccggaaagattggacctggcccccactaaagaaaatccaatggcctcataccgtatacacgagggtcattaaaggacttggctacgaaagaaacaaggtgtcaactttttgcacaacggacaggagcgaacccaaagctaaacatgctgatacaaa

SEQ ID NO: 40344 - DNA, 329 bp, Zea mays
  Clone ID: MRT4577_136799C.1
attaaaaaacaccaaaatgggtggggaaaataaaagtgtcatccaatatatcaaaaaaaagggtgggaaaaaaacccaaacattttggggccctaaacccaaactaaaatcccaatggaaaaccggggcataaacgggttgcgctaagggggggggcaagtatatatgaaataaagttcccaccctggggggggccccaaaaaaggaggcccattccatcttttccaaaaagaggccggggagattaaggtatacaaacccccttcacccatggtcgggggggggcacatgtgaaacatgggcgggccccccaaccacatggggggggg

SEQ ID NO: 40345 - DNA, 133 bp, Zea mays
  Clone ID: MRT4577_13679C.1
cgtaagttcggaatttggctcgtggcgttggcaagccggttactaacgagagcgggggcagccagagacggggaacgtttaaagtgggggaccgcttactccacgaacaggggaagcgagagcactacacgca

SEQ ID NO: 40346 - DNA, 427 bp, Zea mays
  Clone ID: MRT4577_1367C.1
cggacagctggggctttggctactgcaactgcgtgttgacaattgagggttaaaaacaggactataaatggcccgatgcgtatatctgcaggtggcatgaccagcgatggctgtcgaaccttgaattaatagcacatgatgtagattagagtcagcgtggctagagaatggggattccaacgcacgtcaggtgctaatgctgttcgtgatgtcaacatgatcatatgtgatgaactgctgatctatatacactgagatacatgtactgaatgccaacatggagcaccaaatgtgtgataatcacctgctaatatagctgtctgatgaacagatggatgtgattactgatatgctctcatgtactgatactgctactgtccggaaactatgggctgacgttctagaaggcccaggcatacttacgcgt

SEQ ID NO: 40347 - DNA, 391 bp, Zea mays
  Clone ID: MRT4577_136800C.1
tcctagacgcgcgggcaccaaggaccacagtggttggctaaggaaccacaccgccccgagcaagccataggcagacaccttagcccagagaccacacacaaggctcgcgaggaagatgggcacgctaaccaaacaaaacttgatgcgagatccccacaggcagaccccaaccgccaccaaccccttaagagcagccacagctgccgacgtagccgcaccacaccggtcaacggactacgcacacgtgcgcatccaccagcggaaaggccgcaagaaaccaaccaccgcccaaggacagaagaaggagctcagatgccgcacgacccacagacagcgaaagaaagagtgccgctgcaacagaacagaggaacaggacccacaacatggacag

SEQ ID NO: 40348 - DNA, 213 bp, Zea mays
  Clone ID: MRT4577_136801C.1
aaaacggccgcggccacaaacgcgacgtctaaaaacaattttttactccgcatcgacacaagcgtgcgtttttacctaatttaaccaccaccgcgattacaacgcaactggaaaacccgcgttaccaacttaatccctgcacacatccccttcccacctgctaaacgaaaggcccgaccacgccctcaacaatgccacctaatgcaatggacc

SEQ ID NO: 40349 - DNA, 228 bp, Zea mays
  unsure (1)..(228): unsure at all n locations
  Clone ID: MRT4577_136802C.1
ggcagacggcacacagactacaccacacctcctcgcttctactcagctcgtctgggatctcgtttnctgctttcggttcgaagtcgtgcacgacgatggccagcgccgcggtgtcggtcgacgagaagctcgacaagcttcgtgccgaggtcgtcaagctcgaccagatcagggagcacgataagtccgggttcatcagcctcgtgtcacgctagctcagtggggaag

SEQ ID NO: 40350 - DNA, 357 bp, Zea mays
  Clone ID: MRT4577_136803C.1
cccacgcgtccgaccgtcgtttggaccatgctgaagtttggaaaggcgaccttgacgatgcggaagtgccttttttcctccggatttttgacagaccctgtgtgcttcgttggatctaagtttttgtcaggtttttggagcacagggccctccgatcacaggtgacgtatgctgatgtgtataaacagactcgttttttccagttggggttttctcctatctgcggagaatgtaattaatgtccaacgcatgatgtcgctcgccacatatattttattgtatcttacttgcataaaaaaaaaaaaaaaaaaaaaaaaaaaaaaaaaaaaaaaaaaaaaaaaaaaaaggggcggccgt

SEQ ID NO: 40351 - DNA, 239 bp, Zea mays
  Clone ID: MRT4577_136804C.1
cccacgcgtccgcccacgcgtgcggtgtagtggtattgtttcacatcacagtgcagccagctcaaattttttttgcacagatgaagtagggactgttctaatgatagatttaatcccacacgcgtgtatatacgtatacagattgtttaacatgaacgacctatagttgcgattggtctaaaataaaatagaagacttatttattggaatgtttaaaaaaaaaaataataaattaaggg

SEQ ID NO: 40352 - DNA, 360 bp, Zea mays
  Clone ID: MRT4577_136805C.1
ggggcggggaaaattcaaacttttaaccgggccccccaaaaaaaaggggcggggggcccccgcctttaaaaaccgaaaaaaaaaaccccgggggggccacaaacggggccttaaatgggccaggaatgggtctcgcccttgggggagggaaattcaaaaaccgggttggggaagggtattatcgccccccttttacccaaaccaccggggggctccccggaaccccccacaccccaaaaaaccccccccggggggggggggccaaaaaattttcttggccccgggggggccccccgcccctttcccgggcgggggctaaaaaaatttttccaccccccccttgtttgggggggcccccgg

SEQ ID NO: 40353 - DNA, 368 bp, Zea mays
  Clone ID: MRT4577_136806C.1
cccacgcgtccgaaaacacgtacctccacgcgtacagcaaagactagttccatggagctcgtgtacacaggacatgactgagaagtctcccctcactgcaatgatcaaccaggagatgagcgcgctttctaccagcaaccggacctacacctaacgctatccgttgcaaagacgatcacggtcaacttaagagcatccggcaacacccagacaccactctcaagggcgcttactccaattactttaacctcgttgatgcctgcatataccaccatatcagcatatgccaaacggactaatgtaacctatcactgcacagttactagcctacaccaagactgtttacccatcaacctagctgggtcgac

SEQ ID NO: 40354 - DNA, 826 bp, Zea mays
  Clone ID: MRT4577_136807C.1
gccggccgggtcgggacttacctggacggggtcgacggtggatcaagaagcctcatggcctaggccagtggctcgcattgcacatggtgggtgcgctggcttaccatctccccaagtgggagagtggacgtcataatttgtggtagagggggtacgcgttcgcgcggcccctgcactaccactacactaccaccgtttcagtgctataggataggattttctcttgacggccatgaaaccccctcagctgccggccggggagcgctcctgggctcacgaggtcaagcaggccctccgtgagaaactccggcgctcctacggcgccgcctccgccacaccggcggccggtgaaccgagccgtggcgccgactgccgcggctcggccgccgaggaccccataaggagagtcatgttcttggctccctggggccacacataaaacacagacccagatctgggcttgcaagagcatggccggatctgcagagaactgctcaaccatacataaaaggaactggagcttgtcttgtaaactatggagcatgctgcttgcaccacgaacatgaacgcatggctggttaactaggtaggtagatatgggtgtggatgggggagagagaaaaaacaaggtatgtagtccacgtctctgatcttggatggagaggcatgagatcttgggatgtggctgagatctggaacttttgtagccatcaacttgttttccagaaaccatgtaataagggggacctgtgtatagctatgagacatcaacaaatcttgctgctttgtgtgtctaaaaaaaaaaaaaaaaaaggcccctagggcc

SEQ ID NO: 40355 - DNA, 433 bp, Zea mays
  unsure (1)..(433): unsure at all n locations
  Clone ID: MRT4577_136808C.1
ctccttnctctttctgcttgtgttgcttacgcgaccatttttcctcaatactcgcatgctcctatagctgcccttctttcttttaccttccatcaacccctttttttttttgtaaaacgcanccctncaaccctacannctccaacaaccaataaaaacaaacaacttacctttatcacccctnttctttcaacaatcnccanccctatctttnttccantcattnntccaaaccatcannncacaacancttcttcatcttttcctacctntggtcagcctagtagctctggcatttttttcttcctactntcagcaacaacaatttcttccattcaaccaactgtctacactgaaccctgctgcttatttaccaccccaacatctactacctttcagcccgctagctactggctactcttcacaacaacaa

SEQ ID NO: 40356 - DNA, 580 bp, Zea mays
  Clone ID: MRT4577_136809C.1
gtgttacttacaaaaaaaaaaaaaaaaaaaaaaaaatttaaaaaaaaaaaaaaaaaaagaatgggaccagatctatagcacaaaaatgaatggatgatgacaacccatgcacgtggcttgtgtggaaaaaaaaaaaatgggcctgctctctgctcatcaatgaatggatgatgacgacccatgcacgttgcttgtgtggaaaaaaaaaaaaaatgggcctgctctctgctcatcaatgaatggatgatgacgacccatgcacgttgcttgggtggaaaaaaaaaaatcatgggcgctgctttctgctcatcaatgaatggatgatgacgacccatgcacgttgcttgtgtggaaaaaaaaaaatcatgggcctgctctctgctcatcaatgaatggttgatgacgacccatgcacgtggcttgtgtggaaaaaaaaaaaacatgtgcctgctctctgctcatcaatgaatggttggggacaacccatgcacgtggcttgtgtggaaaaaaaaaaaacatgggcctgttctttgctcatcaataaatggttgatgacgacccatgcacgttgcttgtgtgg

SEQ ID NO: 40357 - DNA, 478 bp, Zea mays
  Clone ID: MRT4577_13680C.1
aaaaaaaaacataatgggccccggctttattttcaaaccacaaacttattcatgatttggcatagttctggggaggacccccacccaacaaaaccggtccttttttaaaccaaccctggcccgaacaggaaattctttgacaacctccttttgggggggggcccaaacgacccaggcccattgggagtttaaacgacccatgatttactggcccccccggaaacggggcccaagggggggggggccctccttttggatggtgaaccctgctagggggcggccctcctccagctgtttgccgggaaaaaacaaacccttttggtccggggggatgccccccttggccgggatcttccccttcacattggggaggggggcccagctctcaacccccagggttatggtttttccagccggggtttttaaaaaaatttggataccccccctgagggggaaaacaaggggaagggggccctcc

SEQ ID NO: 40358 - DNA, 917 bp, Zea mays
  Clone ID: MRT4577_136810C.1
gcatccggacgaaatctcctaattctacactaccaccgtttcagtgctataggataggattttcttttgacggccatgaaaccccctcagctgccggccggggagcgctcctgggctcacgaggtcaagcaggccctccgtgagaaactccggcgctcctacggcgccgcctccgccacaccggcggccggtgaaccgagccgtggcgccgactgccgcggctcggccgccgaggaccccataaggagagtcatgttcttggctccctggggccacacataaaacacagacccagatctgggcttgcagagaactgctcaaccatacataaaaggaactggagcttgtcttgtaaactatggagcatgctgcttgcaccacgaacatgaacgcatggctggttaactaggtagatatgggtgtggatgggggagagagagaaaaaacaaggtatgtagtccacgtctctgatcttggatggagaggcatgagatcttgggatgctcatgcatgggccatggggtgtggctgagatctggaacttttgtagccatcaacttgttttccagaaatcttgtaagtaggggggcctgtgtataactagaagacatcaacaaatcttcctgctctgcgtgtccacacctttgcttccaggttcagaagattcttcgtctagtggtgatgctttatctctatgctctgtccaaaacttctttactgccttcttgatcttttcagctgttgggtggtttaatcctacagccatgagaggcaaacatgctcatgaactgaattcgtgttttcttcttgcaaagaaacgtctagaaactgacatggctggcaaaataatgcaacggctttgcatgtcaaggtgatttgattcagttggttgtgaagaaaggccattttcatttcct

SEQ ID NO: 40359 - DNA, 1435 bp, Zea mays
  Clone ID: MRT4577_136811C.1
ccgcgagatcgaattcctcaaggacgagctacaattacttgaaggagttccaccagtttctagaagttgtaaagaggtaaatgactttgttggtactaaacaagacccactaataccgataacgaagaagacacacagatcatgccgtcttttttggtggatcagatcaaaactgtgcatatgcgtgccatggttctgctgttcctgccattgcatgcccaactgcaaaaggccatgctgcttggattgctcctgctgttcatgcccagatctgtcatgctgctatcccagctgcaaatcatgcaacaaaccatgctttgggcccaacagctgctcatgttgcgatatatcatgccgcaagccagattgcccatcctgtacctcgagctgcagctcgtgctgcaatcggccatgtggcaacccagactgcagctcgtgctgcacctgcaatccatcatgctgtaaaccaagctgcaactcgtgctgcagaccaaactgtagctcgtgctgcaatctgtcatgctgcaaacccagctgcagctcatgcttctcatgctgtaaagcgaactccagctcatgctgtaaacccaaatgcagctgcttcaaggccctctcgtgctgcaaattacagtgcagcccaaactgctgcacttgcagtctcccgagctgctcaggctgcaacccctgcggcagttgcaagcaatgctgctcatgccccagcgactgctttgattgcaagccaaactgcggctgtttcggcgcgcaatgctgcagctgcgtgggatgctgctcgtgctcctgccctcggtgctcaagctgcttcggttgcttcaagtccttcaagtgctccaacctgtttgggtgctgctcctgcaagcagtgcttcaagtgccagtcctcgtgctgcaagggggcgccgtcctgctgcaaatgccagtcgtcgtgctgtgagggtgaagacggcagcagctgctgccggaggccatgctgcacttttccgaagccagcttgctctgggtgttcgtgcgggtgcgtttggtcctgcagaaagtgtacagaatggtgccgatgttccgggtgccgcaatccatgctgtgccaccggatgcttgtgttgacttttgaggttgaactagacgtttccttggttgttatttttttgcgtctgctatttagatgaccgttagtttcgttcgtgctttgatatatggtgtggcgtccttgtctgtaaagaaatcccatatcactagaagaaattgaagcgtcaccgatactaacggccaactagacgtttccttggttgttataccgtgcgtctgccgtttagatggccgttagtttcgttcgtgcttcgatatatggtgtggcgtccttgtctgtaaagaaatcccatatcactagaagacattgaagcgtcaatagtcatcaactgctat

SEQ ID NO: 40360 - DNA, 1269 bp, Zea mays
  unsure (1)..(1269): unsure at all n locations
  Clone ID: MRT4577_136812C.1
attcggctcgagccctctccgactacttccgcaccccgttttcttcttcgttcgtcccggccgtgacatgcacgccttgacacagacggcctcgctcgttccccttccttcttctccacaccaccaaacccggcacatcacatacaccaggccaagagatataaagcagccgcgcgcgcacactagtagcttgttgcgcttgccggccccgagaggcatatatatcgtgaggagcaaactgatctatatatggtggtgaggcgggcttgcgcgataatggagggtgctttcagcgtgccgtactacgagtggctcaagccacggtcgtcgccgtcgacgctctcaacgccatcatcgatggaccgattattagccgccgttgctggcggccacgacgacgactaggagcgcgacgccacgatgtgcttgccgcttctggtaggctcgagggaggcaaggacagctcgtacctcgaggaaatctcctaccaccaccactacactaccaccgtttcagtgctataggattttcttttgacaagacaggtagcagccggccatgaaaccccctcagctgccggccggggagcgctcctgggctcacgaggtcaagcaggccctccgtgagaaactccggcgctcctacggcgccgcctccgccacaccggcggccggtgaaccgagccgtggcgccgactgccgcggctcggccgccgaggaccccataaggagagtcatgttcttggctccctggggccacacataaaacacagacccagatctgggcttgcaagagcatggccggatctgcagagaactgctcaaccatacttaaaaggaactggagcttgtcttgtaaactatggagcatgctgcttgcaccacgaacatgaacgcatggctggttaactaggtagatatgggtgtggatgggagagagagagaaaaaacaaggtatgtagtccacgtctctgatcttggatggagaggcatgagatcttgggatgtggctgagatctggaacttttgtagccatcaacttgttttccagaaaccatgtaataagggggacctgtgtatagctatgagacatcaacaaatcttgctgctttgtgtgtcctaaaaaaaaaaaaaaaagctgggttggttcagaagattctcttctagtggggatctttttatcatctatgtgttcttgtctggaactatcactttcttcactggcttctgtcgngaaaaaaaaaaaaaaagcggcctcgagctcagcttt

SEQ ID NO: 40361 - DNA, 1766 bp, Zea mays
  Clone ID: MRT4577_136813C.1
aattcggcacgaggaccgcattcacatcgaacaacaacacaaggcgaggccgagtcgagtagcgcgaccacaacttcacacaccgcgtcgagtctcacacggcagggcacgcgtcaaggcgatccgttccatgccgccgccgccgctgccggaggagaagccgcttgcgcggcgaaagccagagccgaagccgcctaagcccaagcccaaggggcctaggccgattgggccgctgcctcagcgggacggggaccccggcggcggcgtcgccacgtcccctccgctcctcttctgcggcgacggctgctccggcccgtgcgcctacttgccccagtgccagccgcctcctccgccgtcccctggtgccaccgtgcgcctccgctcgagccggctcccgaccccgctcgtcgcgctctcggcgtcgctcctcaccgtgtccgcggtcctcctgctcgcgctgctcgtccactgcctggtcgcgcggcggcggcggcgggcgcaaggcgcgccgctggtccaccacgccgaggcgggaggggcccaggttctggctggcgcggtggagcagcaggccggcgagggggaggacgaggaggccgccggcggcggcgtgcaccacgtgtggtacatacgcaccaagggcctcgacgagcgcgccatctcggcgatcgccgcggtcgtgtacgacgccaagaagcgcggcgccggcgccagctccgacggcggcggcagctgcgcggtgtgcctcgcggagttccgccacggcgagacgctgcgcctgctgccgcgctgcgcccacgccttccaccgcgcctgcatcgacacctggctccgcgcccacgtcaactgcccgctctgccgcgcgcccgtgcagggtcgccgccgccgccgctaaccccaaccccgcaccgggaacgtccgggcgccgggaagagggtaaccctgctgctggcgccgtcatcggtggcgttcaaacacaggaccccgcgcgcggcggcggctttcctgaccgggccgtcaggcgggccgcgtcgtccatggcggcgctgccgcggcgggcgtggccggacgtcccgctgcgtgcgccggcgtcgagcagcttccgcgacggcgaggacgacgtgacggggctcggcaagatcaggcggctcctcaagctctcggacgcgctggagatggccggggtcggggtacaccggtccgcctcgttcggcgccgctacctgccagcgcttgccgccaaggccggggccgtcggcgcccggcgtcagcgccgacgagacgtcatagcgaaccgactgaggccgacgacgaggccatcggtggtctggtgaaacttgcagctttgggagctgggagcttggaggagtgaaggttggtgttggtttgccaagtttttgtgtgtgccgggcacgagacatgagaaggtaaaaaatgatatcttttccatgtttcttgtataatcgcttcgtcagcagtaacaagtaaataactcgtgagcctgtgcatgcactgcggagcgtcaggaattgtaagtaagaaagaatccttgaccaaaaaaaaaaaaaaaaaagcggccacagcacgaatacatgtgtaagatacgtgtaaggggcatgttcgttttggagcggaacgaagggaattggaggggctattcaaaattgaataggaaggtatttaatcctctccaatcgacatagcctaagagatcactcatgttcgttatgggtacatgaatgatctgaagttatatgttgctcagcc

SEQ ID NO: 40362 - DNA, 463 bp, Zea mays
  Clone ID: MRT4577_136814C.1
ggcccagggacccggaacttttaattcattgcaaaaccagggggaggccccaaaaaaggggaaaaaatccttgcaagggggggggggagaaaaacaaaaacaatctgaaaggggacgggagcaaaaacaaaccaaaaccgttttttaaaaaaaacaaaaccatttccctaaagggggctaccactacccccactagctacggggccgggacgttaattttggggggcctaaacccccagggggccagccgggggaccttgacgcccacccccccggggtaaaaaaaaaaaaggggcccgttgccccccagggccttttgggggaacaccctttaaaggaggcacgtcctgccgcccgggccaaagctttccaccagggagggggcaaacagggtcctcagcgcaaacgttttggttctggcgaagtcaaaattaaaaaaactggaaaaggggggcctgaaaac

SEQ ID NO: 40363 - DNA, 2952 bp, Zea mays
  Clone ID: MRT4577_136815C.1
gatctgggcatgcaagcttgcatggccatgtcttggtcagtcagatctgcgaacaaccaaactgtaaaaaagaactggagcctgtcttgtaaatcatggagcttgtggctgcttgcacccatgaaaaacatgaacgcatggagagctggttaaccagctaggtagataccatatctcatacatgggtatgatggtgtgaataacaataaaaaaacgaggtcggtagtccatgtctctggtcttagcgagtgtctgtaagcctgtgagatcctgggaaggtcctgcatggcgtggctcaataggaagttctgaacacccccgcaccccgttttcttcttcgttcgtcccggccgtgacatgcacgccttgacacagacggcctcgctcgttccccttccttcttctccacaccaccaaacccggcacatcacatacaccaggccaagagatataaagcagccgcgcgcgcacactagtagcttgttgcgcttgccggccccgagaggcatatatatcgtgaggagcaaactgatctatatatggtggtgaggcgggcttgcgcgataatggagggtgctttcagcgtgccgtactacgagtggctcaagccacggtcgtcgccgtcgacgtcctgctggacgacgacgctctcaacgccatcatcgatggaccgattattagccgccgttgctggcggccacgacgacgacgaggagcgcgacgctacgatgtgcttgccgcttcttggtaggctcgaagggagggcaaggactcccgagtaccatagtcctgtcaaagaagagctgagcaataataccaccaccactaccaccggcgccggtgttcacctgaccatcggcttgccggcgactggtggtgggggctacatgagctctgaagaggcgcccatggacgacgaagatgacgagcaggacgaggattatttcgagctggaggaagaggaccagaaggcaagcagcgaacatgacaataagtgcaagatggaagcagctggtgaagcagagcaacgtcggcccggtggagatgaggagggtatcaagagcttcgtcggcagccgcggccggcggtactggatcccgactccggcgcagatcctcgtcggcccgcagttcatgtgccatgtctgcagcaagacattcaacagatacaacaacatgcagatggcacagggccacgggcgcgagtacgctgcacgcagctcagtctcgtccatccagtgctgtagaattttctttggtctgttggcaaggcactctggccgcaaaccccacatgagagtcctgtaggtgacgatttggggtcgcccaccaagacaacccggtcgaccccgggctgggtgcgcccctgcgcgccggccggggggccgggaaaaaatctcctaccacagcactacactaccaccgtttcagtgctataggataggattttcttttgacggccatgaaaccccctcagctgccggccggggagcgctcctgggctcacgaggtcaagcaggccctccgtgagaaactccggcgctcctacggcgccgcctccgccacaccggcggccggtgaaccgagccgtggcgccgactgccgtggctcggccgccgaggaccccataaggagagtcatgttcttggctccctggggccacacataaaacacagacccagatctgggcttgcaagagcatggccggatctgcagagaactgctcaaccatacttaaaaggaactggagcttgtcttgtaaactatggagcatgctgcttgcaccacgaacatgaacgcatggctggttaactaggtagatatatgggtgtggatgggggagagagaaaaaaacaaggtatgtagtccaccgtctctgatcttggatggagaggcatgagatcttgggatgctcatgcatgggccatgggtgtggctgagatctggaacttttgtagccatcaacttgttttccagaaaccatgtaataagggggacctgtgtatagctatgagacatcaacaaatcttgctgctttgtgtgtccaaaaaaaaaaaaaaaaaaaaccctagggcctaaaaaaaaaaatatttccagaagagttttatcctatgctctgtccaaaactcttactgtcttgatcttttcagctgtgtttaatcctacagccatgagaggcaaacatgctcatgaactgaattcgtgttttcttcttgcaaagaaacgtctagaaactgacatggctgacaaaataatgcaacggctttgcatgtcaaggtgatttgattcagttggttctgaggaaaggccattttcatttccctatgatctgctgggattttaggaaccatgaatccagccagctacgtgcccacggaagattaatgatctcaacacttgcaaatttgaaacaacaaacctcaaaagatctcgggagttcagtgaagatcaaagacaaaacctattaaaagctgcaccctgcgataaagctgagagcttcttttcgttgctataatttggacagaacacagaagtcacccaggaaaaaaagaagaataaaaggagaccctttataaaactggactcctcttttcctatggattaatggcctaagaatcctattctaaacaataatgaaaaagactgtctcccacttgcaaggggcaagccaaacccagtgggccagtccccttgcttactttctcgagcaccttatcttatctccagatatacacaaagaaataacaaacgatatttgggaaaaaaaaaaaaaaaaaaaggcccctagggcctagtccccgtctttgtttttggatggaaaggcataagatcttgggatgtggctaaaatttggaacttttgtacccctcaactttttttccaaaacccatgtaataagggggccctgtgtatagctattagccatccccaaatctttttgctttttgtgtcc

SEQ ID NO: 40364 - DNA, 1705 bp, Zea mays
  Clone ID: MRT4577_136816C.1
cctcgagccggcgggatacatgagtcctggatttttcggacacgggcacacggcttcacagttcacacggcgcggagcacaaccgccgcgggccccagcgcgctcccataaaaaaacccgccgcaccgcgccaccgtcccaccgtcccacctggcctcgccaatcgccatctaccctattccccgggcatcggcgaccgggacgcccaaggatggaccgcctcgtcctcttctcccgccgccgccgccgctggatcctcctcgccgcggccggtgcagcggcggccgtcggcgcgtacaagatctaccaccatccggccgtcgcggagcgccgccaccgcctcgtgcgccttgccgccgccctcgcggccatcgctgacgccgccacgtcgtccgccgacgccgcggccctggtggtctccgatctcgccgacttcgtccggtccgacgcggacgaggtcccccgcagcgtcaagcagctggccaagcttgctgcctcccccgaggtctccgccaccgtctccaccctatccgaggcagtaacctccgggatgcttcgcggggcgggatcctctagctccgggcccggatctggcggtaccgtggccctctccgatcgtttcgtagacaagctcttctctgattcaggcgagcgtctcgcgtccgcggttgccggaagcttcgctcgccatctcgtgctcgcctattactccgctccttcacctcaggggggaggcgtcctcctccccgacggtgtgggtcaacgtggtcgcgactggaaagtgccggaaggcgataagcacctgggttgaggtcttcgtgggcaccgcggttagggagttcattgacaagaccatccacatcaacacctacgagcagatcttcgaagggctcaccaatccgaaacatgatgccaaggtcaaggaattgcttgtttcagtgtgcaatagtgcggttgagattttggtgaagaccactcaccatgccctgtacaatactaatggcaacttggatgcaaatgatagttgtagtggcagtggcaatgacaatggagttggggaaggttgggtggagagggtgtcgagcacattggcagttcctagcaacaggaagtttgtgcttgatgttacagggagggtcacatttgagacggtgaggtcatttctggagtttgttctttggaagctacaggatggggcaaggaagggtggtgactctatggttgacagtgggctgcgtgtcgtgaggtatatgagcgataagtcgatggttatcgctacgatctgcattacattgtgcttgcatgtgttgaatgggactaggctcttggtaacagcttaaagagcgtaatcgtttgcctttcctatttttgcacattgtttgtataaaactgtaggaaccatacttaaactgtagatcagaaaagagtggaaagaagatcaattatgcagcataagtctgttatgcatgtatacttgagattggtctgcacgactttagtgagcgagatgtggatctgtagtactgcctctttgcaaccctatttgtgggattaattggcatttagatgcctgctgttattgaagccttttttttaaaaaaaaacaagtatagcattactaatattgtggggggtcaagttggaccactaaattatgtgcttttgtatcttgtcaccaatgatgtaaaaagcttgccttttcacg

SEQ ID NO: 40365 - DNA, 124 bp, Zea mays
  Clone ID: MRT4577_136817C.1
caggaatttatggacgcccgagttatcagctcgcgttgactacgtccctgcccggtagtcacaccacccggcgtttctaccgattgaatggtccggtgaaatgttccgatcgcggctacggggg

SEQ ID NO: 40366 - DNA, 552 bp, Zea mays
  Clone ID: MRT4577_136818C.1
aggagtgggaaatggccgcaccgaccacgttatacaaacgccatagggagtgctgagccggtgcagaccgtgtccgtcgcggtcttagataccagcgtagacacaacctgctagacccacaatgctggcccgagcataatgctcctcgagttaggccaaaaaatcgggcctcagaccgggctaccggatatcgggtttcattgtgcagtatggtacgtgaagcacttaagggtcgacacggggacaagacacaaggcaggctttgacgcgaaatctagggagggttaccagctgttatggcatgaacgaagggacgatcgaaatctatggagggtcacgagctggcggcagcatgatacgagtgaccggatgtttttcctgcagggtactagtactacaatgacgctggaccaggtcgaaaaagttaaaagaaaaaggaacaagcggaggacaacaatggaacgggaaccaacccacccagctcgaaaccaaaacggccgtgatgaatcggtcagttttatttatgcatgccatatgtcatggtagcatatg

SEQ ID NO: 40367 - DNA, 384 bp, Zea mays
  Clone ID: MRT4577_136819C.1
ccccacccgagacagtcaccaaacgccgctgccccatctccggattccgctcctaaaaccccgccagtcagcggtgccgccgccggtgacatggacgacggctacactcccaaacacaaatccgtcccagattggctgaacagcccgatctggtctgagcgtccgccgactccactccacagctcccttccccgcacggaaccggcccccactcagacgccagcatctcctctgccctctcacaagacgcggcgggatccgactcccatccctcctcccaacgccccacgcgacaccgatgtctcacaggacgaaggctacggcgcgggcacatcgtgatgcagccaccccgtatctgagttcaacggcacgctggatacgaag

SEQ ID NO: 40368 - DNA, 365 bp, Zea mays
  Clone ID: MRT4577_13681C.1
aaaaccgcccaacagaagtttcgcccctgcaaaatttttaatccccgaacaaatccccccaaaaaatgcaggcagggcacaaattatttggtgaagggggggcttttttttaaacattattttaactccggccctcactaattattccaagggcatagcataacttaaaaagttctatgggggggccccgcaagggtttataatcaaacagccttgggctggggcttaagccttttaaatggggggtttgggaaaaccccagcaggggcgaccccggtcccgggtgggttgatgggaaaaacaggggtcctgaaaaacaaaaccggggtcacaatgcccaccacacgcttgacccaattgcccac

SEQ ID NO: 40369 - DNA, 313 bp, Zea mays
  Clone ID: MRT4577_136820C.1
accatgacaactaagatcataacacataccgggcctggggagacaattacacacactggccaaggtagagcatcccatactgcatacactactggccgtgggataagagaccgacactgtgaagctactggatgcctgtacctaggcaaagatagctacacgaaaagcagctcggtttcggcaatgcggccacagatgctaccaccatgggcatcatcatgagcactcatgaacaacaccatcatgaacatgacgatgaccaagactcaccaacatggtcaaacgccaagggaagataaacctgaacgtcaag

SEQ ID NO: 40370 - DNA, 229 bp, Zea mays
  Clone ID: MRT4577_136821C.1
gccggccggggccgggcaagtatgagaacagcgtggggtgcggaagcgaccgcaccgactatggatactagaattttttgcccaaaaagagaatcttccaacaagccatgttctacaaagaaacaaggagggggggatgggcagaaactccctcctctactttcagaaggacccccaaatctacgtgagacacctcatcgagttgctcttcttcatgactatctacact

SEQ ID NO: 40371 - DNA, 907 bp, Zea mays
  Clone ID: MRT4577_136822C.1
gcccgtgtgctggccatgctgggcctgatccccttcccgtaactgactaagggcagcccggttccagcaaccacatctgacatcaaccatatcgcggcccgatcgtatctgagcaaatccacaaagagtaccttgaggaacaagcagtcagggaagctttgccagctgtactggcagctacagggattgatccagaagcgggaaagaaaaaacgaaaacgtaatgatggctcgaagagcgcgaaaccagaaacggaaacgtaacgaagacaccaagagctcgacgcctgctgacacaccggcagaagccacatacaacatgctgaaacggaagggacttggttccaagatcaatgagggagctgttggcgaattatacaagactaaagatgaagttgagagcgcgagtaggaaagaagagatggagttcgacgcactgtttgggccggacaacgctgatggcgagacggtcgatgatggtggttacggctatgggggctgcggcgatggtggcgcggaagcctacaatggcattgatgacgattttgatttctaggaggatgtgttatgtgtagcagcatttgcagctgaccagcacgggctagattcttcatctgtgcgttatagtttatagttagtttcatttttcttttgttaggggagtttgaccaaatcattatggagctattggatagtgcacttagttttggttgtataataatgttgggaactaggttctgcatgggcgtcgtaactgtcgcaagccctatgtggtcaagcgcctataccatgggcatttgttgtacatcccacctccaaaagattgcaagtggtgatgtaacattttgtattagcaataaaggacacaagaatgcattcatttgaagggggggcccggaaaaggtgac

SEQ ID NO: 40372 - DNA, 348 bp, Zea mays
  Clone ID: MRT4577_136823C.1
gatgagctcgagcagatctttccttgagtctgagacagagtggtccagccatcaatttgtatcgccacaggctgtctttgtatttccatagggcgttactcaccagcagtggtatctgttcaatgactttcttattgaacctattgataaggttagttgcaacatgttctgtttcttctttcatttccccttttcctagcatccttatctttagggctctatagaatgccaggcagattcaacagggagggaggaaggaatcctcaggaataagaaccattagcacttaaaaatagcacctgaaaaaaaacaaaaactagcacctgagtcctggcctccgtctgaagt

SEQ ID NO: 40373 - DNA, 682 bp, Zea mays
  unsure (1)..(682): unsure at all n locations
  Clone ID: MRT4577_136824C.1
atccacgttcctccctcctccggttctgcccctgcgccgagtccccttctaacccgcctctccgcccccatatttttctcctgcgccaccggatctccaacccgctctttcttccgtctggatccgtgcctgtgatttctgcttgcatatctactgcaagattccttgcggccggtaggtttttgacaggaaccagtaatggcggggaggtccaatatcccggcgaacaactccgccctcatcgccatcatcgccgatgaggacactgtcactgggtttttgatggctggggttggcaatgttgatctgcgcaagaaaacaaattaccttcttgtagataacaaaacgacagtgaaacagattgaagatgcatttaaagagtttactgcaagggaggatattgctattgtgctcatcagccaatatattgcaaacatgattaggtttctggtggatagctacaacaagccaatccctgcgatattggaaatcccatccaaggaccatccatatgatccagcgagtgactcggtcctttctcgtgtgaagtatctgttttctgccgactcggttgcttctgataggcgttgagtagcaaccttgttgataacaggggcatcacactttgattgagntcttcgtggacttgctccgtgtatctgtattaaattattcataccat

SEQ ID NO: 40374 - DNA, 259 bp, Zea mays
  Clone ID: MRT4577_136825C.1
acaccgataaaatcatctatttataatggaattgaattctcccttgcttttgtaacacaagaaatttattaatcacaaattttattggcagcttccgaaactaaaaaggaactggggaagatttaccaaaacacattaacaaacattagctaaaccctgaatttgtatagtatgatcaacaacccattcaggaaaaaatgaatgggagatgggttttttcccacgtcattgggcattcatttgtccctttaaaggttaa

SEQ ID NO: 40375 - DNA, 203 bp, Zea mays
  Clone ID: MRT4577_136826C.1
ttactttagggcaatgaacaccatgggtggtctgatcatgcggaggtcgctagaaatgaaataagacctctacaaccaaaggatacacacgatactccattggtgcacaagatgtgtgatctgcttgatatggctgacgcgcgtatggaccaacaccatgcccgccaaaatactaaggtatatgtccagctcggccaacgatg

SEQ ID NO: 40376 - DNA, 337 bp, Zea mays
  Clone ID: MRT4577_136827C.1
atttctttatttcatcatctaaagtaaaggttgcagaagatttacagcagactttaaaagattttgtcatctatatcttttcgatcaaaaaaaaagaaaaaaaagaagaaaaaaaaaaagaaaaaaaaaaaaacaaaaaaggaaaaaaaaaaaaaaaaaaaaaaaaaaaaagaaaaggaaaaaaagaagagaaaaaagagagaaaaaaaaggggggggccctcaaaggtgtcaagttggaataagcctgataggaggaggcagagagctcaaaaggggcaccaaaatgcaagtccagggggtgctttttaaaagcgtcggacggggaaaaacccggg

SEQ ID NO: 40377 - DNA, 480 bp, Zea mays
  unsure (1)..(480): unsure at all n locations
  Clone ID: MRT4577_136828C.1
tgattttctagggtgcatataaggtatagaaaaattactttgagagtgaaatagattgaggtttataaagacttttggatgtgctcttaattaggtgacaatactcttgtaccatgataacattgttatattagagccactatgttttttctctagcaatcttgtaatacctttttttgtggccaccaatattttctggatctcctcttaaatttcccctttaagtaaagagcaagttgcatctcccaatagtatgggcatatcgcaatcatcacttttcaaccatctttcctactacacacatgaggggtcagctttcatatatgtatcgagatatgggtattagggaaaatatatccataaaaataatattgggctatccatattaggggatagattattgggatgctagtggagattgagagcacctatgggcggggtgaatagngtgatcctgtaaaacttcaaaacttaagccac

SEQ ID NO: 40378 - DNA, 283 bp, Zea mays
  Clone ID: MRT4577_136829C.1
aggaagcatgcccaaatccaatattcaactattcaaaacccagatcagggacatgggatttcacaaccgcgatagggaacaccagttacactctagtcttagtggaaccacagatgcgtatgccaagactggggggaccaactatatcgcaagcgcctcagatgctttcttgcattaaatttttccgtccgagagggcaagggactaacaatctacacaccattgataaccgcattaggcttgacccagtaaagctacaccgatactgacctgttcaaactgt

SEQ ID NO: 40379 - DNA, 247 bp, Zea mays
  Clone ID: MRT4577_13682C.1
cccacgcgtacgcccactcattcggccaagcatccatggtcatactggtgagctctgaaatctgcactcagcttatgtactagcttcagagacttaggtgttagctacaagctgcacagttcacaattccacacatacgttccgttgaactgaactaatggtcgtcggctaggtccattgacagactaccgatcccggcgaggatgatgctgatgctagtgaaacttggagtggaggctgcccaact

SEQ ID NO: 40380 - DNA, 230 bp, Zea mays
  Clone ID: MRT4577_136830C.1
ccaatttctccaacttcgggtacaacatcacggggcaatctgtagatgtgcggaacaacgatcatcccatcatgaaaccacagaaagccattgtagaaaaatcccaagctattgcctttatgctggacgagaatgcttcccatcaggcaaaaaggtctgtatctgtccaggagctgcataacaaggtcaatgtccaggttgttcagcttgagaagcactgttcgccagat

SEQ ID NO: 40381 - DNA, 666 bp, Zea mays
  Clone ID: MRT4577_136831C.1
cggacgcgtgggcggacgcgtgggcaggatcttctgcaagaaggccggcgtcttcaccaaggtgctggaagcactctgcagctacaacgcgcaggtcaccagcctgaacacgataacgttctacggctacgctgagagcgtcttcaccatcgaggtgaaaggcgagcaggatgttgtgatggtggagctaaggagcctcttatccaacatcgtggaggtcccaagcaactgacgagattcccgatggcaacagctcgtagatagagctcacatgtttcagtgcagaaacctcactttcgacgaagaactctagcggtggagtgtttgtgcaggcagtgtgacaagagtacatggtcaaactggtttactgacggataaaggctggattttgtgttgaacgcatagcacgatgggcatcgaggaatgaacttgtgattgtggacaaattcacagttcctctccattgcgttcgcttccgttagacctggattctgtttgcaatgttagcaccatgatgatatctactgacccatgtaggcagcaagggtcgatcggatgctgtgctgtgctgtcctgatttcagctctcatagatagaaaagcaaggcagtcgtgaaaaaaactgtcatgctttgttaaaatgattcgaagtttagatcagtctgtt

SEQ ID NO: 40382 - DNA, 538 bp, Zea mays
  Clone ID: MRT4577_136832C.1
gatcccacaagtggaattgtggcggcggcggtcgtatcctcccgagttgctccctagacggcggccggtcctctacaggcggctccccagcgtctacccagtcggcggtcgggactcccaagacgccgctcgtcttcctccccaggcgccaggcggccgcggctcgtgttcgtccccaggcagccacgcctcctgttcctccccaggcgtcaggcggccgtgtcctccccaggcgtcagggtagagtcgtatagcgaggagaagaggcttggtgccaagaaactggcatttcgatttggggagtggctaaattcgtcgttgtggtcaagaacaggtaccacaagatgaggagcataaaggatgctacgatgagttcagagagatctaggtcgtcgtctcccagtcaactttggttgtagaggatcgttgtcatcatatgatgtaatttattttgctattttgtacgtaacccttattatatgataaaaatatgacattgatttatacaaaaaaaaaaaaaaaaaaggcccctagggcc

SEQ ID NO: 40383 - DNA, 823 bp, Zea mays
  Clone ID: MRT4577_136833C.1
aattcacaaatcgcccctccttccatcgtcgtgccctagcgctgccgcggcctcgccgccgacgcctcccccaccccccggacgagcccctcgcctctgccgcgcgtcgccgccgccgtagacgttcccgtcctacctcgccgcgcagtcgcgaccctgcccccgctctgctccgtccgcgactccgccgttggtcttcgagaattttcagatttgctggtcttgtataaccttttcttcgtgggtgtatcaagatgtctggaaatgattctcaggctgcagccgacagaataaaggcacaggccttatcaaatgcaaagggattgagcagggctcaagctgaacgtgcagcggaagctgccgctcgcaatgtcaatgcctatgggcagaaggaagagggaccaagtcgctggcaggagaggaaggaagccaagtggcagatgtatctgatgagtacagagaaggctgtgaggctgggtgtgaggccaaatgctgcaccagcttctgcaactgctgggggccaatgtcagaagtgcttccagcctgggcactggacatacgagtgcaagaatgaacgggtctacatatcgcggccctcaaggacggatcagcttaaggaccccaggttgaagaaggcgtggctgccggcgccctctcagttcgtgaaccccgatctggagaaggagatggaggaggaaaggaagctgatgcgagaaaagctgaagaaggatagtctgagaaaagaaggcaaggagcaagtccaagagcaagagcaaacatcgcgcgtcggtgtctgactcagactcagactctgaatcatccg

SEQ ID NO: 40384 - DNA, 804 bp, Zea mays
  unsure (1)..(804): unsure at all n locations
  Clone ID: MRT4577_136834C.1
ccggccgcgacagctgagaaccgcagagacaggcgtgttcgtactcgcctatctccgcgactcaagctttccccaatttccccccttcttccatttgtcaccatccgtgccgttcctgctgtacaacaacacgcacgcgggagggcatacatgatccacatacatcggactggtattcaagcgcaaaacgcgcgctgtgagctgtactgcctcaagcatgccattcaggttgatggccaaatgcccgacgctatgtccattgatgggttcgtcgtacccataaacacactcttcagagagacggacgcatgtgaagtacattacacggcgcagcacatgctgagaatgctccaacggagctcttcacagagacgacataccatatcatacgcatgatggatcctgaaaaaagtacgataggaaagtcacatataggaggcgaaggtaatgcgaatgattacatacgattgtgagattatgtaacctacagcataaggggcatcatcaaatatagttcttgacggtgaataaaataccacatgagtgttctgtatgtaccataaaccaaatccagcttcacttgcaacaaggaaacatccaaacagtgatacaccattcaatagcaacatcgcacatacatagttgtagtatgctggctttgctgcagtaaagcaaccacgagatcatgttcatgaaacaccaatgaccaaacaaatttaacaaaagaattttgaaacatacagatagtaaccgattaccaggcagnctgtttctccatcttgaatgatgcatgaaaaacatcaa

SEQ ID NO: 40385 - DNA, 388 bp, Zea mays
  Clone ID: MRT4577_136835C.1
ccttattctttgttaacttaggcgacagtctaggagccggtgaggattcagagagctaggagagctccccggagagcacgaggcgcacggaagtcaggatctcgcgggaagagaaggagggcttcttgatagaccgcgcgagcttggcgggctcagaggcgagcttctcgaagatgtcgttgatgaaagagttcatgatggacatggccttagaggagatgccgatgtccgggtgcacctgcttcagcaccttgaagacgtagatcttgtagggctccacgctgttattgcccttattccggcccctctagccctggccgccctgtttgccggaggactagcccagtgggacacgcttcttcgacttgggcttgttcccgggcggcgc

SEQ ID NO: 40386 - DNA, 367 bp, Zea mays
  Clone ID: MRT4577_136836C.1
attcggctcgtggcgattatggaagttttatggtgaagaatgcctctctctacctagctgtggggcttgtggcggtattttaatagtctgcaaatgacatgtgccagcaagcctgttacatcatagcgggctatctaatttctggcaatacccagctgtcaactgaccaaccctcacgtgttcatccgatgtctctggtaatgggttctatctctccatgattacatccatgcagaactcattgctattgcagatcaaggttttcatatttatcttctttagtcattcacctcgagcgaagagggaggcaagaacaaatggatgtatgccgttccacccacgggacgcattcaaggcacatttgagc

SEQ ID NO: 40387 - DNA, 521 bp, Zea mays
  Clone ID: MRT4577_136837C.1
agaggacatgcgagcccgtggtttaagaagggtgtgtcactcaatgcaagacagtctgcactacaggcacatacattggttgcacttcgccttcttctccttgatgagaatgcatgcccatggcgctcctgcttctctttgggtacctagtacttcatattgtttgcggcagaataaaaggtgagtgcaagcaaccagcaggcctcttccccatacacacactgcaggctatagctgaccggcagcgcgaggggaggaagcatgcaataagctttcatgatgatctatctacgtactagctatcccacattttcttattatattttcctttgtttaattcagtcaaaattgtgtctttctcgtcgcacgcatgtcgtcgttcagaggccggcatatgcgtattattgtactttctccatatgcatgcatatggagaagtgcagacatatatatcatgtaatctctcagcacagagggaagttgtgtattcaataaattatataaaaaaatttcgttcctat

SEQ ID NO: 40388 - DNA, 366 bp, Zea mays
  Clone ID: MRT4577_136838C.1
ttaatccatacagacgaattcctgtagctccggaggcaacaaactgttaccccaacgaaccagtgctacgtgaggtcaacatagccacaccctgaggctaatcgacttcgtacctaccctggttacagaggtacataccagagcacattgcagtcgaatgctgagacgctaaacatgtttgtgtatcactataagggacgcgcagaatacaaacacgtgccaaatggtacgcaggtacgggactaggtcctaccgtagcatgcacgtctcctgagacacaagtactgagtcacataatcgctgactcatgcgggaggaactagaactgctcggtttgtccatttgtgacgtgatctgtacatggcg

SEQ ID NO: 40389 - DNA, 193 bp, Zea mays
  Clone ID: MRT4577_136839C.1
aaaaataaaaaaaaaaggacttcgactacacaaaacaccgcagaggatatcagcgttccgggggaagggaagggcgactccagcatcgtggttgataactagaacgtcctcggttatgatccagtgctggtacctttacagcgtttttactgggaacaccattacatttcgcagcctggtcatttttaacgac

SEQ ID NO: 40390 - DNA, 439 bp, Zea mays
  Clone ID: MRT4577_13683C.1
ggccactatggtccttcgcactattcttttgcgcgggctgtacttcccctggggatcagcctcggcgtgccttatatgggggcgagctgaggagcaaagcggacaacaagaggctttcgatcgatctccctacctatctctctctctctgctatcccttccactgcttacctacccactagcttttagtagaaagaggagggccgggacgtggtgacaaggctaggctagcttggggccggcggagatcgatcgtcgacgtcgacggccatgacatggtgcaacagcttcaacgacgtgcgtgccgtggaggacaacctggccaccgccgacgtcgccaagaaacagcatctgcaggcctgcttccacgtcaacctcatcaggacctgcccctcctgcggacaccgtgcgcagtatgacgaacagcgatcggatcgtcc

SEQ ID NO: 40391 - DNA, 344 bp, Zea mays
  Clone ID: MRT4577_136840C.1
cccaaaccagatggggcttttttttgggcccaactttgcaaaaaaaaaaaatatccggcctttgaaatcggccctaaaaaaccacccgttgaaacaggggggtccaaaccttcaaaatcaaatccccctccggggccgggtgggcccttagtttttcatggaaaaatcaagcttactgggcctttggaataaaaaaaggtatcaagctgggacgggaaatagaacctgcccccattaacataacggatgcttttaatctggagggggagataactccaggcaaccctggggactgggtttccccctgccacaaccagaagctatcccctttttgggaaaagggc

SEQ ID NO: 40392 - DNA, 589 bp, Zea mays
  Clone ID: MRT4577_136841C.1
gcgacgcccggcggcacgcagaaggcgcgcccggagtgcctctgctacatcatcccagcaggtgcacgcggggcgcgaccaggtgcagtcgctcggcctgcgcttcgaccgcctcctggcgctccccgccgcctgcagcctccccaacgccaacgtctcgctctgcatcaaccttctgaacctgaagccgggctcgccagactacgcgctcttcgccaacgcctccaagatcacgccatcagccggaggcagcccggcgagcgacagcgccgttatcaggctccaggctggggtccgaggcagcgtcgcgctcgccgtggtctctgcgatcgtctcgtcagtcttctgatccgaccgatctcctcagaggactagaggagaagaagcggttcttacactccgtgtggattcgtcgttctcatgttgcgttccactcgtcgatgtctattttgtatttgtaccccacataaaaaaaatagatccagatgatacttgtttcccccgtccctgtggctttaactgtaacctcggatgtttgaattagctaattatgtataaaaaaaaaaaaaaaaaaaaacccacgcggccg

SEQ ID NO: 40393 - DNA, 453 bp, Zea mays
  unsure (1)..(453): unsure at all n locations
  Clone ID: MRT4577_136842C.1
cggctgtcgagaaattggctggtttcctgctttgctagtgccaaccactgctgcttgtgacttgttagggttgaattgctagttgctactagttattgcagccttatctcttacttcaaaacataataaattattggcagcttgtgatgtatctttaagtttccttaaagacagctctgcagacaagatgtcatctgaatttgtgattagacatacagttctattttgtgacactactaagactgtcttcagtagatcgtgtaaaataggggacgcgaaactgtagatgacactggttgacactgtttgcagagtgaagtttgaaatagaggatgatataggagatgtgataggggatctgctggagatggcctaaggactagggatgaaaacagtttcggaatttttcggntttctggaaaccgnttcgatttttttagaccggatttaccg

SEQ ID NO: 40394 - DNA, 398 bp, Zea mays
  Clone ID: MRT4577_136843C.1
atttcagtactctcagggtacctggttgatgccattcagggtgcgtctgaatcattaaactggccagtggcctttattagtgttattctgcttcctattgtggggaacgctgctgaacatgcaagcgccatcatgtttgccatgaaaaacaaattggacattacattgggagttgcgatagggtcgtcaacacagatctccatgtttgtgattccattctgtgtggtaattggctggatgatgggacaagaaatggacttgaattttcaactgttcgagacagcgactctctttataactgtactagtggtggcattcatgctacaggaaggcacatcaaactattttaaaggtcttatgctcatcttatgctaccttatagttgctgcaagcttttt

SEQ ID NO: 40395 - DNA, 2352 bp, Zea mays
  Clone ID: MRT4577_136844C.1
cgaataacctagaaaccgcagaagtatggcgaatgtatttcgatggctcgttaaagctgcagggagcaggcgcagggatcctctttactgcacctggagacgaacacctcagatatgcccttcagttgttatttccagcctctaacaatgcagcagaatacgaagctctgattcatggactaaacattgccatatcactgggcatcaagagactgatggtatatggagattctctggtggtcataagtcagataaataaagaatgggattgttcgaacgattccatgggaaaatactgcactgctgtccagaaactagaagacaaatttaaaggtctggaatttcaccatgtagagagagatcgaaacacggtgtaacgtccaaaatactattttggggattagaaaaactctccataaaagattttaaattaaaatgttttgtaataaagattttcctttaattaagtagatcggttattacataagactattcctattagtttagatatataaatagaagcatatatatacatggataaaatgataaataataaaactaaacctttcatatcattctagggtttttgtttgtgcatttggattgaagttaaacctccaactcagattaaaagggatttaacttttgagttcaaatatgaaaatagaattagcaaatagaatagaaatgagaaaaagaaaaaaatctccatccgttgggccatctccttggctcaaaccagcccacacgtccttgccatacatgattttcccctttctttattcccttgccaaaaatgacatcaccatatcatcatgggtgacataagcaagctaattcctatcagcacctgcgtaacaagccgagccggatttgaggttgaatcgctcgtaactgccacgcgagacccacgttccagccgtatctccttcgtcgaaccggttgctaaataacactggcaccgaaacaaaccgcagaccgagtctaccgccgagattacctcctagtggttgtaacaaattctgttggagctctcggtgttgagcatatatacgagcccctgagcctcccccccccctcatctgcccgtcttggcaagtcctgctgcttgttctgaagacaccttatccgagcaacaaccacaccgcagagagagctccatgtcgtcgcctagcgttccacgcccgcatgtcattcggagattgtgatgcggtaggaaaaaaagggtggaaagcgccagcaagcagaacggcggaagtcatggcgaggtgccagtaccgtcccgtggtgggcctccgcaccgcagtccgcattccatcgcgaccagggagctcttgctacgaattctggtaagtcactaccatatatggttcgcctcgtcgtcctcatcgtgtagcaccattttatgtggggttttggcctttggtatggttggaggggggcctcgccggtgatgccccgtcgggtagggcgatgcggcatcagccgtggagtctggggaagaagatacaccccccaccgttgatctctctgcgaatgactaggattagatctaggtgtgagtgtgctgctgccgtcgatttggtagcgaacgggcaagatcatgccatcggatacctcttcggaatattaaatcaggatccttgatccatctttggacgatcgtgatcgactcggggttgctttagatctaggccataggtttgtgattgggcagtcctgcgctgtccacggattcataatgcactagatctaatctgaaccatcgggcgccgatccaacggctccgatcctagcgtaccccttcggcctggctattttgctaaagaacccttattgtttacagaaaataacccgccgtccgcgttggctgtgttatgagtcttggtgtcttttgcgcagaaccccctgggtttctgataaatagtggccgcagtccaagtaactcagaaatctactaaattaaatacagaaattctttttaatacaaaataatgtcccaaacttaggaaattcataacttgatgaatttagctccaaattgattcattctagtggcaataattttgtattaatattttctatcaaccaataacactgtttagccatgaaacttgaattaaaattgttcatttggattaatctattctaagcgctaaataatttcggaaattcataacttaataacagtaactccgaatttagtggttcttgtttctacgatctcgttgcgcagcgtagaatattattatgcaatttgatcttatgtttggtgtgatgttaattttgcctataccatgtttgtctgtattgctacgtttagcagtgaggacacgtgtcacctgcaagttg

SEQ ID NO: 40396 - DNA, 1101 bp, Zea mays
  unsure (1)..(1101): unsure at all n locations
  Clone ID: MRT4577_136845C.1
cctccgtgttcattaacttgccatggcctttattagtgttattctgcttcctattgtggggaatgctgctgaacatgcaagcgccatcatgtttgccatngaaaaacaaattggtaatttttgctccttccttttcacattttgcaatttttacaaaacgaattcatctttagcctcactttcccatgacaacaggacattacattggggcttgcgatagggtcatcaacacagatctccatgtttgtggtaataataataggaattccataataatacatagtgtaacagatacaacaactaccctactctggttttacaatttttttgtcattagccaaatcatgttttagacagtagataccacctttttccaataattgttctggtattctttttcatgatcttcagattccattctgcgtggtaattggctggatgatgggacaagaaatggacttgaattttcaactgttcgagacagcgactctctttataactgtactagtggtggcattcatgctacaggaaggcacatcaaactattttaaaggtcttatgctcatcttatgctacctcatagttgctgcaagcttttttgtccatgtcgaccctgatgcaacaggtgataactaagtgacaaatctgcttacagcatacctgtgaactgaatggagaggctacgacctaactgcagagttagccaatagcattgccctgcgtagataaggacctgcaagagtcctgaatttggaagcaacttgtgggcagaatctcggaccgagggtttaacttggggctcaagattacaaggagctgatgcagcttttttaggatagcaacagcatcgcccgttgaggaactgtaactttatgtgacggaatcacaaaaatttaccattgtatttgttcaagctacacgtgccacagttttttatgttgtgattggtaggtacggggaagttagacctctagtgctattgggaagaaaattaccattacatttatttaatatattttcctttttttccttgtaaaaacttgcaaatctaggcatatgtcacctgttgggttgcaaaaaaaaaaaaaaaaaaaaaaaaaa

SEQ ID NO: 40397 - DNA, 423 bp, Zea mays
  Clone ID: MRT4577_136846C.1
actgaaggcacttaaatgttgtattttatgtcataaaagggcaaacatgttaaaaacagataggtccttttatcaggatcatcattttacagaattggaaattggagccctgaaaggttcagtgatttgcctgaggagatcacagctgggaagtgatggagtgagggttcagactgtcttccttgtccatgcacttatccattgcctctactgtatcgcatgtgagtgtgcatgtgtgtataaaaatgtgcttctgattgcctgtaggagggttcacacgttgcagagcattagttctaggtagtgttaacagtttgctgcggccctttctgttaagtttcataggtgtgcacacatacatgagcaatagtgggatcatgctgtatatccagtttggatctttttgcactttgattggatatc

SEQ ID NO: 40398 - DNA, 535 bp, Zea mays
  Clone ID: MRT4577_136847C.1
tccggggacagcgaaggacacaaaaacacaggtagggttaggcgacgcggcggcgagagcgcgagagtaggaggaggcgtcggccatgacggggaaggcgaagccgaagaagcacacggcgaaggagatcgccgcgaagatcgacgcggcgacgacgaaccggggcggcggcagcctcaagaagtagctggctggcttgcctgcctgactgcctggggtaattcccttcgatttcaatcccatccaccgacccgatctacaatcaatcaaagtaccgcccgccctccggcctgcggtgtactgttagtctgctgctgcttcttatcgttgttatattgctgatacatgtctcgcgtgatagatgtgcaactatatatcagtctcgtcgccggcaacactggcatgcttaaacatgtgtcgctgctgctccgtgatgccggcgacggctgctattagtgttaatgttagtgtcgatcgggtctccttgaacaatggcaggaatctgttgcttgtttactttcttctaatggcaagt

SEQ ID NO: 40399 - DNA, 437 bp, Zea mays
  Clone ID: MRT4577_136848C.1
ctctaattagctaccacataaagatcttaatttttagaggtatttttatcttccatagcgggttgaaatagaaaatcttggcattattaataagagcattatacatcgaacggacgtaaaaagcctcgaggttaacaaattccatttgaactcatctcttccagtggatagatgagtatgagcaaatctcaagaccaatctattccaacataaaagattaccacccaccagcgctctacgaaaagaaatgtttagaggaatcctattaaaaacattcgccactgtatcgctttttttatgagctatattatataaggacggaaatttcagcattagaggtttgttacccgtccacgtgtcctcccaaaatctaatctgcttttcatctttaagaataaaggaattgaaagggaaatatggtctaacctttttctaaa

SEQ ID NO: 40400 - DNA, 572 bp, Zea mays
  Clone ID: MRT4577_136849C.1
attatcgtttatcccgtcgcatgctgcagactcactcgccactccccgatcccagattctacaaccatctccccgctgcctcctccattctcaactatgaccgaatgaaccaaggaccatggtccgcgctggcgcctgacgacaaatggcatatggcctgtgtcccgtgatcgctaagtgcgatatgcgtgatgcttaccacacagcaatccggcacatggtagatgttccaccttccgctgaaaccctaaatgctgaaaggaggtaatatggagatgctgcatgccctcttctcactgcagaaggtactacaactgacgactgataatgctgcactgtgcactgtgtgcactgcatgcgtgatggattccccattaaccaggaaatggaaaatgaaaatgatatatctaatgatgaaacaagctacaaactacaaatatctgccctctaacctcatgcaccttgcaactgccaagtgctagggtctgccgacccaccacacaccaaagatcattgctcgaaacaagaagcaccatccaccctctataacagagaaaattgcctgatgcctg

SEQ ID NO: 40401 - DNA, 186 bp, Zea mays
  Clone ID: MRT4577_13684C.1
tttgtttggcgcaaggtggggtgacgcagggggggcttgatggctgtgtgggcattctacggcagagttctggggctcatacgacagcttcgcttggtgtctacctgggcatgatagtcttacctgggcaggatatgaagctgcttgactaggctgggattagcttgtgatcacagcatgacgttg

SEQ ID NO: 40402 - DNA, 819 bp, Zea mays
  Clone ID: MRT4577_136851C.1
ggtacattggtacctcgagccggccgggaaccctccagcgaaggacacaaaaacacaggtagggttaggcgacgcggcggcgagagcgcgagagtaggaggaggcgtcggccatgacggggaaggcgaagccgaagaagcacacggcgaaggagatcgccgcgaagatcgacgcggcgacgacgaaccggggcggcggcaaggtcgggcaggcggatcggctagggcaggacaagggcgggcacgcgaagctggcgtgcccgctctgccgcaccccggcgcccgacatcaagtccatgcagatccaccacgaggcgcgccatcccaagctccctttcgagccggagaagctcgtcaacctgcactcctccacccccgccgccgccgaggccaccacctccaagcccaagcccggggtccgcggcagcctcaagaagtagctggctggcttgcctgcctgactgcctggggtaattcccttcgatttcaatcccatccaccgacccgatctacaatcaatcaaagtaccgcccgccctccggcctgcggtgtactgttagtctgctgctgctgcttcttatcgttgttatattgctgatacatgtctcgcgtgatagatgtgcaactatatatcagtctcgtcgccggcaacactggcatgcttaaacatgtgtcgctgctgctccgtgatgccggcgacggctgctattagtgttaatgttagtgtcgatcgggtctccttgaacaatggcaggaatctgttgcttgtttactttcttctaatggcaagtaaagttccctaaaaaaaaaaaaaaaaata

SEQ ID NO: 40403 - DNA, 262 bp, Zea mays
  Clone ID: MRT4577_136852C.1
agcacgccttcgttctttttttctcctctagagaggaccttttttttgttttttgtctgcccgctgcacgacggtgatccgcgccgccgcaggctactactcggacgagctcatctccaccgcgatatctgcggtctcccctgagcgtggtaccctggcaatggatgagccatatgcaacatgcgtaaagaggccatcatctatctggcttggacatcacggaggtgaaccgcccggcttacaggcagctttcgctgacatc

SEQ ID NO: 40404 - DNA, 303 bp, Zea mays
  Clone ID: MRT4577_136853C.1
aaagaaaaaaaaaaaaaaaaaaaataaaaattaaaaaaaaaaaaaaaaaaaaaaaagaaaaagaaaatttaaaaaaaataacaacccctctaaaaaaatccaaaacttacaaacacatacatacaacaaaataaaatcttctatactgtcaccaaaatccaattcactgcccctctttttacaacttcataactttaaaaaccctcccttaacccaacttaatccccttacactacatccccctttcaccaactaacccattacctaacagaccctaaccaatctcccttccaaacattttcc

SEQ ID NO: 40405 - DNA, 297 bp, Zea mays
  Clone ID: MRT4577_136854C.1
tctctttttttttagttccaaatggaacatggatgaattttttaaacattttttacattttacgggtacaaatcttactctttggcaccccaaaggcaccagggttttattaatacatagtggtcgccataatcggggtgaaacttaacctattgaccccacaaagatcagggttttattgcatcaaaatggaccgccaaaagcacctggggctttcaaggaaggaccgcatgaggaatgacgcatctgatccatcaaaataaaaacgcgtaaaagctttaatgtttttaagggggg

SEQ ID NO: 40406 - DNA, 410 bp, Zea mays
  unsure (1)..(410): unsure at all n locations
  Clone ID: MRT4577_136855C.1
cgaccacacgcctccgccagcaatcaacatttaaaatnaaatactctancaacttataaaacaacaatcccaccgggatattttgcatacttatactcctttctctttcttcatgtatttctaacactaccatttctactcaatactcacaacctcctataacttcccttcttacaccataccttccatcaattaccacttcaatatctaaaaacccatcccttcaaccatacaagctccaacaagcaaacacatcaatcaacttacctttatcaccccccttctatcaacaatctccaaacctatcttttttacattcattcctacaaaccatcaaaacacaacatcttcagcaacttgctctaccaataatcaaccaaactaactcttcaaaccttactccctactat

SEQ ID NO: 40407 - DNA, 684 bp, Zea mays
  Clone ID: MRT4577_136856C.1
ccggccgggatccggcatatcagatcctgtgcagtctatacgctggactcgctgcatgcgacttatccgatgcacttggtggcaatatgatgaacgagtgaggaccgaggaatcaccgctgaagggcccggctgagcgccggatccagtgacccttccgtcatcgaggactgctacttggtgggcaaaacagtcgacggcgggctgatgtgcgacgccgtcatcatcctcttcgtgggctactgcttcggcggggagggtcacatcatccgcggcgcttaccgcgactactacggggaggagctcgtctgctccatcacggacgagatctacggcgaattcgagaggaccgtgagcatgagatacgctggacccagcggagcgcgaacggtgctgaccaacgaggctacacgaacgaggaagaccgaaaaccgtgtagtagcgaagatagtctgaacgcgcacatccgtacatatattcttgatcaggcaggctgatgacgagcggttcaagcgctagcttgaggaagacatcgatgagcacgtcactggggacctgcacaagctattgatgccacttgcaaggacttaccggtatgatggaccagaagacacacaagggtggcacactcacagcccaactacttgatgaggagagccatcacacggctaacagtgatgatgag

SEQ ID NO: 40408 - DNA, 303 bp, Zea mays
  Clone ID: MRT4577_136857C.1
aatttccgggttcgccaggctaacatgtcgggggccgccctttttttttttttttgttttttttttttttttttttattttttttttttcattggggacgttcttattcttttctgggaagcaaaaggggccaaaggaagacactactttatctatattttgcaaaaccttggtttcaggcgatgtttgttcatgagcatgtacacccgagatttattttacctttatgaaaggttgaaatcagatcctttagaccaattgggaagaaaacttttttttttggtcgactgacaaaagagggat

SEQ ID NO: 40409 - DNA, 367 bp, Zea mays
  Clone ID: MRT4577_136858C.1
aaaacaaaaaaataattccgggtgtttattttggtgttcaaattaccattacctgcccggatgatggaaggggccaaggccttttccattggtatttttctccccggggcaaacaagatacattagccgggatgaattctttcccgggggcgggcgatccaaagagaactcaaagcgcgttgccgggaaagggtgtcactgatcacaagccgcgcccgcgcggactggggggtggtcaacaccccccggatttgctcaaaagtctgccttcgcagaccggtagccttatgccccaaggttttaagagcgccaaggtttggaaccgccggcgccattgtccccgaacagtttggagcggggttttccc

SEQ ID NO: 40410 - DNA, 286 bp, Zea mays
  Clone ID: MRT4577_136859C.1
cagaaatgcataccacgctgtctacaaacaaagtgtcacattgtctgcatagaatgctcactccagacaagcacgagtttctgttgccttgttctatctgtaaactgtggaactattttaccttaaagcctgaaaacagttttgtggattaaattttcttcatgctgttgtattttctgatcattggcttcctaacatggttgtactacaatatatttggttgattgagttatacattctcaaaactcagtgaattctatgattttagagtatcatttgtttgaac

SEQ ID NO: 40411 - DNA, 563 bp, Zea mays
  Clone ID: MRT4577_13685C.1
catgaattctcagacaaagtcaaagggtcgatcaaaaagtttcagtgaagaggaggacatgttgcttgtgtcggcttatctaaatgttagcaaagacgctattgcaggacgaagccaaagttcttaggcacgagccaaagtggacatcaataaaaagtcccattatggtctcaaatttggatgctgaaaatggtactgacggtggcaccattaacaattctagacctcttggaaggaaggctgagaaggaaaatttgcaggccagaaagagggaagacaatgattatgatccattcattgaagaaatgaaaaaaattagagaatcaagagtgcagacagacaacaatcggaaggcacgtgatgacatgttcttggagctggagaagcataagcttgaacttgaaaaagagatggagaagcaaaagctagaccttgaaagagatcagcatgacaaaaaggtgatggaaactgacacaagtgggatggatgatgaggccaaacagtatttcaagttactgaaacaggagattttagctcgacgttttgggagtccacaaccatag

SEQ ID NO: 40412 - DNA, 657 bp, Zea mays
  Clone ID: MRT4577_136860C.1
aagattcatctacacaaattataatatactccgtgcgaaggaaagatcaaattagagattcattcgatcaattctgattgtttccttccattccaaaccaccttcaattctgatttctgcgggtgtgggatatcgtccccccttgccattccaaatcctcctctgcaattttctcatggcagctgacgtttccatcccaactcgatccgcgtcaaccgcccgctaattcctcctagttctagtcccctctctcctgcgccgactcatctttttcctcgtgtcactcccctgctgctgctgctgccgggaagatcaaatcccgtcaaaaggcctctctaccatttactctgctacctgagtgatgatgcaactgcgcagactgttcgtgttgctgtgaaggctccaaaggatcagagttctgtcaagatggcatgcccaagaggaaggacaccatttcccctttgtttctttctgatgatttgcctcatggctcagctgggagcttccaatgttgtactcatggcgaacaacactaccttgtcggtggatgatgtcgaggcaacttttactccagcagtggaaggttcaggtgtaagtggcgttctttatgctgtggaacctaaagatgcatgcagtccattgagagcgaaagcgatt

SEQ ID NO: 40413 - DNA, 1798 bp, Zea mays
  Clone ID: MRT4577_136861C.1
ccgcccgctaattcctcctagttctagtcccctctctcctgcgccgactcatctttttcctcgtgtcactcccctgctgctgctgctgccgggaagatcaaatcccgtcaaaaggctccaaaggatcagagttctgtcaagatggcatgcccaagagctccagcagtggaaggttcaggtgtaagtggcgttctttatgctgtggaacctaaggatgcatgcagtccattgagagcgaaagcgattcaaggctctgtctcaccttttgcgttgattataagaggcggttgccaatttgatgacaaaattagaaatgcacagaatgctggattcaaggctgctgtagtatataataatgaagataatgacatccttgtttcaatggctggaagctcgcttggtgtccagatatatgcagtgttcatctctaaggcatcaggggaggagctgaagaaatattcaggccaaactgatgcagagttatggataataccaacatatgagaactcagcttggccaatcatggcaatttcattcgtatcactgcttgctatgtctgctatcctagttgcatgtttctttgcgaggagacaccagatcagacgggacagggcaagacttccccgagctcaggagtcccatggaatgagcagtcaattagttaaggcaataccaagccttattttcacaaaagtgcaagaagacaactgtacatcagcaacatgcgccatttgcttggaagactacagtgttggagaaaagataagagtgctaccttgtcgacacaagttccatgcggcttgtgtggacctatggctcacctcatggagaacattctgccctgtatgcaagcgggacgcaagtgctggaacgtcagacccccctgtatcagagtctacccctttgctttcatcatccgccacacgcttgccggaatcaactgtgttggcttccttgcggtctacagcagcagcgtctccccccaggacgatcagccggcatcctttgttgcggtcaatatcccgcaattactctgtttcaggttccagtatccttcgcacccccgactctaggtttgatgcaaactcatctatctgcacaagtggaagcaacttggaccttgcaaatgtaccatccccatggtctggcacttggcaccgtgcgtctgctcactctttgtgcaggggctacttgtccccaccgatcggcatcaggaatacctcagcacatgtctcgcgttctgccaatggatctcccagtcgttacgtaggctcatcacgcatgtcccatggatcttcagggcagcagcatcctcacctgaggcactgcacattgtcaggcccgagcctgttcaccatggtgccccagtcaccgcaacagaaccagttgcagcatggtggatactcggaaacaaatctgtcggctgccgcatcggctcaatcattccgtcagctctacctgcagcattgccctgattctgacacgtcgtctcagtcacttccagggtgctgatctcttgctgcaatattcactgattcttgcgcccatgagaaatcttgcctggtgctgaattgacatgtggattttgagctcgtcagcatagttcaccatgatgataaaaaaaagagaaagaagtttggagtagttttacatgtggaaacaaaactgcttgtaagaagagagaatgtgcagccccagagtgtgagcaattttacatgcttgagtgtacaggggtttggagtagtcttggacttgcttattttgaggcatgtattgcagtcataggttacttctgctc

SEQ ID NO: 40414 - DNA, 935 bp, Zea mays
  Clone ID: MRT4577_136862C.1
taggggattgggtttctaaaattcggcacgggaagattcatctacacaaattataatatactccgtgcgaaggaaagatcaaattagagattcattcgatcaattctgattgtttccttccattccaaaccaccttcaattctgatttctgcgggtgtgggatatcgtccccccttgccattccaaatcctcctctgcaattttctcatggcagctgacgtttccatcccaactcgatccgcgtcaaccgcccgctaattcctcctagttctagtcccctctctcctgcgccgactcatctttttcctcgtgtcactcccctgctgctgctgctgccgggaagatcaaatcccgtcaaaaggccaatgcactttccgtacccctggagacgactctggatttcgggccatggaagtgctcttttcccatgactgggggaaagaaatccctccttttttgaaagcaggctgtgaaaagaaacgaaatcactttgacctgtgatttggttactctaggcctctctaccatttactctgctacctgagtgatgatgcaactgcgcagactgttcgtgttgctgtgaaggctccaaaggatcagagttctgtcaagatggcatgcccaggaggaaggacaccatttcccctttgtttctttctgatgatttgcctcatggctcagctgggagcttccaatgttgtactcatggcgaacaacactaccttgtcgttggatgatgtcgaggcaacttttactccagcagtggaaggttcaggtgtaagtggcgttctttatgctgtggaacctaaggatgcatgcagtccattgagagcgaaagcgattcaaggctctgtctcaccttttgcgttgattatataagagggcggtggccatttgatgacaaaattagaaatgcacagaatgctggattcaag

SEQ ID NO: 40415 - DNA, 2295 bp, Zea mays
  Clone ID: MRT4577_136863C.1
gatgtgggatagtggaccggatgacaaagcaagagcagaaaaaagaactttcaccatcctccctatcaatacaagattcatctacacaaattataatatactccgtgcgaaggaaagatcaaattagagattcattcgatcaattctgattgtttccttccattccaaaccaccttcaattctgatttctgcgggtgtgggatatcgtccccccttgccattccaaatcctcctctgcaattttctcatggcagctgacgtttccatcccaactcgatccgcgtcaaccgcccgctaattcctcctagttctagtcccctctctcctgcgccgactcatctttttcctcgtgtcactcccctgctgctgctgctgccgggaagatcaaatcccgtcaaaaggctccaaaggatcagagttctgtcaagatggcatgcccaagaggaaggacaccatttcccctttgtttctttctgatgatttgcctcatggctcagctgggagcttccaatgttgtactcatggcgaacaacactaccttgtcgttggatgatgtcgaggcaacttttactccagcagtggaaggttcaggtgtaagtggcgttctttatgctgtggaacctaaggatgcatgcagtccattgagagcgaaagcgattcaaggctctgtctcaccttttgcgttgattataagaggcggttgccaatttgatgacaaaattagaaatgcacagaatgctggattcaaggctgctgtagtatataataatgaagataatgacatccttgtttcaatggctggaagctcgcttggtgtccagatatatgcagtgttcatctctaaggcatcaggggaggagctgaagaaatattcaggccaaactgatgcagagttatggataataccaacatatgagaactcagcttggccaatcatggcaatttcattcgtatcactgcttgctatgtctgctatcctagttgcatgtttctttgcgaggagacaccagatcagacgggacagggcaagacttccccgagctcaggagtcccatggaatgagcagtcaattagttaaggcaataccaagccttattttcacaaaagtgcaagaagacaactgtacatcagcaacatgcgccatttgcttggaagactacagtgttggaggcacgagaagagtgctaccttgtcgacacaagttccatgcggcttgtgtggacctatggctcacctcatggagaacattctgccctgtatgcaagcgggacgcaagtgctggaacgtcagacccccctgtatcagagtctacccctttgctttcatcatccgccacacgcttgccggaatcaactgtgttggcttccttgcggtctacagcagcagcgtctccccccaggacgatcagccggcatcctttgttgcggtcaatatcccgcaattactctgtttcaggttccagtatccttcgcacccccgactctaggtttgatgcaaactcatctatctgcacaagtggaagcaacttggaccttgcaaatgtaccatccccatggtctggcacttggcaccgtgcgtctgctcactctttgtgcaggggctacttgtccccaccgatcggcatcaggaatacctcagcacatgtctcgcgttctgccaatggatctcccagtcgttacgtaggctcatcacgcatgtcccatggatcttcagggcagcagcatcctcacctgaggcactgcacattgtcaggcccgagcctgttcaccatggtgccccagtcaccgcaacagaaccagttgcagcatggtggatactcggaaacaaatctgtcggctgccgcatcggctcaatcattccgtcagctctacctgcagcattgccctgattctgacacgtcgtctcagtcacttccagggtgctgatctcttgctgcaatattcactgattcttgcgcccatgagaaatcttgcctggtgctgaattgacatgtggattttgagctcgtcagcatagttcaccatgatgataaaaaaaagagaaagaagtttggagtagttttacatgtggaaacaaaactgcttgtaagaagagagaatgtgcagccccagagtgtgagcaattttacatgcttgagtgtacaggggtttggagtagtcttggacttgcttattttgaggcatgtattgcagtcataggttacttctgctcaatagtttatgtgttgcctctgaaaaattaaacaagcgaaaaacttttaccgatatacagctttgtaggaatcctagttgctgt

SEQ ID NO: 40416 - DNA, 314 bp, Zea mays
  Clone ID: MRT4577_136864C.1
ggaaaagggaatggactggtccattttttacataaaaatatccaagggttttttccccaattttttggctactggtttccaatcaagtaaagctttaagcccaaatgaaaacccccaaattttaaaacaaaaacaagcaaattcaaaacagagtttttccccaaccgcttgtcaaaactgttaaatcgaccggggatgctccttgggaccccatttggaacaagccctgacaatttcggccctgtaatcctgctgccgaatcaggggtgtgctgtacaggtcaaaaccgcacaggctctaccttagggggggtt

SEQ ID NO: 40417 - DNA, 152 bp, Zea mays
  Clone ID: MRT4577_136865C.1
ttcggggcgggcggggtgggcgttttattttatcctaacacgcaatggatggcttgtaataaggaccaacatcccataaactgcttcaatacataaaccctcggatgcttggaaggaagcaaaaacccatgagctggttcgatacataatac

SEQ ID NO: 40418 - DNA, 1614 bp, Zea mays
  Clone ID: MRT4577_136866C.1
gccggccgggtcgggaccagaagaccaccaacccacttctgactgccactgtgccgcgccgtggtcaccggacggacacacagaacgacgatggccgcgtcggcgctgcaccagaccaccagcttcctcgggcaggccctggtctcccgcgccgccggcgtcgatgccggcggccgcatcaccatgcgccgcaccgtcaagagcgttccccagagcatatggtacggccctgatcgccccaagtatcttggcccgttctccgagcagacgccgtcgtacctgaccggcgagttccccggcgactacgggtgggacaccgcgggcctctcggccgacccggagacattcgcgcgcaaccgggagctggaggtgatccactcccggtgggcgatgctgggcgcgctgggctgcgtgttcccggagatcctggccaagaacggcgtcaagttcggcggcccgctcggggaagggctcgacaaggtgtaccccggcggcgccttcgacccgctgggcctcgccgacgacccggacaccgccgccgagctcaaggtgaaggagctcaagaacggacgccttgccatgttctccatgttcggcttcttcgtgcaggccatcgtcaccggcaagggccccatcgagaacctcttcgaccacgtcgccgaccccgtcgccaacaacgcctgggcatacgccacgaacttcgtccccggcaactaactgactgagcaacgccgtacatgtgtactaccatcagatccatccattcgttcgtccgtccgtcgagtgaacagtgtggtcttctctttactctacttgttcagatcgtaggcgtgtagtagttgcaccagccggcgtatgctcatgatcgatgtgtgctcatcaatcaatgtcaatggctgcctgctgtaagcggtcgatgtaaactaagcacagacgcatgtatcgtcatcagtggatgaatcaatctatcgatggcctgtgccattcatttttgaatcgatgaaaaaaaaaaaaaaaaaaaggggccggccgcccctttttttttttttttttttgctagtaccacacagggacatccagtttgttttcacaagagtttacagccttagtttgaacgatgatgagtatatatggcatcagaagccataccaagcagtacaacaatgataagatttattggcgaccgtatatcatgacaacatgtatacgatatatgcgactgcggatcatggtttttgttttcccttgagtagcctaggaggtggatgcggcggcggcctccagcagctgcttcaccttggtgatgtagtcggccattgcttcgtccttggatttcccttcaacagccttccaagcatcccatttggctctctctttcaggctgaagatgccaggacgaccggtgctgacgtcgccgacggtggcctgcttgtagaggccgtagaggacgagcttgctctcgttcgtcgtggtggcaggcagggtcttggccttctcggcgtgctcctcgaactcctcctgcagacccatggcgacgagacggcgctgctcttggacggggcggggaagtcttttttttttttttgtaattcccgggcccggccggcccctcga

SEQ ID NO: 40419 - DNA, 476 bp, Zea mays
  Clone ID: MRT4577_136867C.1
aggatgtccaaaaccaatatgaaattttgcaatagttattttctggtcgatccgaccaaagcaaggtttcttgatctccttttgcttttgttttcctccaacctgaccagtgcaagattcatcgattctcctccggatacgcttaaaggcttccggagaagtttcgcgagtcgatggatccttgcgttggccatcttccttcaaaaagtattaatgctcttaagtaaaccttttgcattcattggtcaaaagctcacatattggctcaaccttcttacggcaaatggaggcttcttcaacttgatacttaaccttatgtcaggaaagctggtcaagcctgacaaatcttcggcgacgtatacttcttttataggatgctcagatcgacgaatagagcttgacgagaagataaatgttggtagcatcgaatacaaatcgatgttgtcaataatggcttctaagatctcttatgagag

SEQ ID NO: 40420 - DNA, 436 bp, Zea mays
  unsure (1)..(436): unsure at all n locations
  Clone ID: MRT4577_136868C.1
cattttggggtttttttgctttattgttttttttttgatccttttgaatgttgtttaggagcaaaacctgtgggaggtttatgagactggaaccatgcccaaccttccccctgaaaaatgtgtaccacggaggaacagtatcttgaaaaaaaaagaatttgggcccccttattgcatgaccccaacctgtggcccttaaccttttggagagccggtgttggaaaacctctaagaagggccctctgatatggacagatacccgtggggagagaggcttctcccccaccccccgtgggggggggggatcctttggtgggagtacggaaagagagctggaaacccgcncccgtttgtccttttgaggattgttccgcgcgggactcctgggaagcccccgccaatacatagtggagagaacaaaccggtgccgggtttg

SEQ ID NO: 40421 - DNA, 865 bp, Zea mays
  Clone ID: MRT4577_136869C.1
ctgcaaagaccaccaacccacttctgactgaccactgtgccgcgccgtggtcaccggacggacacacagaacgacgatggccgcgtcggcgctgcaccagaccaccagcttcctcgggcaggccctggtctcccgcgccgccggcgtcgatgccggcggccgcatcaccatgcgccgcaccgtcaagagcgttccccagagcatatggtacggccctgatcgccccaagtatcttggcccgttctccgagcagacgccgtcgtacctgaccggcgagttccccggcgactacgggtgggacaccgcgggcctctcggccgacccggagacattcgcgcgcaaccgggagctggaggtgatccactcccggtgggcgatgctgggcgcgctgggctgcgtgttcccggagatcctggccaagaacggcgtcaagttcggcttcttcgtgcaggccatcgtcaccggcaagggccccatcgagaacctcttcgaccacgtcgccgaccccgtcgccaacaacgcctgggcatacgccacgaacttcgtccccggcaactaactgactgagcaacgccgtacatgtgtactaccatcagatccatccattcgttcgtccgtccgtcgagtgaacagtgtggtcttctctgtactctacttgttcagatcgtaggcgtgtagtagttgcaccagccggcgtatgctcatgatcgatgtgtgctcatcaatcaatgtcaatggctgcctgctgtaagcggtcgatgtaaactaagcacagacgcatgtatcgtcatcagtggatgaatcaatctatcgatggcctgtgccattcatttttgaaaagaaaaaaaaaaaaaaaaaagcggcc

SEQ ID NO: 40422 - DNA, 303 bp, Zea mays
  Clone ID: MRT4577_13686C.1
tgcacctctctaaattgggtcgtatttagatttgaaccgcctttgtaggcgtccggtggcgatcgacgattctgatactgctaggtcctattcagttggttccatctcgtcgtcagtcgtctgcccggtcacgtcgtggatcggacggaacaagtcggtgtgcagttgcatcatgaccgtataccttaacactttgacgctcggcacgttcatctgcaccgtgttagagatgcaggggatacggagcatctctgcaggatactagactagcaacgtctactcatgttacatagccagtttccc

SEQ ID NO: 40423 - DNA, 1200 bp, Zea mays
  Clone ID: MRT4577_136870C.1
gccggccggtccgggaccagcaagaccaaccaacccacttctgactgaccactgtgccgcgccgtgctcaccgaacggtcgaccacacagaacgacgatggccgcgtcggcgctgcaccagaccaccagcttcctcgggcaggccctggtcgcccgcgccgccggcgtcgatgccggcggccgcatcaccatgcgccgcaccgtcaagagcgttccccagagcatatggtacggccctgaccgccccaagtaccttggcccgttctccgagcagacgccgtcgtacctgaccggcgagttccccggcgactatgggtgggacaccgcgggcctctcggccgacccggagaccttcgcgcgcaaccgggagctagaggtgatccactcccggtgggcgatgctgggggcgctgggctgcgtgttcccggagatcctggctaagaacggcgtcaagttcggcgaggcggtgtggttcaaggccgggcgcgcagatcttctcggagggcgggctggactacctggggaacccgaacctggtgcacgcgcagagcatcctggccatctgggcgtgccaggtggtgctcatgggcttcgtcgagggctaccgcgtcggcggcggcccgctcggggaagggctcgacaaggtgtaccccggcggcgccttcgacccgctgggcctcgccgacgacccggacaccgccgccgagctcaaggtgaaggagctcaagaacggccgccttgccatgttctccatgttcggcttcttcgtgcaggccatcgtcaccggcaagggccccatcgagaacctcttcgaccacgtcgccgaccccgtcgccaacaacgcctgggcatacgccacgaacttcgtccccggcaactaactgactgagcaacgccgtacatgtgtactaccatcagacccatccattcgtccgtccgtccgtccgtccgtcgagtgaacagtgtggtcttccctgtactctacttgttcagatcgtaggcgtgtagtagttgcaccagccggcgtatgctcatgatcgatgtgtgtgctcatcaatcaatgtcaatggctgcctgctgtaagcggtcgatgtaaactaagcacagacgcatgtatcgtcatcagtggatgaatcaatctatcgatggcctgtgccattcatttttgaatcgaccaaaaaaaaaaaaaaaaaagcggcc

SEQ ID NO: 40424 - DNA, 668 bp, Zea mays
  unsure (1)..(668): unsure at all n locations
  Clone ID: MRT4577_136871C.1
ctcttggctgccatttgtttagtctctcttgtttatagctcctagttttcctctctatgtagttgcctcttgtgccaggagatccgcagctattttgtttgtcgactgtgcatgtgagttgtgttgtttcatttgaggaaggatcgccggatcggcccacatttgtcggttggcttcaatttcgtcagtttatacccttgctgaatttttagagtcttttgctcttgagttcttcctttccttctctttgtgatcttacgaagaaccatcgagttcttgtgtttcgggtgttgttgggatttattggtgggtgaaatatactcataggatcactacttactccctgttggtgcagttcgtagttgtaatcttagctgatctcgttttgagttcattatagaaaaccccaattctgttattttttcatatcagcggttgattcacaattcagatttgagaatagaatttcacgctgctgaaatcagcacatgttcgtaacacagttttggatcaattcagacttttcggtgtctgatttgtgtttcgtttggttttctgatcttgngngggtattangaatattttgaaatcatgagatcattggcttgctgatgtgattntgatttaagttgatgttctcattttcagtggttcgcagcaaaaattga

SEQ ID NO: 40425 - DNA, 220 bp, Zea mays
  Clone ID: MRT4577_136872C.1
gccggttttgagggattccttccgtactgtcgggatgacaatcttaaggaacgtggtgcctagctggagctccagtcgcccgtcagcccgaatgtgattgaggcggagaacctgattactgcgcagagctggccctctgcccagaagtttgtccagaagattgctgaaaagttcaagaaccagttatccaggaaatattaaagaacagaatacatagccc

SEQ ID NO: 40426 - DNA, 1110 bp, Zea mays
  Clone ID: MRT4577_136873C.1
tatccgaattcgcggccgcgtcgacgtcaagagcgttccccagagcatatggtacgtgccttctgctctccgcatgcttcccttgtgtcaatcagctcgctcgggaagtgagaactgacgtgcgtgctggctgcctgctgcaggtacggccctgatcgccccaagtatcttggcccgttctccgagcagacgccgtcgtacctgaccggcgagttccccggcgactacgggtgggacaccgcgggcctctcggccgacccggagacattcgcgcgcaaccgggagctggaggtgatccactcccggtgggcgatgctgggcgcgctgggctgcgtgttcccggagatcctggccaagaacggcgtcaagttcggcgaggcggtgtggttcaaggccggcgcgcagatcttctcggagggcgggctggactacctggggaaccccaacctggtgcacgcacagagcatcctggccatctgggcgtgccaggtggtgctcatgggcttcgtcgagggctaccgcgtcggcggcggcccgctcggggaagggctcgacaaggtgtaccccggcggcgccttcgacccgctgggcctcgccgacgacccggacaccgccgccgagctcaaggtgaaggagctcaagaacggccgccttgccatgttctccatgttcggcttcttcgtgcaggccatcgtcaccggcaagggccccatcgagaacctcttcgaccacgtcgccgaccccgtcgccaacaacgcctgggcatacgccacgaacttcgtccccggcaactaactgactgagcaacgccgtacatgtgtactaccatcagacccatccattcgtccgtccgtccgtccgtccgtcgagtgaacagtgtggtcttccctgtactctacttgttcaaatcgtaggcgtgtagtagttgcaccagccggcgtatgctcatgatcgatgtgtgtgctcatcaatcaatgtcaatggctgcctgctgtaagcggtcgatgtaaactaagcacagacgcatgtatcgtcatcagtggatgaatcaatctatcgatggcctgtgccattcatttttgaatcaaaaaaaaaaaaaaaaaagcggcc

SEQ ID NO: 40427 - DNA, 1351 bp, Zea mays
  Clone ID: MRT4577_136874C.1
gggtacctcgaggccggccgggccgggaccagcaagaccaaccaacccacttctgactgaccactgtgccgcgccgtggtcaccggacggacacacagaacgacgatggccgcgtcggcgctgcaccagaccaccagcttcctcgggcaggccctggtcgcccgcgccgccggcgtcgatgccggcggccgcatcaccatgcgccgcaccgtcaagagcgttccccagagcatatggtacggccctgatcgccccaagtaccttggcccgttctccgagcagacgccgtcgtacctgaccggcgagttccccggcgactatgggtgggacaccgcgggcctctcggctgacccggagacgttcgcgcgcaaccgggagctggaggtgatccactcccggtgggcgatgctgggcgcgctgggctgcgtgtttccggagatcctggctaagaacggcgtcaagttcggcgaggcggtgtggttcaaggccggcgcgcagatcttctcggagggcgggctggactacctggggaacccccaacctggtgcacgcacagagcatcctggccatctgggcgtgccaggtggtgctcatgggcttcgtcgagggctaccgcgtcggcggcggcccgctcggggaagggctcgacaaggtgtaccccggcggcgccttcgacccgctgggcctcgccgacgacccggacaccgccgccgagctcaaggtgaaggagctcaagaacggccgccttgccatgttctccatgttcggcttcttcgtgcaggccatcgtcaccggcaagggccccatcgagaacctcttcgaccacgtcgccgaccccgtcgccaacaacgcctgggcatacgccacgaacttcgtccccggcaactaactgactgagcaacgccgtacatgtgtactaccatcagatccatccattcgttcgtccgtccgtcgagtgaacagtgtggtcttctctgtactctacttgttcagatcgtaggcgtgtagtagttgcaccagccggcgtatgctcatgatcgatgtgtgctcatcaatcaatgtcaatggctgcctgctgtaagcggtcgatgtaaactaagcacagacgcatgtatcgtcatcagtggatgaatcaatctatcgatggcctgtgccattcatttttgaatcgatcaaaaaaaaaaaaaaagggcggccgccggcatcgacgccggcggcgcgggagaccagggcctgcccgaggaagctggtggtctggtgcagcgccgacgcggccatcgtcgttctgtgtgtccgtccggtgaccacggcgcggcacagtggtcagtcagaagtagagtacagagaagac

SEQ ID NO: 40428 - DNA, 429 bp, Zea mays
  Clone ID: MRT4577_136875C.1
attcggctcgagagctagcacaaatatagctttgttttcgtatgagaatcctacttatgaatgggctggaaagtcaaaaataaggcgaggtctacagaagacgtagacagaataaacctaagccaaaaacagggcatccagtcggtgagtttctcatggactagagatgctaacagatctgttgaggacatggaagttctgggaaagttagagccacctgatactctaaaatgctatgagctaactacgacatgatagaagaagctttccaacatgcggtgtgggcataacgctatatcttcctcaccttaccaaggtcgtattgtgggagctgcataaatgcaatagtttactactattgggccagttaccaacactacgaaagctacttataggaggaatggacagcactttgacagttgatgagga

SEQ ID NO: 40429 - DNA, 817 bp, Zea mays
  unsure (1)..(817): unsure at all n locations
  Clone ID: MRT4577_136876C.1
ttgggtacctcgaggccggccgggagccgaccgcctgcgccggccactcctcggcgccgccctgctccggctcggcccgaccccggttggctcgtccgcgctcgtccaacgccgtcttctcgacggcccagccggctgaggacagctgtgctcgtcgtgtcgagtcgatgacgcggatcctctgctgcggcctgctggcacgctcggatccaggtttcgacgcgcgcgagatgtttgtcgcgcgccaaatatccatcccatccctctaccaggtcagcggcaacggaggcgtcgatggcggcctgcatccttgatcgcggaagctgctcggcagcgtgagcagcaatggcggcccgccccgttgtttgagtcacggcaacaacggccgcctccgtcgcgaaaaccgcagcaacagagccgcctctaactctctggctcaaccgccgccgccgcctaggccggcacaacgcgactagcgtcatctcaacgctcttgagtggcaaccgaaggcttgactcctacaaatgttcacggtaggccaaaaaaaacttttttttttgtttggcgggcgtggttgtcgacgaaaggtggccatcggcttgctgaggacacaccgtgcagcaggcggcaggtgcagctaccacctcatcagaacgtagaagctggtcattgtttggatgcaaaataatttggtttccttcctgcccaaaattcaagatcctattnnctactgcgaagttgctaattcatgagttcacatgagtgggttttgcttggtgttagactaatttangaaacgtattttctgcttgntgtt

SEQ ID NO: 40430 - DNA, 2135 bp, Zea mays
  Clone ID: MRT4577_136877C.1
tacgcctgcaggtacttctccattcccggcgggccgatacactcctctacgacgcggtatcgccgtatacccgcctcaagtacaaagggaaagctgcgactcgctcggaagtggggtactgtacttcccgctcgctcgctctctgctctggtccttcacgctctaaccttcagttgaggttctctaatcgggcccgctaaagtcgagagacaggttttcgcgaacatttgcatctagccatctctactcaactgaattcttgtgctcttgtggcattcacaaagtccattttcagactgagctagttcagctgtcattttttttttcagccaaaggtcgcgttcttttggacctgctcttgattcgttcgttcgttcgtttggattgattgattgattgattcctttcgacttcccttcaccacccccctgctccgtcaagcgtgcctctgttcttctgccattgctggatcgcgtttgtctgtttgttgggttgctggcgctgcggccatggatcccttccacggcattgtgaaggaggagttcgacttggacttcgacttcacctgcgcgtctgcggcggcggcggcggcggcctcgtgggccgtcgccttgccggagatgccccggccgatggaaggactcggcgaggtgggacccactccgttcctgaccaagacatacgacgtcgtggacgaccccaacaccgacaccatcgtctcttgggggttcgccggaaccagcttcgtcgtctgggacgccaacgccttcgccttggtgatcctcccacgctacttcaagcacagcaacttctccagcttcgtccgccagctcaacacctacgggttcaggaaggttgacccggacaggtgggagttcgcgaacgaggggttccagcgtggccagagggagctcctcaggacgatcaagcgccggcgcccgccgtcgagcccgtcggcgcagcaggggcaggcgccgtcggcctgcctggaggtggggcagttcgggctcgacggcgaggtgcaccggctgcagcgcgacagggggatcctgctcgcggaggtggtgaagctgcggcaggagcagcaggcgacgcgcgcgcagatgcaggccatggagaagcgcatcaccacggcggagcagaagcagcagcagatgacggtgttcctcgcgcgtgccatgaagaacccgagcttcatccggatgctggtcgaccgggagggccttggcggctgccgcagggagctcgaggacgcgctctccagaaagcgccgccgccccatcgagtacctcccgcgcgacggcgagagaagcggcactgccacggagtcggcggtgagcgactacatttccggacttccggtcggcgtcaacggcgtggcggaggcggacgacgacgagagacggtgggagagaaggggcggcggcggcggcggcgaggacacggagagcttctgggcgaagttgctcaacctcggcctggaggagaagcacagggagggcagatgcgatggcgaggaggggaacggagctgacgtggacaacgacgtggacgacgacgtggatgtgctggtgcagagcatctaccacttgaacccgaacccgggtagccccggtggcaagtgaaagttccagaacgttccacattccagaacccactatggtctatggaagtggaagctcccagtgggcatcgcaattagtcgtaggcgatagttttttatccggcgcctgacttcttgtcgcggggctatgcaagttgcaaaagtgcttgcgtttggccggttgccaaggaatgttcgggatgctcgtcgaactacgaagcttctagaagatggagcagcgaggctgcagcctactcgtatattactatcagggagcaggcgagcagcaaggctgcagcctactcgtatatttactatcaatggcgcgggcttcttcgctgcggtttagtccgactacggggtttacagctacggctacaatcaggatgaaacaaaggcacttctcaaatgtgtacctgacgtgtcattcttattcttctgggcggagcaggtagactaaaaaaaacagttgtagctttgtcttttcctgaaaaccaacttttttggtaaagctaaaatcatttcaagtttg

SEQ ID NO: 40431 - DNA, 269 bp, Zea mays
  Clone ID: MRT4577_136878C.1
accttgtccgtcgccattaccgagcaggcgatgttctctgccgaccccgattgtaaaggcgaacgtgtagtccctgagaactgagacgtggaattgtctcccgcgtcccagatagcaagtctatgagggcagcacacgaaagcttcattggagttttagttgtttaaccgggaggacgtcatcctgccagagacggccaaggtctccttggagttgaactatagttcctgtaccacattctcgaaatatcttgatgctcctcttcaggc

SEQ ID NO: 40432 - DNA, 205 bp, Zea mays
  Clone ID: MRT4577_136879C.1
gacgccgccagcacgcacgccgcaagcagaggaggcctccagagcgagccgcccagcccgccgccggcgagaagacccagctgcagcagcaagcagccaggggagactgcgcggaagccgcacggactagcagggaccacacagacaagggcacaggcagcgccgcccagcggacaacagccagcggcgacaccagcgacacgga

SEQ ID NO: 40433 - DNA, 563 bp, Zea mays
  Clone ID: MRT4577_13687C.1
aactattccaaaacagacaggctagggaatccccctatggctcatcgcgttctcctcctcctctctctcgcggctgtcgccgcgctacctgccgccgctccagtgaaagacccaatgatccgcgaggaggttcccggtggagatgaccacgatctgtagctgaacgagcgagtccacttcctgagcttcgtgcagcgatccggcaagtactatcaggacgccgacgagtacgcgtaccggactattcgtattcaaggtcaacctgctccgagcgcgtcatcaccaattgctgcaccaatcggcggagcatgaaatcactaacatctccgacctcacgcacgcagatcttcgccgggaactacttcggacgtcctctggtcacagcgagattctcctcagagaactccaaggagcattcctgacgacgggccagaactccacgacaatggttctcccacaaggatttacgatgaacaggatcgcagccgacagagatctccgtccatgaaccatcatcacgatgcgtgtagatcgtgtgaagcttaccttggatagcaccgatc

SEQ ID NO: 40434 - DNA, 269 bp, Zea mays
  Clone ID: MRT4577_136880C.1
gtacttgttgtgctgtcctattgttggcacactgaggatgacgtgatatgcaggctctactaattactattgcgtatgtgatgttatcacggtttgatgcactaatgttacagcagcacatgcactgataatctatgactgtagttgctattaatgtactagtgtgacaaaggaaaatacattttggacgcgtttgagagtctcctctggacggtgatggacgagggccatatctgacagtggtctggtgcattagtctatttgcttgt

SEQ ID NO: 40435 - DNA, 405 bp, Zea mays
  Clone ID: MRT4577_136881C.1
gagaaggtgactgggactgggactgggactggcaatggcaactagccttgaataatccaggctttttattatatcttgctgaagcagcactgaccgcaagctcagccgtggatagacacacacacacaaaaacccccggaccaaaagcttccttttctggaacagcgccctccatctccatcatcatcagtgggtgcctcgtgttctgcatttcgctgcaacttgcatagcgtggggccagaaaaagcaccagctaccacccacaaaagagaagaagatggctgcattttttttttggggcttggcctggctaccgcctaaaaagaagcgcccttcgccgctcgcacaaggatccgcagaccccttttcttgcaggggaagcggctgggccaaaaaggagctaaa

SEQ ID NO: 40436 - DNA, 330 bp, Zea mays
  Clone ID: MRT4577_136882C.1
tgcagatgttcctccctttcggcttcgtgagcttcgacaacccggccagcgcccagaccgccatccaggccatgaacggcttccagataggcatgaagaggctcaaggtgcagctgaagcggcccaaagacgccaatcgcccgtactgagcgccggcgggagcgtcccccgggggagaccaggactcgcacagggcaggatgctgaacgggctacattaaaaacaaacctctttctctctctatttataaatgagaactgttggacgacacctttgacatatcagccaataccactcaagctgaagactccagacactacgtgtgactgt

SEQ ID NO: 40437 - DNA, 652 bp, Zea mays
  unsure (1)..(652): unsure at all n locations
  Clone ID: MRT4577_136883C.1
ccgtctgctgggatactgtgttcgagggagtgaataggatgttggtttatgagtttgtgaacaatggtaacttggagcagtggcttcatggagctatgcgccagcatggtgtttttacctgggataatcgcatgaaggttgttataggcactgcaaaagcacttgcgtaccttcatgaagctatagaaccaaaagttgtacaccgtgatataaagtcaagcaacatcttgattgatgatgaattcaacggcaaagtctctgactttggtttggccaagatgttagggtcagataaaagccacattaccaccagagtgatgggaacatttggatacgttgcacccgagtatgctantactgggatgttgaatgaaaagagcgatgtttatagttttggcgttctcttgttggaaactgtgacaggaagagaccctgttgactatagccgctcttccaatgaggtcaatcttgttgagtggctcaaaatgatgatagccaaccggagagcagaagaagtggttgatccaatcctcgaggttaggccaacaattagggcacttaagcgagctctgttgatcgcactaaggtgtgttgatcctgactctgaaaagagacctaagatgggccaggttgctaggatgctggagtctga

SEQ ID NO: 40438 - DNA, 465 bp, Zea mays
  Clone ID: MRT4577_136884C.1
atgccccttgcaccaccgcagggcatcccgactgctggagcagaccctgacggagacgtagacgacaacgacgctggtggcagttcgagccacaacacggagctctcggaggagcagcatcgtcgcgggttatacccagaccattgggaggctagttccttggtgcaccatccggacaatgatctccggggtgcagaggccttctcagagcactattctatcactgagagggatactgccgaggtagccatgcaagatgcagcacgacatgcactttcgcagtactgctcgttgttcagtggggcagctgatggccttgacctgaagtactaccctcgtcgttcgactggcagtgctggaggtgttattgtctcgcccgttggtgaggacaatcccaggctgaacagcatggtcaacttggtcgtcgtgctcaacaccgagctggaccacgccttgacgagttag

SEQ ID NO: 40439 - DNA, 479 bp, Zea mays
  Clone ID: MRT4577_136885C.1
cagagcgtcctataaactgcccttcttccccaatacatgctcaccagaatggcatcaatatgtggcgaaaacccaaagggtgacccctacaggattcaacaggcagtcgaaccaggcctactaccattgtgacactagggcactacaacatcacatcagccctattacatgaatggaccttatggtgcagtctggtggcacaaaacatcaaggcacatcatctacaacaacttgagctaacaaacctggctgcatactctcaacatcatcagctgattgcatacaaccaactggctgcatcgaactatgctagctgattcccaacagcaattaccattcaaccagctaggtgctgactaccaccacagtttgctactcaaaccaactagcatcatggaactctgctgcttatgcacagcagcaacaactactaccatgcagccagctagctgatgtgagccctgctacactgttgacac

SEQ ID NO: 40440 - DNA, 301 bp, Zea mays
  Clone ID: MRT4577_136886C.1
cctacattgagagcgggcgacacggtgtgtgtctttttcaggatgttacagagattgtgtgttgggctctgactgctgccatgacgcgagcgacctacgctaaacactgtcacaatgcaggctgtgcagacagtgtgttagacataatcggagtgtatttgtcctgtaatgtttgttttatgggagggcacactgaactgaaggacgtagtttcaggacacagaagctgttacacccataatattcaccatcaattcaatcgaaatctggacattgacctcctttggcatgtccataatta

SEQ ID NO: 40441 - DNA, 515 bp, Zea mays
  Clone ID: MRT4577_136887C.1
gtgggcaggatgcctttgcaatggctgtaccctgctagcgggtcgtacagcgcacactgcaccgaggctatgacgctctccttataaggaggagaggagtgtggggtcacaaaagatatgtggcaccagctaaaaggatgtgtacaaatgttgtgcgtagaccagtacccgattgtactgatggaagatcctttggaccagacaagactgacttcactatcctaaaatgactaatgcaattggagagaaagcgcagattgttggagatgaccttgtactaaccaaccccactagggtcactcaggctataaccgagaaatcattcaatgcccttctgttaaaagccaaccaaatttgatctgcgactgaaagcattgatggtgtgaagacgttaaagacgtgcaccctggggtgtgatgactagctataggagcgactagacttaggacactttcatagctgaccaggcagactggttgaacacgctacaaattaatactggagcaccctgtaca

SEQ ID NO: 40442 - DNA, 336 bp, Zea mays
  Clone ID: MRT4577_136889C.1
gagttatccaaatcaaaaaactgggattaatggttgttaaaggggtttgcggcacttaaacgacgacccagaataccaaaaacaacctttgaaaaaactatccattaaacacggaacacaaaaaatatgtacccacaccttgaaagcatagatactttatatgaaacaaatattccaaatgaaccctgtgctagagaaacacggatcgaataccaataatcaggcgggaaaaaaaaaaccgccaatatacctttaaaaagggggagacccaaccaaacattctatacgccttcgcatgaaacaaactaagcggtacgccaagattccacctaaaac

SEQ ID NO: 40443 - DNA, 330 bp, Zea mays
  Clone ID: MRT4577_13688C.1
tttcgtgtggtgttataagccacaagacaagtggcttgtatggtgtgaggatcggaatgtttacagtgtcatggctttaggctattgtgaatatttttacatgaggaacatttgttgatctttttgcccgaccacatgccagtgaaagtatatgttttgcgctggtcttggggaggttcgggtcgtatgcattttcccccaatgttaggacaaaatgtacttaccattttttggatctatgactacctggcctcacattatcccgttcataagaaaccaagcattttatagattgaaactgtacgacttagtcacacacgggaggtctgt

SEQ ID NO: 40444 - DNA, 501 bp, Zea mays
  Clone ID: MRT4577_136890C.1
atggcctcgtccaccgcatcgagcggccccgtcttcgacaatccaccatttccaaggcaccacagccaccgacgcgtcaccaaaccgccggcctcgcgcttcgtcgcgctgcacccccgcctctcctccgccacctcgcctgggacggtggttggtgtccgcacaaggactacaacgctgaagacggggcaggttctcgtgctgtggctcaaagccacgatcgtgtcgtcgtctgccgacggatccggctacggtgttgtctacgacggcaactggccgcaagacgatcccaagagcacggtctacgtcgcgccgctccaagtcaggctattcagtccgtctccatcgccgacgactccaccgccgtccctgcctccacccaccgccactgtcgccgcgactactaggaagaaggacaggccgaggccaaccacggcagggaagagcctgcgcctcatgcgcagcctctttccggagatggagttccccacccgggcttga

SEQ ID NO: 40445 - DNA, 298 bp, Zea mays
  Clone ID: MRT4577_136891C.1
aaaaaacggggactggatcccaacttttttttttttggctggatttaaaggggacgaccttggtagaaaaacctggatacacaattacccggggaggaaaaaaaaaaaaaccggggccccctaaggggtaggtactccaaatttttttctcctttcctttggaaaaacggacccccttgggggggagagctgttgtttggagccaatggaaggtggcctttttttaccaaaggggggcaaaacccatggggggacggggtaaaatggatttaaacccatttttaaattaccccgccct

SEQ ID NO: 40446 - DNA, 699 bp, Zea mays
  Clone ID: MRT4577_136892C.1
atggtgatgcatctgtattctcgctcctcttccgccggcatgcgaagcatccgccgggagctccagcgcaggaggtccaagcccttggcgccgacagggtcggtcgctaagatgccgtccgcgtcgcgtcacgcttcgagcggcggcggcgtccgggatccatggcctcgtccaccgcatcgagcggccccgtcttcgacaatccgccatctccgaggcaccaccgccaccgacgcgtcaccacaccgccggcctcgcgcttcgtcgcgctgcacccccgcctctcctccgccacctcggtctgccccatctcctggcgtccccgcgcatctgaagcctgggacggtggttggtgtccgcacgaggactacaacgctgaagacggggcaggttctcgtgctgtggctcaaagccacgatcgtgtcgtcgtctgccgacggatccggctacggtgttgtctacgacggcaactggccgcaagacgatcccaagagcacggtctacgtcgcgccgcaccaagtcaggctattcagtccgtctccatcgccgacgactccaccgccgtccctgcctccacccaccgccactgtcgccgcgactactaggaagaaggacaggccgaggccaaccacggcagggaagagcctgcgcctcatgcgcagcctctttccggagatggagttccccacccgggcttga

SEQ ID NO: 40447 - DNA, 257 bp, Zea mays
  Clone ID: MRT4577_136893C.1
aagcgacaggatgtgagtgataagtaacgcctatttttctagtccctcactcagtggacgataaacaggcttcgctcagcttcaaagggagcgggatatgcctcgggcagctatcggccgaaatgatttctaaaccgatcactcctctctttttgggattctcactcatggctaccgatactaacgattcacacccaacatcgacacccggatgcaagtcttttgaacagctgaatgattctgctggtcatcatttt

SEQ ID NO: 40448 - DNA, 423 bp, Zea mays
  Clone ID: MRT4577_136894C.1
agtcccaaaggaacaaggatgaatcaatgatacattgatcacaattcacgggcacaaacttaacccattccacaccacaaactacaggtcattcattcatacatagtggttgccactaatcgacatgtggctttcataaaatgaccacattacgattcacgcatcgtatgcataataatcaaccggaaaaagcttcttctgcttccaacaggggcacaaaagatcgagaaaagaagccggagatccatcagctgaaatcgctatccagtacgcaggctggtatcggtgaccaggtacacaccggataaaggactccagaacaccagtttgaacacatacccatgacgatccattactccaccgtgatcctgcactagaccttgccctaccgggacaaaggaaacatccacctgtgtgcccact

SEQ ID NO: 40449 - DNA, 369 bp, Zea mays
  Clone ID: MRT4577_136895C.1
ggctgatggcgagaacgaccgcactgtcaagtccattactcagctccttttcgagacatctctcttggtctctggattcaccatcgaggagcctgctagcttcgctgagcgcatccacaagcttgtttctctcggcctgaacgtcgatgaggacgctgagaccgctgaggagaaggcggccgaagaagctcccgctgccgaagccaccggcgagagcgctatggaggaggtcgactaaatttctgtagcaaaagctgattacgggttgatgtgaccacgaaacttttctggcatgtattttttctggacgaaaatcagggtcatggtccaagtggcggattgtgatcggcgtttgagcgttttatactt

SEQ ID NO: 40450 - DNA, 736 bp, Zea mays
  Clone ID: MRT4577_136896C.1
ggttccctcgaggccggccgggaactctacctgcctcactatctccaacctcgactattaatcccagcaaagctcaccaccaccaccccgccctgaataacgtctttacgcaacattaatcgggcagctcgcattcatcatgtttcgaaacaactacgataacgattccgttaccttctcgccccagggccggatattccagatcgagtatgctgctgaagcagtgaagcaaggttccgtcgttgtcggtattgccagcaagactcacgctgtattgtgcgctgtcaagcgaaacgccgaggaactctcatcttaccagaagaagctcttcaccgtcgacgaacatgctggtatcgcaatcgctggccttacctccgacgcccgcgttccttccaacttcatgaagcaacagtgcctcggccaccgactcacctatggccgtgccatccccctccgatccctcgtcgacatgattggtgagaaggcccagatgaacacgcagatgtacggcaagcgaccatatggcgtcggtctcctagttgctggcgttgacgagcgcggtccccacctgttcgagttccagccctcaggcatgacagaggagatgcttgctttcgccattggcgcacgaagccaaatggcccgaacataccttgagcgcaatattgatgcctttgccgactgctcgaaagaagagctgattcagcatggcctcaaggccttggaacgagagtct

SEQ ID NO: 40451 - DNA, 262 bp, Zea mays
  Clone ID: MRT4577_136897C.1
caagatcgcaaagtagccctgcagggctgccatcgatcatttaaacaaagcggtccagactacttcatctctgacatggcggagatactttatgtacaagaatagcccggcgatacgatacttacctccgtgggagaacagaaccccgcgaggagattatctagacggctgaaacaacacacctaagcccggtttccttagaaccgggggccataaaaaaaaagttctctgcccctatcaaagagggcctgaatttattata

SEQ ID NO: 40452 - DNA, 680 bp, Zea mays
  unsure (1)..(680): unsure at all n locations
  Clone ID: MRT4577_136898C.1
aattcggcacgaggcaacagctacattacgacttcaaggttgtattcaaggcctaccattgctgattcttctggattctcgaagctctcactcatttttgaatgctgctctcagttcttccttgcatggtgtttcttccctacatcaaccactgtccgttcgggttgctaatggtaatattttacactgtacgagtcagctatataaggcagtctggtctgtccagaatatacagttccagtctgatctcaagcttctccatcttccttgctatgatttgatcctcggatcagccaactgttatatatggtctgcaacctttggtcccttctggctctctgttggagatcaagcaacaagaaacttcggcagttacatcaccacagctgtgtgcctgtgtactctgtccgaagctgaagtaccggtaccggttcaccaaattttgtgcacatttcagtcattgtttgaggaaccgaccagtcttccaccaagcatgttttgtgaccacactattcccttaattgcaggtgtccgccctgttaatatccggccctactggttctctcctgtcatgaaggatgaagtggaaactcaagtatctgatatgttacgcagtgggctcatacgacctagctncagtgcattttattctccagtcatcttagtcaaaaagaaggatc

SEQ ID NO: 40453 - DNA, 729 bp, Zea mays
  Clone ID: MRT4577_136899C.1
ttgggaccctcgaggccggccgggataagtccataaccttcatcttgttctcctttttacaagattgccttctgctgctgtgacaatactgaccaaccctacttcccccattgctccatcttcgattcacatgccagagcaatttcaaggcaatatgcccccttacgaggctgtccccacataacagtaatggaacacatcagctatgacatcatttgaaaatggcactgcgcttaccatgtcacccaatgcactgggaaagatatcacacaccaccgattggcctttcgcatgtgaagccaccactcttccttacgccgcacccacaatatgattgccctacaggtgctgtagtttcatgtcacaagatcatggacttgccatctttacactgctggaattccaatatcactcgccagaagcttacttctttccttctgcctgaaaacagtaatgagtgaaaatcgacactctaggcgaacatacatctgtgaacgacgacagcctccttgaggacatcgcacatctgaatcatcatgaagccctctgccgaatacacctgtccgtcgagatactatcttctcgcataggtgtgtggcttcttactccaccatctgtgactccgtcaagatcgacggctgagaacttccattcctgtgacagcagcgtgtgatctctgctgaacagtaactgcagaatgtcccctgacttcaccatgacatcatctct

SEQ ID NO: 40454 - DNA, 266 bp, Zea mays
  unsure (1)..(266): unsure at all n locations
  Clone ID: MRT4577_13689C.1
cattccctcttttttacantttatatatactatattaaggtactttttctatctggtagttataaatcacatgaactgcttttcatcttcctccaccttcatctccatctacgattgtgtcttgacaaaatccaaatcccttcagtactaattcactttatttttatttacaaaaaaccacaatnttgttcaatctctctactaatgctcactctgtcccactcagtactaattaacccacctaagctcactttgtcccatctaat

SEQ ID NO: 40455 - DNA, 230 bp, Zea mays
  Clone ID: MRT4577_1368C.1
aacacaaaaagaaataatttattctttaataatatgctgaatgtcattgaaaattacatagatttacaggggaaaactttaaaacaaggtggaagcgggaacatgcttttgatttcttaacacaattgcttttggtcagcatttgcacatgggaagatcaactgggggggggttcagggacttgaaattttcatacccggtcttcaattggaaaggcatttgcaggcccc

SEQ ID NO: 40456 - DNA, 329 bp, Zea mays
  Clone ID: MRT4577_136900C.1
ggggaagcggaatcaacctttgtagtatttatttaagggtgggggccaaaaatgtttagtaaaattgacccaggtggggacacaagatccttatgagagggaattcagggtacactaataaaaagatctaattggcctatcctaattcttggattcctcgagggagctctgataaaaaggattcttgatgcacaaacatgttcaccctttagatgagcaagctcccctttaatatcctccagaggaggtttaagccgggcaacttcatatggtgatgctggttcaatttcagctatttctgatctttctccattaataccacctgcaaa

SEQ ID NO: 40457 - DNA, 255 bp, Zea mays
  Clone ID: MRT4577_136901C.1
aaaaaaaaaaaaaaaaaaaaaaaaaaaaattaaaaaaaaaaaaaaaggaaaaaaaataaaagaaggtctttgcgttcttgcggcgtccatgctaacgtactcgtgcttgcaacgtgatacctaatttatagtgacagctaaatgcatttcactggccggacttgtacaacgttggggttgccaaaaccatggggttaccaaactaaatcgctttggacaacttccgtctttggcaagatgccgtaatagatagga

SEQ ID NO: 40458 - DNA, 268 bp, Zea mays
  Clone ID: MRT4577_136902C.1
ggcgaggaacgaacggtcaggttgtatctcagaagcgacatggctttcgcgcccaaaacgttctccttctcctcgctgtcctcggcgttggaggcagctcagtcgtcgccgctgctcctgatgcggatgttttcgaccgcaacaccgagactgaggtactactcggtcgtcgtcgtcactaccactaccactgctagagctgcggcggctgctgtcacggttcccacctcccctgcttatgcgctagctccggcgcctgtgccaccaa

SEQ ID NO: 40459 - DNA, 2148 bp, Zea mays
  Clone ID: MRT4577_136903C.1
ccacgcgtccgcgaacaaaaagaaaaaaagaaagaaaaacggtccaccacaccttgtatgcccccagagactcggagctcacagctcgcaccaggcaccagcacagcagcaccggcagcaccaccaaccccagggcagccgcgccgccagccacgacaagcttagcagcccctcgcactcgctagggtatttattggtacaatcgggtgatctgcgtgccgcatcgcgccgggacacgggagacaatggcgttcacgacgctcggcggctgtggggcgcaggcttcagtgcggttggctccccagaatggaatccttggatctaattcgaagccattcgcgggcatcatactcaagaaacctcagcaggttggatccctgcccctccgtgcaaggggatccattttttcttcaccacgcaggcttttctcccctaaggcagcagcccctaaatcaggggattccatacgcattgcagtgctaggggccagcggttatactggagctgagattgttcggattctagcgaaccaccctcagtttcatataaaagtgatgactgcagatagaaaagctggcgagcaatttggatcagtatttcctcacttgataacacaggacctgccgagactggtcgcaataaaagacgctgacttttcagatgttgatgctgttttttgctgcttgccacatggtacaacccaggaaattatcaaaagcttaccccgacacttaaagattgttgatctctcagcggacttccgactacgcgacatcaatgagtatgctgagtggtatggacattcccacagggcaccggaacttcagggggaagctgtgtatggtttgaccgaacttaaacgagatgacataagaaatgcacgcctggtagcaaatccagggtgttatcccacatctattcaacttccgctcgttcctttggtaaaggcaaaactgatcaagctaaccaacattattattgatgcaaaatctggagtcagtggtgcaggacgtggggctaaggaagcaaatctttacactgaaatcgctgagggtatccatgcttatgggataacaagccatcggcatgtgcctgagattgagcaaggacttacagatgctgctgaatcaaaagttactatcagctttactccacatttgatgtgtatgaaacgtgggatgcaatctactgtgtatgttgaattggcatctggagtgactcccagggatttgtatgaacacctaaagtctacttacgagaatgaagaatttgtcaagctgttacatggtagcaatgttccttgcacaagccatgttgtgggatcaaattactgcttcatgaatgtctatgaggatagaatacctggaagggccatcatcatctctgtcatagataatcttgtgaagggagcatctggtcaggctttgcaaaatcttaatctgatgatgggactgcctgagaatatggggctgcaataccagcccctgttcccttgatcttttgtgtcattatctattattacattatttaggagtccagaaaccaaattatcattactgtcaagaggtggcaaggagcctgacatcagaattcagtcaagtcgaagttagacagttagtgtagcttggtctgtgttgttttagctttattaaaccattaagagaataatgatgatggcaatttagcagtacaatggtagtattatgtgggcagcttggttccaataaaatcataagcctatacacatcttgtgcccgcaatgttgtttgctattttgatcacgaaatcaatattgagcttgaattcagttctgaggcagaaaaaaaaaaaaaaaaaaaaaaaaaaaaaaaaaaaaaataaaaaaaaaaaaaaaaaaaaaaaaaaaaaaaaaaaaaaaaaaaaaaaaaaaaaaaaaaaataaaaaaaaaaaaaaaaaaaaaaacaaaaaaaaaaaggggcgccccttataaggataaagcattcattggacaatgaacgccattcaaagtacttttttgggggcccctaatttacattcagcggccatggtttaaaacgccaaggaggggaaaaaccttggggtgaccaacattaaaagctttctgggcaagaacatttacgcggcctgggaaaaaacctaagaggccc

SEQ ID NO: 40460 - DNA, 513 bp, Zea mays
  Clone ID: MRT4577_136904C.1
cccagcgtccgccccgcgtccgctatcctctctgcccccggtaactacaactgttggggtaggcccgggttggccacggccgccacactgctccgctctgctcaccaggaatcactctgctgctgatcaacctgagcggcaacgccaccgcgcgggtctcggtgacggcccaaggggctgccgcggcgcacgcgcacaggcacaggcacggcgcgaggaagcacggcggcggcaggaagttccggcacgtgcacgtgcacgtccccggcttcgccggcggcggcgaggcggcggcgggcgccgtgagacacgagtaccacctcacccccaaagacggcgacctgacgagccaggtcgtgatgctcaacggcagggcgttggccaccgacgcggcgggggaacatccccgccctggaggcggtcgaggtggacgcggcgcggcccatcgccgtcacgccctactccatcgtgttcgctcgcgttccgcatttcagtgcccccccgtgtagggta

SEQ ID NO: 40461 - DNA, 852 bp, Zea mays
  Clone ID: MRT4577_136905C.1
cattgggtacctcgaggccggccggagcgccgtcgtcgtcagttctcctccatccccgtcgctttctccatctccgtcgctttctcctccatctccgtcgtgttctccttcgcgcggcagccgggcgccgctgcctccgaccaagacttcgcgcggcagccatacccgtcgcgttctccacgacctcgacctcgtcctcttcgccttcctcgtcggcctgctgctcggcgaggcggcggcgggcgccgtgagacacgagtaccacctcacccccaaggatggcgacctgacgagccaggtcgtgctgctgaacggcagggcgttggccaccgacgcggcggggaacatccccgccctggaggcggtcgaggtggacgcggcgcggcccatcgccgtcacgccctactccatcgtgttcgctcgcgttccgcatttcagtgccccggcgtgtagggtagagtagtggtttagatgggtagattcataatgggtttggcgtgattggtgatgatggacagctaagctttccatctggtgagatgaggtgaagtgagctgcaaggcatctgtcgaaagaaaagggatgcaatgcaatgggggtgagtttgttttctttttactcctggaattgtaaaaggtcgaagaaattcatgatgatcagcgatgggaagggggaaaaaactcgttcccgtttgtctctcatgagcgggaaaaaaaaaaaaaaaaaaaaaaaaaaaaaaaaaaaaaaaaaaaaaaaaaaaaaaaaaagaaaaaaaattttaaaaaacaaagtgtttcttatgggtaaaaaaaaaaaaaaaaaaaaaaaaagggggccccttttaaaggatcc

SEQ ID NO: 40462 - DNA, 306 bp, Zea mays
  Clone ID: MRT4577_136906C.1
tctttctcttatgttcctacaatacttccctcattattatccatgcccacttatacaacttctggcagggtacttctccatgccaggccatcatttacatccaatactaaatacctccatgcagatactgactatactactatcactatgatctgagctatattagttcttctacctttcttcaaccctctctttgatgaactcatcctcctacaagccatcatataaccactaccattcattactggtgtgtctgctatcctactttatcttcacctgaatgactatcctctcaatgaatttata

SEQ ID NO: 40463 - DNA, 1004 bp, Zea mays
  Clone ID: MRT4577_136907C.1
cctcgaggccggccgggttctccttctcgccgagcgggagcgccgagagagatgcgaccgcgatgcccccactcgtcccctcccagctcctaccaccaatcccaaccctgatcctacccgcgccacctcgcctctcctgccgccgccgccgccacccgcccgcaccgctcgccgcgtcgtcgtcctcctccgcgtccccgcactccaggcaaccataccgccgccgccgccgccttgaagcccagcgccagacaccgacgcctgcgccgcgcccgtcctcccagccaaagccgcctccgcgccacgcaaatgccaccgcgtcccgcgctcggggccaggaggagctggaggcggcgatctgcgacttcatgtgccgctccgccaagccgggagccttccccacccgcgaggagctcgtcgcggcgggccgctccgacctcgcggatgccgtcgcgtccagcgggggctggctctccctcggctggtcctccaccgccgcggaggggcccgcgacgatggctgcgccgcgctcatcgggcgggggccaccctgactacccgcctgagacgggcgtgtattaccgtggtgacctagcgccgggctcagtggatgactccgagtgggaggaggaggagcgacgacgaagaggaggcgtcatcatctgggcgggagccggaaacagaggagaccaggttcaaagcaggaatcgaggggatgctcaccaggctgcagaaggatagggagcaagcgcggccacctccacggagtagtacccacgacacacgggaacaaagtgatgatgatgctttagctggcaacagtggcgctcctagtcatatagcggctggcggcagacatattcgaagggtacctgagaatggaagtgtccatggatctcattctcaaaatggaacaatagagggcaacagcacctttcagggttcgaacgatgatgcatggcaaacatggacccttggcagggcgacttatctcattttgaagct

SEQ ID NO: 40464 - DNA, 207 bp, Zea mays
  Clone ID: MRT4577_136908C.1
cttggatcacgcgtcctcctctccaaccgtaccgaccgatatctttctttccgctaactctagggcggtgccgtacaggtgatgctacggaggcgtcgttgctttggaggtcgatgacctacatacagggagacaacgatgcaactctggaggactgacgctttctctgacgacgggcccttagatacggaggaggaaggtggagga

SEQ ID NO: 40465 - DNA, 693 bp, Zea mays
  Clone ID: MRT4577_136909C.1
cacaggatcgaatgtcacaactttactatataataggagttctatacaaaataaataaataattacattataaggagacaacggtccagcaacccaaagttgactgggagacgacagcctagacctctcacgaactcgcacagcatcctccatgcgccttatcctgcggtacctattcttgacctggcacttgagattccagttaccagggtgattcttcagatcctcgtaacctcgcgcgtcgatggaagcaaagttgaccgaccgtggcgcttggattacgacgacgctctaaactccgatgtccagtcccctcgccacgtggtcgctccagaccacggctcggccgagcgcgggtgaccgcgcagagatcccaggtgggagatggcaacccacgcgctggacaagcagcgccagacagccaaccgcaccgtcggcaccaccccacgcttgcacccgtctgccacacgatcgaacgacggcgcccgagcagagagctcccacggccagcggcagcccccacgccgtggacaagcagcgccagacgacccaagtccggcgagcttcacaccccgcgacaccggttgtcaggtcacggcgcatggttttctctctctcttcctcttgattgtctctcggctagcacacaaaaaaacgttccggaagattgcaagctcccaacagcggatcccg

SEQ ID NO: 40466 - DNA, 327 bp, Zea mays
  Clone ID: MRT4577_13690C.1
gcgacataaaaagcacactaagctaccaacactggcagctaaaatatatcgcctgcttatgcgacgtgggctttctgcgagcgctgttaccttcaacatatcgccacaatggccacaatcttttatcactgctcatttgctcccagacctatcaccaaccaggtcttcccgctgggaaaacccaagtcttcaacacataccagatccaccaggcaacaggctactgcatgttacctttatgagccttgtacatccaccaatcatcaaacctattacaccagccacctctgatgtatatattggcaccatacatccgggcacaacacc

SEQ ID NO: 40467 - DNA, 664 bp, Zea mays
  Clone ID: MRT4577_136910C.1
ccggccgggccttccttcgtcgatctctatctcggcggcgactgggcgaccgctgcctcctgttgccctggtctccattgggccctttgccagattttctttcgcctctccgccggcgacgaacaccaccaccaggaatgggcctgtggacgttgctggagggttttttgcttcttgcaaatgcgttggctatattgaatgaagaccgctttctcgctcccaggggatggagcatgtctgaagtatcaggaaatgggcaaacgaagtcgttgaagggccagatcgtggggctaatctatgctacacaatttctgaggatgcccttaatagcactcaatgttctgatcattgttgtgaaactggtgtctggctgaggctcattatctagttttcactgttgtgttggattgatatctgttccagcatgatgtaaaagttagtaatactcaaagctgctggaaatatgttcattttttactctaatgtgaatttctgttatttcttctggtaaattaatttggtcagaaaatggctctaaacatttatactatcaaagcattgtgcaatggtgttatcaatttattcgaaataaaaaaaaaaaaaaaaaaaaaaaaaaaaaaaaaaaaaaaaaaaaaaaaagaaaaaaaaaaaaaaaaaagcggcc

SEQ ID NO: 40468 - DNA, 636 bp, Zea mays
  unsure (1)..(636): unsure at all n locations
  Clone ID: MRT4577_136911C.1
caagaattaaataaaccacgcgctagctgcgccaacgtaagaagctatagcgccgtcactcgtcgtgccgtttttttttttggtcgtgacctgcagcactttctgagacaggtagctttgctataggctagtgtcacttgccgaggacaaacaggggagacatggcactgacagtgttggagaccaccgagcagcagctcctcccgtgccagcagtccgtcgagcatggcgctggcgatggcggcaacggcaaggccgccgctgctggcgccgagaaggctaccgtcatgctgaaggagacgggccacggcggcgacgtcgaccggccggacagggacgacatatggagcatgattcaggcgcagaagccgccgcctgccgcgcccaggcaggcgcaggcgccggcgccgtacgtgcacccgctcgcgcgccgctcgtccggtctgctgacgcagaagagtctggagacctgcaccgagagcctcggctcggagacaggctcggacggcttctccgatgccgacgactccgccaccgaccgctcgtgcacgggctgcggcgacgacgagcgcggggaggaggaggaggnagtaggtggccccgcacgcggccccgcccaggtcgttcccgccgcgc

SEQ ID NO: 40469 - DNA, 386 bp, Zea mays
  Clone ID: MRT4577_136912C.1
caccaaaccctaacacaatgaaacggattgcaagcagagcgtcttacactttaatatcgtgcctcgacctctgagttaaaggacaaattccacttttagctcctgaacgttggacccctgagctcatggatgacacatggaacgcgatcactgttcattccttatctgaactgtaaggatccccatcgccctgatgagttttgatacattagactatcggtctgccccaagcttaaatgaacattaacctttcatggcaattatagctggatccttcgatactaaattatctttgggctctaccatacatcgctgaccgaccctgagagtcgtaatcatgatcttgtgagctgcctcgggccctgctgggcgtatgtcgttgtcaa

SEQ ID NO: 40470 - DNA, 379 bp, Zea mays
  Clone ID: MRT4577_136913C.1
aaccctggttttattctttttattgggttggcggcaaccccagggtccgccaacagaaataaatgcgaaaatggcgggaaagagggccctacccatcaggggggcagcccgaaagactagcgaaaaaaaagaccaaaaaaaagggcctttgggggacaaaaaaacacggagaaaacggcacagggcccgaaacaaacgcaagaaaaaacccaggggcaaggttcgaaacatattcacccccacaaaagccaaaaagttggtgctgcgccccccccgattccactatgaaggggccaacgctgcaccgacaaagttctccaaaccccccaccatttcgagggcccaccacccgagcgctttttttagggccccccctttg

SEQ ID NO: 40471 - DNA, 319 bp, Zea mays
  Clone ID: MRT4577_136914C.1
acgtccgacaacaaacctaaccggtctccatacttcaacccatacgccatgtcacatcaagaggggctagtcataaccatctaggacaggcctagcctactttcatcgctcccactgctacttgacgagcttcgttatcttcgaaagttactgattgcactagtcagcgtgctacgatgtgcccatctcatccagtcctgacgctctacttatcttaccttacaccaacagctactgagttcttgatgacaaagatctacactaactctctattccttacaactgctatgctgctgtagacttgagttacttaagccta

SEQ ID NO: 40472 - DNA, 269 bp, Zea mays
  Clone ID: MRT4577_136915C.1
gtgaatgatcaagcagttcaaatatatgaggatgcggtaacatttcatatcaggtcccatcaaagactttccacgtcttgccaggattcagctgcatcttccctttgttacctaaacatggagcagctaacaaaatgcctgctttctctgtatgatatgtatcatgtacttcataagtgtgattcacacagcaaaaaggaggctgagtattattccttctatgtgcttctacatttgggatgcaagatacacaaaatgatagattcact

SEQ ID NO: 40473 - DNA, 389 bp, Zea mays
  Clone ID: MRT4577_136916C.1
ggcttggaaccattgggctgatttatgtagcttgcttatgtgcaatgtttatgcccccgttagatgtgttttaacttatacatataggtgcactacggtactacaatgtacatcaaatgaaccaaatgatccgcacaacgatttcatactgcgacgtaacatctgcttcgtcgcagaggacacgccttatcggaagatacctactacggccttcttcgacagcttacacgtcggatgcgcttacccacataatacctacccctatggatatcatatcgctcagtacttaaaagcactccccaagatgaacgtaccgtacataaatactaacatcgacggaagtacactcgcggataccactcaagattagaggagtttcgtcccgataa

SEQ ID NO: 40474 - DNA, 1198 bp, Zea mays
  Clone ID: MRT4577_136917C.1
gccggcttttctaattcggcacgagggtaaagcagggagcatcttgagtgttcgacagtgagccatggagaagacgtccgagagcgccataccgccggcggcatccccgctgatgctgttcgggtcgtgggcgagctcgtacacgcaccgcgtgcagctggcgctgcggctcaagggcctggagtacgactacgtggaggaggacctggggaacaagagcgacgagctgctgcgccacaaccccgtccacaagaaggtgcccgtgctcgtccacggcggccgcgcgctcccggagtccgtcattatcctccagtaccttgacgacgcctggccggagacccgcccgctgctccccgccgacgccttcgaccgcgcgctcgcgcggttctggtgccacttcgccgacgacaagctcgggccggcggtgggcgcggtgttcgcgtcgacgggggagggccaggaggcggcggtgcggcaggtgcacgagaacctggcgctgatcgagtccgagctccgcgacggcgcgttccggggccgccgcttcttcggcggcgacgaggtgggcctgctggacgtcgtcctgggctgcggctcctactggctcgccgtgttcgaggaggtgaccggggtgcgcctcgtggacgccgacgccttcccgcgcttccacgcctggctgcgcgacttcgaggccctggacgaggtccgggagaccatccccgcggtggaccgcctgctcgagtacgcgcgcggcctccgccacatgctgctcggcctcgcgggggccggcgccggcgccggcgcggacgcgccctccaccgacgcccccgccgcaccgccggcctcggctgacatcgccgtcgacatttgaacgcagggcgtcgtcgcgccgggcgtctgccagcgccgtccggctagccatcagtagctagtacgtagtaccagtatagtttgcagagtcgattgcgccatgtgtgtgtggtggctgcgtgcctgtgcctgtgcctgccggcctggcctggcctggagtgcggttctgctgccgccacagttaattggcccagtttgtctagctgtcgagtttttttttcaactctctctgtctctctccgactcttcccttctttttgataaagttcgtccctgcagttaaaaaaaaaaaaaaaaaaacttgttcttcctgaaaaaatgcgcaaccatg

SEQ ID NO: 40475 - DNA, 575 bp, Zea mays
  unsure (1)..(575): unsure at all n locations
  Clone ID: MRT4577_136918C.1
cccacgcgtccggtggacggacggcccttgcatttgctattattgggtttgattaatcaaatgattttaatctgtaattagtgttccaatgttgccaggatcctgcaaggtagaggcaccacagttagcatgagacccactgaacggatagcacggattttaatctgtgacagttcaaactaatgagtttgtagggcctgtcggtaaggggttctatctagcttcaagaaactgttgttttcagatttttctaccaagtagttttttttcccgaaaccgtgtctcactaaacactattttttattcagctcatctcacgacaaaaagccttttccctgctatcttctctgagaagacaaacagttctcatttgtagcaataaagctatttttggagtcaaagctaacaaagattgggtcactaccaaagaggacttagttattgtttctgagctcnccatacatgaacattcttaggaaaaaactgcttagtggaagacatcgtcattccccttttctaaaatagatgacatattttgggaagttctttttttcctaatcttcatttctgatcgt

SEQ ID NO: 40476 - DNA, 582 bp, Zea mays
  Clone ID: MRT4577_136919C.1
ctcggttctacgacgagagcgccgacctttttgttttttttttgctggcattacgggtacaattgtgtatatgttaattaaaaaccgactattgatttatacggtgcgggagaaggaacatgcatgtgaatcttatgcattgccgacctttttatgtgtatactactataggtacatagggaggatcataagactcagattgacgactacgttgccgtatttataaatatatactggaaccgggcgcgcgcgttggctacgaaagatacttacaatgtgtataacatatacatataaaatgctgacttagcgtgaatcacggatgccacatttgggagtagctaccgtaccaatatggatcggtactcactgccagcggtcgcaaagcatggccacatggaccatatatatacatacatgcgtacgtactatcatgctgtatacggccggatcgacacatacggctggaggttgatcgtagtctgtcgacgtcggtcggagccaccaccagggccagctagcagctagcttggatcggtacggttaacggctcttcagaagctgaggggtcagacgtgctgc

SEQ ID NO: 40477 - DNA, 270 bp, Zea mays
  Clone ID: MRT4577_13691C.1
tttttgttaacacaacacaagatttccttttctgattggaattgatacaaaaatgagtgctttgagtaagaaaaaggaaggaaaagaattccaaaaggaaaaattgtaaaaggtccgaagggaataaaggatttaaaaattttttaagaaacctgaaacaccttgctacttggtttttagggcaacagatttgcatataggacaccggttctttttgccaaacccgtgctttattcaagaaaggggggaggaggggttacacgccatttt

SEQ ID NO: 40478 - DNA, 439 bp, Zea mays
  Clone ID: MRT4577_136920C.1
tctacccctcgtcctccgtttttttttttcctatcatttagttagatggtatggttagactatggtagagaaggcaaatatagagagagttttaacttaaaactggtaagtttcaacatagcatggattgttctactgtctgactgcatgaaatattctgactgtatgaaatataggaagacctcttagtagaggttgttccttaatggtatgaaattattcaggtgggatttcctactgtcaagcaaacaaaaaataatataagtagaggcctaaatgtcatcaggctcaaccatttatagggagaggacatgtcacttcggtagaacggctgttacagggagataatagttcaagttgtcctgtccttactgtactttggggagaacatatgctacgccattaatttgcaggttgttgtgtgcattttttagttgat

SEQ ID NO: 40479 - DNA, 271 bp, Zea mays
  Clone ID: MRT4577_136921C.1
gagctgctccgagccacctgagctcgagccaactcgcgagcctcaagctttttttccagcccctctttgtacttttgccaaagattgaaaagcagctacagttgggagattgttaatggataagattgaattagcagatgaagattcattgcttgaagaattggatggaagtaaatttacgccctagcagtggtacttcagttgtattctttctttagaagcctgcctcaatgcttgaagaattggatggaagtaatttactctctagcag

SEQ ID NO: 40480 - DNA, 305 bp, Zea mays
  Clone ID: MRT4577_136922C.1
ggggaacaaaaacccttgcttattttttttttggctcggttcctagggggggccacccaagcggaccacaggggtcccacaccctttccaaagggaaaaacggccccggcgcctttttctgaggcgaccgggccccgggcctttcatagaaaaaaaagctcgcccaaccccagaaggggccaaacatctattccctccaggggccggggccccccccgcccaagccctccccggaaccttttccccccccgcggaaacgggaacggcccaccccttccgccccctcttcccccccccccttccgg

SEQ ID NO: 40481 - DNA, 372 bp, Zea mays
  Clone ID: MRT4577_136923C.1
gcctgactgatgggcctcaaagtttgatttgcggggaaggccacgcgaatgcacatacatgcatgagaaagaataaatatagtggtggagtttctggaggtgcaggtctatggaaagtgcctggtttacagtgaatgcaggtttcgttgtatatggtagattcatatctccccttgctgctggggtgtgagacctcctttgccacaggtagggggggtattgagccccaacccctggctgtaaaagcacttacctttggtgcagatgttgacgttcttctggtgtgggccggttccctagcatcgtgggctttatgctgtcccatttctttttgatgcattgcaggccgtatcgaccgagtccttgcccccg

SEQ ID NO: 40482 - DNA, 173 bp, Zea mays
  Clone ID: MRT4577_136924C.1
cgcggtaatccacgttatggtttcctgcatatctcgttcaacgtggcattaccttcccaacggttccagccagtttatgcctcatccctaatgtgggccgaatcaatgcgtaaacttgtcttcatcaatactgcagccagggtgaagctgtgacctcagcttgtgcacggatt

SEQ ID NO: 40483 - DNA, 653 bp, Zea mays
  unsure (1)..(653): unsure at all n locations
  Clone ID: MRT4577_136925C.1
ccggccgggatacaccttctcttccccatctccaccttacaattaaccctccaccccatcatatacccatacccacaacagcacatctccaagacaacagcaaccatggttcaagccagtgaagtcctgtcccgcgagaccggtgtcatcgtcggcgacgacatcctcgcgcttttcaagcacgctcagtcagagggctatgccatccccgccatcaacgtcacttcctcctccacagttgtcgctgccctcgaggctgcccgcgacgcaaagtctcccatcatcctgcaactgagcaatggaggtgccgcatactttgcaggcaagggcgtagccaacggcaagcaggaggccagcattgctggtagcattgctgccgcccactacatcaggtccattgcccctgcatacggtatcccncgttgtcctccacacagatcactgcgccaagaagctcctgccctggttggacggcatgatggatgccgacgaggcctacttcaaggctcacggagaggccctcttcagctcgcacatgattgatctctctgaggagcccaaggagtggaacattgccaccaccaagaagtacctcgaacgcgctgcaccaatgaagcagatgattgagatggaaatcggtatcaccggaggag

SEQ ID NO: 40484 - DNA, 592 bp, Zea mays
  Clone ID: MRT4577_136926C.1
cttatttgcttgtttcttgacaagagagagggagagacagtgagaggcagaccagagctgcaagcgaactagcaacagccggtgttactggtaggcaacaattcccacgaaggaggcagttggcgatgaagatgatccaccaaggacctcaaggtatgctgaaggaggccccataccacctctgagcagcagcaggtactgccgtggaaaacatgtaccacgtggaggcagcaattatgggtccatctgataccccatattctgctggagatctactagcatacactacattctactgctcactcttcttgcaaaccaccgaccgtgcacattagcatctatggtgcaccattcaaacatcatcgagggcgaaagcaatccgtctggacatgttgaaagacagctggaatcccgcactatccctttccaaagcgctcctgtctatcttgttgctggttactgatcctgaccactacacccctttattgcccaagattgctgacatctccaagacggaccggaccaagtacgatatcaccgtgaggacctgggcccagagggcagccatgtattattttgtttacctggcctt

SEQ ID NO: 40485 - DNA, 547 bp, Zea mays
  Clone ID: MRT4577_136927C.1
ccccggcccccgctcgcactcgcaggcgcaccacactccgtccccctccataactcccacccgcgcgcatgggcgatccgcgggcccgcacgtccgccgggccgccggcgagctgcggccgccggagccggcgctcgacccgctcgagttcctctcccgctcctggagcgcatccgggcgcgcgcccacgcccacgccgccgccgccgccggtcgcgctcgcggtcagccccatcgcggaggacgccgcgtgcgagctggacgatgggggcgtcgtcgccgccgcgtccgggagctccttctccttcgcgtccgcggccacgtcgcagctcatcatggaacggatcctcgcgcagtccgtgagagccctgccctgacctgacttcgtccgtccttcctctgctgagtctgctccgcgattcatcttgtctttttttttcttccccctccccaaaaccgcactctctctcttttctcttcctcctgaatgaactagaaagaaaagggcaatcgttaccggtgattaaaaaaaaaaaaaaaaaaaaaaa

SEQ ID NO: 40486 - DNA, 407 bp, Zea mays
  Clone ID: MRT4577_136928C.1
aactactgctcatgttcttttttatccccaaagagcatggcatatgcgctgcactttatctagcccagctccagcgcccgacagtactcacatttgcaatgaggcgacagtgcgggaacctcgattttccaatgaactacttatactgcatgaccagagggcgctagggaaacaaagctctgaacccaaactaccacattctccatattacagggcacaaataactgtcttacacacatcctggattctatcaaacatccatccccgttatttgtggcttacggttcgcttgcactggacttggttgccggaagctggaatactctgtccgccgaggcagccattacttgggaaacactcgctgtgactaaaagtgcggcgcgactcaccgtaactgaatcattgac

SEQ ID NO: 40487 - DNA, 350 bp, Zea mays
  Clone ID: MRT4577_136929C.1
gggggcttgcagcaaaaaaatatttaaatttttttgggttcgattttggaatttgttccaaacagggcaaaaattacccctttttttttggccccaactaccaaaatttaccatgggggacaggggaaacaaaatcggggaacgaaacagaaaaagaaaagggaaaagaagagggggacctaaatcgatattgttttcgccccaagcatccaaattttaaaagctgcaaaaagcacggaagcaggggctcatcgtcctgagaaatttgacccaaagaattattgcccctggatgttgacgaccttggcccccgccaacagtttggggatggggagggacaaaactccgtc

SEQ ID NO: 40488 - DNA, 2404 bp, Zea mays
  Clone ID: MRT4577_13692C.1
ccggccgggataagattcgccaggactcaagagcccgtcggcgaaccgatacagccggcgaggggagggttttttttttttttttgacgcggacgccagaaatcccgtcatgtcaggtcccggcgcagaggagagcgcgagcaccgagaagcgcggagcggataggcaaagagcagacgagcagtgtagacaacgggacagccattgacttccccgcctaccctgccccgtcccgtccgtctccgtcccaatcggatccacccgcccgtcgtcgcctataaactctccctcccatccgtctcttgagggcccggcttcctcccaactgccaccgatttgtttgttcggcttcggccccatctccagtcacccgttcccacttcattggtcgctgctccctccctccacggccgatcccgtgccggcgagagggaccatggcggggaaagggaaggaggtgtacgtggccgccatcgaccagggcaccacaagcacccggttcatcgtctacgaccgccacgccaaacccgtcgcatcgcaccagctcgagttcaagcaacactacccggaggcagggtgggttgagcatgatcctatggagattatagagactgttaaggtgtgtatgaaagaggcagttggcaaagccaaagctggtaaacacaatgtggttgctggtttgaaggccattgggatcacaaatcagagggaaaccactgttatgtggagtaaatccactggccgtccactgtataatgccattgtgtggatggatgctcgcacaagccctgtttgcaggagattggaaaatgagctgtcaggcggtagaacccacttcgtggagacatgtgggttgccaatcagtacctatttcagtgctctgaaattattgtggttgatggaaaatgtggatgctgtcaaggatgcagtccggactggtgacgccttattcggcacaatcgacacctggttgatttggaaccttacgggaggtgttgctggtgggcagcatgtcacggattgctcaaatgcatctcgtacaatgcttatgaatctaaagacacttgactgggataagccaacacttgctgtgttaggagttcctgttgagattttgccaaagattatcagtaattcagagaaaatcggtgtggtcgccaaagagttcccgtttgcaggagttcccatctcggggtgtcttggagatcagcatgctgctatgcttgggcagctgtgccagaagggtgaagcgaaaagcacctatggaactggtgccttcatccttcttaacacaggggaagagcctacccaatcctcccatggccttcttagtaccattgcttacaagcttggtccagctgcacccactaactatgctcttgaagggtccattgcaattgcaggcgcagcagttcagtggctgagggacagccttggaatcattcagtcagcagctgagatcgaaaagttggctgaaacagtgccagattcaggtggagtgtactttgtgccagcatttaatgggttgtttgcaccatggtggagagatgatgcgaggggaatttgcatcggaatcacaaggttcacaaataaggggcacattgctcgagcagtgctcgagagtatgtgttttcaggtgaatgatgtcctcagctccatgcacaaggatgctggagaggcaggagaagtaaagagcgcagaaggagagttcttattgcgtgttgatggtggtgctactgttaataatcttctaatgcagatccaggctgatttattaggcagccctgttgtcagaccagctgacatagagaccacagccctcggagctgcatatgctgctgggttggctgcaggagtttggaccaaggagaaggtttttgcaggtttgcacaaggagaacacgacagtcttccgcccgaaactggatgaggcgcacaggaaaaagagggcggattcatggtacaaggcggtttcaagatcattcgatctggctgatctttctctgtaaatttatcctgccagcgctcctctatctggttttggaagctgcaaatgaataaattggtcttcgctgggactaatcttaactgcttgttatttatatataacatcacgatgtttataaaagtgagtacatgaatatcctcagattttcagcaggaagtgtttttctagaatatttatgtgtgcttccatagacccggatggttgactgtttgcttcaaattaaagccgactatttggactgctacaaccataatttatagagataaaaatattgtagaagcagtaaaagctggtacgggataaagccaagcgaacaaccaatattgaacaaaggaggcgggaaatgatagaagaaatacattatgcataagatcgtgcttctgctggctgtttcatc

SEQ ID NO: 40489 - DNA, 151 bp, Zea mays
  unsure (1)..(151): unsure at all n locations
  Clone ID: MRT4577_136930C.1
gccacacgttcgtccatgctttcgntaacacagatgcagttagatcacacacagcctactaccctgaactatctaccataagtgcctcccgtgcgcctactgcaaatcaagcagtggacatgtgcttatacaaacgcgccacaatgggctg

SEQ ID NO: 40490 - DNA, 598 bp, Zea mays
  Clone ID: MRT4577_136931C.1
ggtgatgaaccaatcggtgcatcacctagacctatgatccaaccgaactaattaaccagcaagccaatcggctagtggaatcagcccaccaaaccacgaaacagatccaattaatctgctttttgagttcgcgcgcattgattctgttggggtgacagtttcagtcatttcgttatcattgtcattccgtcacattttcattcatttcattacaatttcagtcattctgttatagtttcagtcgttccattatagaattgtcttcctgagaagttagcaactgcccctccatcaccaaagaatgaataaagtttttcttttttgctgaatctggcatgagcttggaagaaagaagtatttgcatcaccatctttaacaaatctgattctagatctcaatctggcgatggttctttccatggaagagagctttagacacaaaagtttggttttattccttagcggcttagccattcttccgctggcccaagggacctacagtcctgggcaatttccagcaaatgtaaatctttttggccaaagcaagttgctatgaaacattgcccacattttttggctccaagaacaaccaattattg

SEQ ID NO: 40491 - DNA, 736 bp, Zea mays
  Clone ID: MRT4577_136932C.1
gggcgattgggatcctcgaggccggccgggagcattctattcacttacgattcttattcttttttttttcatccttccaattccacattcatattcatcatgcttcgccaaattgctcttactgcactttctgtgcttcctctcacgatcgagcaggccactgaggattcgagaggcctgggatcaggtcacttggactacatatgcacctgactgagaccagggagcgaaagtgtgtccttgacaagaccaccgctcacagtgtgaccaactctatcagggccactggggcccccaatggtttctgtggacacaagatcttcgtgaccgatgccattcccagtggcgatgtatatgtcacagcttgtatgaagactgaaaagacccttgacgattctcacgtcaccttcatcaccatgcccgacgtagcccatggtgaggtcaagcagctccgcatcggcgtccagagcaagatcctcatgtacaaccacgaggacaaggacgccactcttgccgatctctcccccgaaggcatcgacgactccgagaacatccccgtcaagcagcggcagtgccacaagaaccacctctcccccgacggaaccatcgccacctggttcagcgacagtgctgtcaagggtctcggctacaagcccaacgacgctgcgtcttacagcgacgggtgtaagaacagcaagcccgagcccaagatccagggacgactacttcggctggg

SEQ ID NO: 40492 - DNA, 256 bp, Zea mays
  Clone ID: MRT4577_136933C.1
atcgatcacgcacacgcggccaagagggcagagagtggaaaacaggacggacccccgcccaggcacacgaggcgagagcacaaggagggaagcaaaggggacacagctgcagccagagcgaagaaaccacaaccaaaacaacaaaggcacgaaaaacccgcagacggagggcgagacaagcgaaaaaggcgaaggagaaagacaagccggaccagacacaacaaaggcgagacacagaagagagccggggacaagc

SEQ ID NO: 40493 - DNA, 517 bp, Zea mays
  unsure (1)..(517): unsure at all n locations
  Clone ID: MRT4577_136934C.1
caaaacggacatgtcagccatgccttgaaagtcatggatctgatgcttcangagggccatgatcctgatgttttcacctacaatactgttatcaactgccgcggtaaaaatggagagcttgatgaggccaaaggaattgtaaatcagatggtggataggggttgtttgcgtgacaccacaacgttcaacactctcattgttgctctgtgctcacagaatcgacttgaggaagcattggaccttgcacgtgagctaactgtgaagggactttctccagatgtctatactttcaatattttgataaatgccctttgcaaggtaggagatcctcatcttggcattcgattgtttgaggagatgaagagcagtggatgcgctcctgatgaagttacatacaacattttgattgatcatctttgctcaatggggaagcttgtaaatgctttggatttattgaaggagatggaatccaatggttgccctcggagtacagtgacatataacacaataattgatg

SEQ ID NO: 40494 - DNA, 206 bp, Zea mays
  Clone ID: MRT4577_136935C.1
taatagcatatcaatggatccatagaatccaaagtctaacttggaaataaaaccatgaaaatagaggagagaaatgaattttattcaataaataaaagtataatttaataacttcatcgcagtaggtatgatcaaactaaataattattcagtgtacaaaagtgccacaaagtttgaatttaaattgaagtttgaatttggaattc

SEQ ID NO: 40495 - DNA, 1317 bp, Zea mays
  Clone ID: MRT4577_136936C.1
gggtacctcgaggccggccggggagtattctcagtgaggttctcttgtttcattggctttacacgaccttgttaatagaagcagaacattttttaattgcaagattattgtattcgccttttgtagcaagaggagcttaaattcttttttcaaagttgctatgcattgtagcagcttgaaatgttatgctcgaagccggcatctgctgcttgacacaggtgctgtcagtcacactagatcaatggacggatgatgagatcaactccatgatagaagttggtggaaactcttatgccaatgctatatatgaagcatttctgccagagggctatcagaagccgcatccagattcaagccaagaagagagagctgatttcatcaggtacctgggataaccaaatattttgcttggggagtataaagaattacggtgctatctaagagtcaccgagtttagtttttgacagcatttagctagccattcagtttaaaatataaggtgtcttttgtctgaaccactatagctattctgtgctttacaagctcattaattgaagaacttggtatgaatgaaaatacaatcctatgcatgaaagactcgatttggtcactttcttgatatagtaactgctgaacactgatagtttttgcaacctctcaggtcgaagtatgagttgcaagaattcctgaagccaagcctaaggttagtttccagcaataagggctctttagaggctaccagtaccagctctcgaaaacataaggacaatactgtgtctctttctgctagtttcagcagtgaggtaagtttcacttaactgttagttaaattttgctgtataaaaagagtcagtttcgaccttcaatgacacgatgcccttttttgcatccttcgcttcatatatttttcaggctggaatgggttgagtcattggaatactaaaaagtaaagtgataagagggactaaactagctgtaagagacctgatgagtagtgacccctatgttgtactgaccctaggacagcagaaagcaaaaacttctgtgagtaaacgtaatctgaatcctgtttggaatgaagagcttaagctgtcagttccccagcagtacgggcctctgaaacttcaagtgttcgaccacgacatgctatcgaaggatgacgagatgggtgacgcggagattgacctgcagccgatgatcagtgcagctacagcgtttggcgaccctgatctgctcgcggacatgcagatcggcaagtggctcaagtccccagataatgcgctggcaagggacagcgccgtcaatgtcgtttgtggc

SEQ ID NO: 40496 - DNA, 1747 bp, Zea mays
  Clone ID: MRT4577_136937C.1
ccggccgggagttccctgtgaatctaaacgcactcacttgccggcagcgcactcccactcccaccggttccgccctggtctaccgtctacgttctgtcgttctgtggctgagctccaaagtccagagattagtgaatccaaaaggcgaccaaacagatcccccgcaccccgctcctgtgctccgctcatgttagagaaccccctgggaaaacgcagcggagaaactctggagatcgaaaccccggcacgcagctaggcgaactgcacgcagctgcaggtcgacagtctgatccatttcttgtcgcttcagcttctggtgctggtcttcttccagttgcatcctggttacctgtgtcaaggggcggttggtgtctggtgtagttggagggcagagcttcgcgggcggcgaagaagaagagcagcagagagactctgctgacactgaccgagggagatatgacgaggaagctgagagagttgctgcagaagagcgacaaccgcgtatgtgccgactgcggcgcacctgatcccaaatgggcatcggctaacattggagtattcatttgcctaaagtgttctggtgttcacagaagcctcgggacacatgtttcaaaggtgctgtcagtcacactagatcaatggacggatgatgagatcaactccatgatagaagttggtggaaactcttatgccaatgctatatatgaagcatttctgccagagggctatcagaagccgcatccagattcaagccaagaagagagagctgatttcatcaggtcgaagtatgagttgcaagaattcctgaagccaagcctaaggttagtttccagcaataagggctctttagaggctaccagtaccagctctcgaaaacataaggacaatactgtgtctctttctgctagtttcagcagtgaggctggaatggttgagttcattggaatactaaaagttaaggtgataagagggactaaactagctgtaagagacctgatgagtagtaacccttacgttgtgctgaacctaggacaacagaaagcaaaaacttctgtgagtaaatgtaatcggaatcctgtttggaatgaagagtttaagctgtcagtttaccagcagtgcgggcctctgaagcttcaagtgttcgaccacgacatgctatcgaaggatgacgagatgggtgacgcagagattgacctgcagccgatgatcagtgcagctacagcgtttggcgaccctgatctgctcgcggacatgcagatcggcaagtggctcaggtccccagataatgcgctggcaagggacagcgccgtcaatgtcgttggtggcaaggtcaagcaggaggtctctctgaggctgcagaacgtggaatcgggggaggtggaactggagctggagtggataccactcaatcagtagagtttaaatccacctgtaggctatatgtgatgcatgtttcatgtgtgcgacacaagtcctgatgctcttgatcatcttcagtttgtcagggtgcctgcagtgttgtagactatctttgcggttgtagcatcagtgtcggagcccggccaccgtgactggttcagcaactcggtacaatgatagtttgaggactcaatgacttgttagtacaagtatgagactgttgtttgtatgcgtttgctggtaatgaaatcttaggtgggggaccctccccctcaactttttaaaaaaaaaaaaaaaaaactcgagagtcttctagaaagaccgcggg

SEQ ID NO: 40497 - DNA, 258 bp, Zea mays
  Clone ID: MRT4577_136938C.1
gctgtgctcagaccaggaatgactacatcagggagccccagggctccggtctgttcaggtgggtttacgcgcggcgaccagtggtgcccagaggcttactttgaaacctgacttgcctggactcagattgtgaggcctcgacccagtccgggtcctgcgcctaccggactgggtctggagaagtgcaatgagccaagaagggtaactttgcctcgatttagagccagtgggttagcggggatccacctactccagctc

SEQ ID NO: 40498 - DNA, 705 bp, Zea mays
  Clone ID: MRT4577_136939C.1
ccgttcctgtgggtgctgcgggaggacaaccgcagaagcgagggcgccggcgccgacgccgcgacgctggacggcggcgggcgcggcatggtggtggggtggtgcgaccaggtgcgggtgttgtcgcacccggccgtgggctgcttcgtcacgcactgcggctggaactccacgctggagagcacggcgtgcggcgtcccagtcgtgtgcgtgccgcagtggacggaccagggcaccaacgcgtggctggtggagaggatcgggaccggcgtcagggccgccgtcagcgacaaggacggggtgctggaggccggcgagctgcggaggtgtatcgacctcgctacctccgacatggtgcgcgacaaggccgccgtgtggagggagaaggcgcgcgccgccgcgtcgaaaggcggctcgtcggagaggaacctcaaggcgttcgtcgccaaacagatcgccggcggaaataactaggccgtcagctctcgtgcggtcgtctcgtcgcatgcatgattgctctcgtggcctttacttaattgttgctctaagcgcatgtgcaagtgcaaatagagatggtcaaacgggccgcccggcccggcccggcccagacccggtgaagcccggccaaaaaccgggccgggcctgctaagccagcgggcttaattaaaagtccaagcctggcccgcagcggtccgtaacgggccg

SEQ ID NO: 40499 - DNA, 351 bp, Zea mays
  Clone ID: MRT4577_13693C.1
tcttggacgcctgggttggggctaccgaactagcattagttgagagaagatggtgggggtaatatataatggggtttgggtggcctggatcagttcattacgaaaaatgctacacttacttatgggaatgaaactttcccttgctcaattagatcaatgaatttttccgtctttctctgttgtgcgtgttgcttttcaatgcaaggttgtctttttccttatcaagctagttttaagtttttagcgcataacatagtcttattctaatgttctttgttcaatggaagaattttgttaggatatttttttttgaacttgtagacctctaatttgagattttgctttatgatt

SEQ ID NO: 40500 - DNA, 280 bp, Zea mays
  Clone ID: MRT4577_136940C.1
gggggaaatttaggaaaattattggcatataacccagagaaaagcaaagtacacacaaaacgacaaaaggcccacatcagcaaggaagccgtccacctcacacctaacagccacaccagcagaagggggaattgcaaactgtaaaatgcccgctaggatgcgataaagaaaatacatgaagaggggcataactgcactctgacacacagaacgcaacaccggtacaaattcacacgggaaaatggccaagcaaagtgaacagtcacaacaggacgcagaa

SEQ ID NO: 40501 - DNA, 501 bp, Zea mays
  Clone ID: MRT4577_136941C.1
ggaacaaataagctccctttctcgggtcgaataaaaacaaaaagagggggttttcctttttttttttccccccttttgccgattctcttttcttttctcctcttttcactgctgctgggccggcgttttttggggcgccgtcactgccccgcgacggggcggaaggaggacccggccgcggccggggggggcccggaggcaaagggggccgggaagggaggggacccccgtttgctgccgtggccgtggccggggaaactgctgcgggggaggcggcacttgaaggaacctgcgtgcgtggccggcgcccacacccacttgggcggggccccgtggccggggttgagggcggacaacaagctcctccgaagcgtcttgggcaaccccgccgcgctggtcggagtcgagctgggggggtggccgtggaacctgccttcctccgccccggtgtccacgaaattggacgccatcagcacagacgaaagaaactgactgctgata

SEQ ID NO: 40502 - DNA, 888 bp, Zea mays
  Clone ID: MRT4577_136942C.1
ggaagcttttaagaaaaaaacattccacccaccaacaaaactgtcaagtggtcaccagctaggtttccctttcccttccgtggcccacggctccgcgccctcctccgcagtcggcagtcccgccgttcgaaccccgactactgacgccgtgttgactcgcttgcgacagccaacggacttgagcagaaacgcacgtcctcccgtggccatggccgcggcggcgcgccgcgcgatccccctcgtcctgatcttcctcgtctcggcgcccttgtacgcggccgatgcgtcagcggcagcggcgggggccggggcgaactcgtcgtcgttcctgctcgcggcggagcagacgcagcggaaggacccgctcgatgggctgaggtactacaccggcgggtggaacatcagcgacgagcactactgggcctccgtcggcttcaccgcggcgccggtgttcgcggcggcggctgtctggttcgtcgtgttcggcattgggctgttcatcgccggctgctgcttctgctgctgcccgggcgccggcgacgcgtactcgcgcgcgtgcctgtgcgtctcgctcgtgctcctcctcgtcgccacggccgcggcagctgtcggctgtgccgtgctgtacgacgggcagggcaggttccacggcagcacggcggcgacggtggactacgtggtgcggcagtcgggcgacacggtggccaacctgcagcgcttcacgggcttcctggagaccgccaaggccgccggcgtggggcccgtcgcgctgcccgacgacgtcaaggggaggatcgacgacgcgggccgcaaaagggggggcgcggcctccgacgagctcgccgcccgcacggccagcaacgccgccaagatccgcgccgccctgga

SEQ ID NO: 40503 - DNA, 118 bp, Zea mays
  Clone ID: MRT4577_136943C.1
agcaaaaaaaccctccttggacagcatctagcctgctccggtctgatgggcttgggttgcttcaggtgcttcgcgcccgaggtggataaagacctcaagccctccaagccccaccact

SEQ ID NO: 40504 - DNA, 347 bp, Zea mays
  unsure (1)..(347): unsure at all n locations
  Clone ID: MRT4577_136944C.1
aaaatttgaaactgttaaatttaaatgttttttgtttcnnntttaaaaaaaaaaccaaaacatggatcatatctgattcttttaacttaaaaaccccaaaccatcccgaattttttaacaaacacactaaaaaaatcccaagaaggggatcatcccacttccgtgtatttacataacccatccctaaatgtacatacactggaacaaaacccacaaacccccttaaatattttacccccccaaccattattgccgaatatctcacaaggattattgcaaaacatttaacatggctcacaaggcaaaccttgtaggtcttgggctctttgcaatccatggcaaccctt

SEQ ID NO: 40505 - DNA, 241 bp, Zea mays
  Clone ID: MRT4577_136945C.1
ttgggcctaataagataaggggtacatgtgaacatcacttgcagatgggtaagacagacctaagggacgggggaaacccgcgagatagcgcaatcacgcgcgtcagccgatagggaataggtttaagatttcactagccgagacggggcggcagactgtgaccgtaggaagtacgctgacgccgatagtggcactcggtgagagttatcttatctgattaacggtcgcgcaaccctggaat

SEQ ID NO: 40506 - DNA, 785 bp, Zea mays
  Clone ID: MRT4577_136946C.1
ttcggatatccgcatccgcttgctgctgctgcccctgctccggctgggacgagcgagcctcctctccctccttgtcgcgtcccacataactgtgcctcctcgccgctgcgccccacctctgctcaggcccacactgccctgatcccgccggagtgcccgcacgcgcgcccttgcctgggccggccgccggcgaggggtctgggcggtcggtcgacgtgaccccccccgcaggcgcgctgtctcttcgtcgccctgctctttttgaccggcctcgcctcgctgtccgcgagtggcgccgtgtcggcggcacacgccggcggcggtgcgggaacaaggcgagggcggcgcgccttgtcgccgtgcggactgagcatgacttgagccttgaggcgcgtgcgattgctggctaacctgctggaaatagcatgggcggcagagggattgagaacgcgggcaaattcaggagatgataccaccataatccaccaaccgaatcaagaagctaaggtccggctctggctttgtgaaactgtgcatgtgtcaaatctggctcagtaactgttcactcggcgccctcttcatcgccggtgtacgccggcgccgaatcggcgtccagtatccgagccaccgaagcacgccaaccacctcgagcactctaccctcgctgaggatgctgatgctaccggcgcctcccctcccttatctggtatgccatgacggcgtggaatacgagattcatccagacttgataggtttctttccttgttaaggaccctacttgcttg

SEQ ID NO: 40507 - DNA, 305 bp, Zea mays
  Clone ID: MRT4577_136947C.1
ggttggcaaagggctgtccaaggatgacaaggcccagaagcttgcgctgcagcactggctcgaagctattgacccgcgccaccggtacggacataacctccactactactacgactgctggctgcggtgcgagagcaaggagcccttcttctactggctggacgttggagaaggcaaggaaatcaatctcgagcggtgtccgcggttgaagcttctaagccagtgcatcaagtaccttggtccgaaagaaagagaagagtatgacgttgtgatcgaggatggcaagttcatgttcaagaaaagca

SEQ ID NO: 40508 - DNA, 329 bp, Zea mays
  unsure (1)..(329): unsure at all n locations
  Clone ID: MRT4577_136948C.1
tccatcgccgtccgggccttnncttctccctaatatgctacnncttcttcctatcagaggctaggagttcgatcaagtgatttgaatcctggatactggtagcccacaatgcacacatgaggatggatagaacattcaatgtactgtgttcccatacctaatccaaggtatgaatgcgaggcaacgttaagtnngtggtagtaaccaaatggtgacctnggtgagagatgagagatgccgtaagaggggccatgtgacaagagcatggagtgaccattcatgctggtattgtcactagtccgcctaggtttggtagacccaaatcgttg

SEQ ID NO: 40509 - DNA, 537 bp, Zea mays
  unsure (1)..(537): unsure at all n locations
  Clone ID: MRT4577_136949C.1
cttttctctctattctttctttttctctttttttttttctgggaaatcacaaaacaggttcctgacagctttccaattttatttcaaacaacgcctattggtacataggatcccaccttgtcaccggcctttacatgtgagactcgttgtatgttaacaggtgctcacaacattgaaaccctaagcctggggggccctgcccagggcgtgcaaagagggcgaaaggtaacatttttcgcacggacctccccgataaatgcgcattaaacaaaacctgccatgcccgataactaaaggaatgagccttctcgctcagagaggacagatggagacagggcatcagcgttgccagggacctaccaagcgggcacctttttgggcgattgggcggcagcggccttcttggggaaatttttatcttggccttccttgggagcagccacagcgggtttattggggagcagaacatggttaacgttgggcaaaaccccgagctgtgctatggtgacgccggtcccaaaatacttaanatagtcc

SEQ ID NO: 40510 - DNA, 422 bp, Zea mays
  Clone ID: MRT4577_13694C.1
aacaacaccgtcttattgggagtattcatcgggcatcatcccacagggggggcccccccccccgggtcacaggggaagaccaaaaaaggaaggcctagattcaaaacagggcggggatccactcatgcagggaagccccattaccccccacacgtccgggacgtaacttttgggccccccccccctgttggctgctcttaaccttcctttgggttccccggggcttttgctaaaccttttaaacccccccgtttttcgggggtgacggtttcgcccccctctcgttaagctggggccccggttccttgccctgccccgaaactccggtgggcttcggggccttaaggaaacccattggggggggcgggctactaactagctaactctggcgcaaccctgcctggagctaaaatctgcttgcc

SEQ ID NO: 40511 - DNA, 314 bp, Zea mays
  Clone ID: MRT4577_136950C.1
ctaccccaccttttttttttttaaaaaaagaccggacaccaggggacaggttcatttttaccgatcacacaagcacctacaaactattcttcttctcaaggaacaaaaacgaacccacaaaggaaaaccacactccttaggtgtctcttgctaaatttaacaaacctccaacactttggaggaagtttgaatgggaatcaaaactccacgcacaaatgaacaaaaccaggaaatatcagacaaaacccagcaacactaccaaattatccaaaagggatacaaaatacaacatctaaaaaaaataacacaggggg

SEQ ID NO: 40512 - DNA, 203 bp, Zea mays
  unsure (1)..(203): unsure at all n locations
  Clone ID: MRT4577_136951C.1
ccgtctccccgggctcatgggccggtaggccncagactccgcgagaggaggacgaggcatcatcttgccggcggttgcggcggcggttgtggttgctactgttgggtgcagtggcgccagcggcgggttgctatacgcgcgtgttcaacttcggggactctgtggcggacacgggcaactacctgtacgtctatggcaacgac

SEQ ID NO: 40513 - DNA, 356 bp, Zea mays
  Clone ID: MRT4577_136952C.1
gcccaccactactagcttccctcctcaccggctgcgtctccttgcccgcgaccgatctacccttcggcgcctcatgtccgctcctcgcgctggaggacttccttgatctcctgagatgactgatcactacattggatggtaactggaagattactttggccttgactaccttgaagagagattgatgcctgtcatgaaagcttttgtgggtaaaagcccacatactgatgaatcagaaggacggcgagctgacacatgcacaaatgtacagccctgtgatcgcactggtcaaccactagctgttaagagcgccatactgcgtcctaacctggtaagaaggttccctggacaggttg

SEQ ID NO: 40514 - DNA, 1879 bp, Zea mays
  Clone ID: MRT4577_136953C.1
catacattaactttatgagggactcatttaggagggagggctttagtcttaatggacaaacagagggtaatgtggaaaacagaactgcagagcctgaatcagcttctgtgcttgggcttcataatgcatcattgctagctgaaatatgcactctactaggcaaattattgttgaacaggctggtgcattgctgtctcaactctcaactcagctgggagatctagagaatgtaactgattctgcaatacgaagggacattcaaagtagtgcagttcgcacgggttctctatttcagaaccttggttctttgcttctggaacttgggcgcaccacaatgctcctgcgtataaatccgtcatcttcagaagcggttgtaaactctggaccagctctttatatatctccatcagggccaaatcctcttatggttcaacctgttccatttccaggaaggtctgtccaaatgggtactttgttttctagtctgggttcacaaggatctgttctacatccgagagatgttgatatccatgtccgcacaagtgggtccgtgcctggagccagtactaacccaagtgattcagctggtgcgcaagcgcatcaaaatgtgaataggccaggagatgcttcgcatgcaaatattggtgaagcgttttcaggggttgcaggtggcactcctttttcagttgagtccggagttagactattgccacttagaacagtggttgccatgcctgctggcatcagtcgtgctccatcagggtcgtctagtggtgggcttggtattatctatccatttctcactagggttcgacaaagggcaaacactaatggtaatgatgaaaggaatggtcaatctccaaatgaatcggctcgtagtagcacccatcttaatcagcaatcaattccgcagtcatctcaaactcatgaagcaggtaatctgagatctccagttgatgtcaatgttggagatggctctgagacctcacctgggcagcagaatggtctggtcactctctctcagataatggacttttttggatcaatgctcccaggcgaaaatgttcgaggaaatacttcaagccagcaaccaccaatggcttccaccgagcagggagagggtagaaatcttgcaacaccagaagtgtcaggagccagtgaggaggccctacgctttgctggcatggtcagacaaattatgccatttatctcccaagttgaaacacagaatcaaagtgccccaccagacagcagcagcacacctgcacaggctgcatctgggagtgcagacagagctagggatgtcccaaatgattctacgagttcccgtcaacataaccgcgaccaaattgatgagcctaattctaaaaggcaaagaactagtgactgattggaatctacttgtgagctgagaatcttgccagttcttgatttaccccagcggatgatcaaaataaggacttgagacaaatggtggcagtattgagacaaaaatggattagctgtggtatatacttggcactgagggcactagacgaggcacctatgccttttttttttgagggggcgcatcttataagctgttatttttttagtgcaacgagcatacatgctgctggcatccaatccccaatatgtacaagttttaattcaggttgtgatcatttacgcaacgaatcaaagcctccgctctggtcattgccgtagcatacggaggactgacgcaatcaatcatattgttacgagaatgtatagcttaagattgtatgtttttttttaccatcgcttaagacaatcagagcatatagttcatgcttattatagtatgaaaaaaaaggccctagtagtattgttcatgcttatcattagcattgctttt

SEQ ID NO: 40515 - DNA, 553 bp, Zea mays
  Clone ID: MRT4577_136954C.1
gggttatgccatttatctcccaagttgaaacacagaatcatagtgccccaccagacagcagcagcacacctgcacaggctgcatctgggagtgcagacagagctagggatgtcccaaatgatcctacgagttcccgtcaacataaccgcgaccaaattgatgagcctaattctaaaaggcaaggaactagtgactgattggaatctacttgtgagctgagaatcttgccagttcttgatttaccccagcggattataaaaataaggacttgagacaaatggtggcagtattgagacaaaaatggattagctgtagtatatacttggcactgagggcactagacgaggcacctatgcctttttttgagggggcgcatcttataagctgttatttttttagtgcaacgagcatacatgctgctggcatccaatccccaatatgtacaagttttaatcaaagcctccgctctggtcattgccgtagcatacggaggactgacgcaatcaatcatattgttacgagaatgtatagcttaagattgtatgcttttttt

SEQ ID NO: 40516 - DNA, 415 bp, Zea mays
  unsure (1)..(415): unsure at all n locations
  Clone ID: MRT4577_136955C.1
cgaaatncccggtccggccaacccttccaaccatccaaacttccaagttaccaacaactgttccagtttttttccaaacaataattgaactgaaaatttaaaacctttatgggcaaatttttcctaaaaggcctgttttcccaccgaaaccaccaaaagtttaacaatctatccattaaaatttcctaaaactacacttttccaaactaaatggaattaacaaccttccaatctgttggaatatattgcaacctagtaggattaaaatatttatttcaaaattaaaaaaaccttccattgaaattttctaaaatcccttttaaaaaaatntaaaactcgtatgatcaatatataccacaactnttatttaattctatggtataatttttatacaatttacagaataactttttcc

SEQ ID NO: 40517 - DNA, 435 bp, Zea mays
  Clone ID: MRT4577_136956C.1
atgtttctcatctcgctcgagcgcacggacaggtgacggaagcacgagaatcacactgaacagccttcctagacatcgtgagcgcgcaggaagacgtcttaggggcgggaggataccctacgatcggatcagcagaagcccgaggggtcttacaacgcctagattggggtgctcatcaacgactaccgacgagcgaatatgtatgtgggacgagctgccacgttgaggaccgccctgaagaagaacagcttgacctactaaagcaagctgatgctgcaaggagtgcatgacaacgagtacacaaccctgtggaccccacctgcaggtgctatccgctggaaccgacacacgcaccaccaagttctcgatgccatacgagtcgtatgctaggatcctgacgtgcctatatcagatgctcacctaccacatggcgtg

SEQ ID NO: 40518 - DNA, 453 bp, Zea mays
  unsure (1)..(453): unsure at all n locations
  Clone ID: MRT4577_136957C.1
ccgccgccgcagncgggcaagacccgcggccgccancccaaggccacccggggccgnccccgagcgcgccccncgnggccaaagcggcccagcccggcccgcggcgcacgacgcaccaaggccggccccgccagggccgccgccnccgcaccancaccggacacgcccaccgggncgcggaaggaggaccccggcaagaagacggaggccganaaccccgcggacagcgacgcgaagacaaggagcgcagaacccagcgaggggacagcacacggcaagacggacggcgcgcagccccacggcagcgagcccgacaaccccggagcacaaggaccacaacnacgaaagggangagaaaggcggaccggacagaccacagcnccnaacgaaaacagcgggggaaaacacgncggaggcagcacagacaccgagaagcggcagcgcaagggggag

SEQ ID NO: 40519 - DNA, 269 bp, Zea mays
  Clone ID: MRT4577_136958C.1
cggaattcggctcgagcccgcccggttcacccgcgatggtaccccccccggacccaaaaacacggggggggcttgatagacaaatgcgggggatcacccaaccaaaggccagagaaaagcgcacaggccacgaaaacagacacgaccaaccggccggatggagagccagccggaacatgaagacggcaagccaaaaagccacccaaacccaaaaagcagacacgtcagcggaacgactacgcacaacaacagcatcaaaagtcaaagca

SEQ ID NO: 40520 - DNA, 264 bp, Zea mays
  Clone ID: MRT4577_136959C.1
cggtaaattaacatattttttaacatagttttttatttttatttttttaaccccactaaaataaatttttttaattaaccggcccctaaatttaatcttgaggcgggttgggtggtttattcggtggagaaggtgaaatttatattttacagcaagaatgggtgatgccctcggggtatattcttcacggggaccccaaaaaacactggcgggttgttctctataagaacgacccaaaattaggcgttttttttttgttccccc

SEQ ID NO: 40521 - DNA, 861 bp, Zea mays
  Clone ID: MRT4577_13695C.1
gcggcggcgaccgctggggcgcatgtgtccgcggtcgtcccaggcagtgcgcgtcccccaatcctggcgcggttccggcccatcgcgcccaagcccacaccggcggcgacaggggaggggagggacgtccccgtggagcgcgacctgctgcggaagctgctggagcccagggtcatatcgccccgggcggtgcgccccgtgtggtctgccatccacgtcgggtgcatccaccgcaccgacgacgcggcctgcaccgacgccggcgtctcgaagacggcggttcaggtggaggcggagctggaggtcgacgcgctcccggcggtggtctccgactccggcaaccgcgtccggctcgtgaacgacgcgtacaaggagatggtggggcagcccgagtgcccgtggctcgacgccgtggctgccacgtcgaggaggatcagcggggaggtggcgctggtggtagcggaccggtcctctctgccggactcgtacggagcgttcacatgcacggcaaagatcgagtgggaggacgacgggaaggtcacctccatcgctgcaccctgcgacgtcagccggctgcagtgcgagtccagagactacctcttcgcctggaggttccgcaccgccgccgccgacgccgacgcatccgttgggcacagctcagaggagattagtgagagttagggaagcttgagctgcatccaatgaaaccaagtgcatagactaagccgctagctgcatgttaaaactgagcagcttcctctttcgcgaagtccaataggatgtagacccagttctgaaatcctgagtaaatataagatgttgactggagaatgcaaaggaagtataacctgccctttcagg

SEQ ID NO: 40522 - DNA, 252 bp, Zea mays
  Clone ID: MRT4577_136960C.1
gttctggttggtcttccattgttttattttctttgtcgtttttttttggagccggagaccaagggctaaaaaaaggcaaccctgcatatttgcgggctccacaaccaaaataaggttttacgggggtaaagggagatctaacaccagagagccggctgcccacatgggccccccaaacactagggtatgaataccgttacaccgaatgatcgggcgtacattacgggccccatgccccattttttctaaagg

SEQ ID NO: 40523 - DNA, 646 bp, Zea mays
  unsure (1)..(646): unsure at all n locations
  Clone ID: MRT4577_136961C.1
aaagnatcttttcanaaagagacctgcggtttcatgggatgtttgttaacggatcaggaagcttgaaagattgcaagaaccacatcacttctgcagttaacggaacgattctagggcatccaggaagtctcacgactgcacaaaattcagggataataacatgtccaggcagtctcatgagtgcgcagaattcaaggatagtaacagtaaaggcacgctacaaggaagacttgttaaggtttcggttcccatgttctggaagctttatcactttgaaagatgaggtggccaaaagaatacaaatggatggtgttctttttgacatcaagtatcttgatgatgatcatgaatgggtgaagttgacatgcgacaccgacttagaagagtgcatggagatctctcgggcatctggtagcaacgttttgaggctgctggtcactgacattgctccagtccttgggagttcttgtggtagcactggatgattttgaatgtttatgaatcggcatagtagtataatgcagtggccaaatctagctagctgatatttaggctagccgcttcggttcttaggtacatcaccatcttttacaggtatttctcattntgtgtagggaaatctcaggtataaatcatttcctttgaa

SEQ ID NO: 40524 - DNA, 381 bp, Zea mays
  unsure (1)..(381): unsure at all n locations
  Clone ID: MRT4577_136962C.1
ggaaaaaacagatgtatggtggggggtaaaaatcatntantgtttgttgtttattcatttgttgcacacctgttaattcaccatggaagtcttcaactctatatagttagccttagcccatgctgacaggacatcacatatctggaagcctggctaccaccattcagggggggtggctnatntnanccctntttccttcttnacacaacaacanttntttccnntctacctncacnctncncctaaccctttcaccctcttacaactncaacaattncttccattcaaccaacttnctttnacaaacccaacaacnttctaccaacaacccatcattnncnntcccctcttttaaattncttatnanttatanttcaataa

SEQ ID NO: 40525 - DNA, 573 bp, Zea mays
  Clone ID: MRT4577_136963C.1
accacacttgcgaggaagatagtgaagaagaacgtggagaacccagtatggaacacacgccgaggatcctggccctgatcctgctgctagcgctgctgtgagctgtcgtgggccctgccgccgggcagaactgcgggtgcaactctaactgctactgtaacaagtgctgctactggggcacgacctacgactacagcgacgactactgccagtacggccgccgccgctcgccctgccgctggggcggcggcggaggcggaggcagaggcggagccaacgtggctaacaaggtcagtaacgcgttcttcaacgggatcaagaaccagatcaagagcgagtgcgagggcaagaactagtacaccaacagcgagaccctgagcgccgtcaacaaggacccggacttgtaccatggcttcacccatgtggagaccaagctcgagatcaaccgctagatcgcgcacttcattcaccacaccagacattagagctacattagctagatcaacaagagacacaactactgcgacgcatgctacaagcaatgcccgagcgcgtgggcgcacgagtactacc

SEQ ID NO: 40526 - DNA, 1097 bp, Zea mays
  Clone ID: MRT4577_136964C.1
ttccacgcgtccgcccacgcgtccgcccgggcgcggcagttaagctcacacatcagctagctcaccttggacggccgaccaggtacgtagcgagcgatggcgggatacaaagcgtcgggcggcacggcgctcggcgtcgtcctggctgtcgccgcgctcctcgccgcagcggcgatggcggtggacgacgagcacatgtaccactggaagtgcttcaactcgtgcacggggaagtgccgcgacgaggacgcctttgacgacggccaccgttccggggattcgaacgtctcttccgtcgtctctggcggcaagtgcaacaacaggtgcctcagcgagtgcttcgaggacctgccggccatctgctaccaccagtgcgtcgtcagcaagtgcctctgcttcccaccctttagcaaagagaaaacgatgtgcatgaagagctgctgcaacaagtgcttccaccacggcccgccagcgcctggtcctggcccgaagccgaggccgccaatgcctggtcctccgaagccgcctgccccgaagccgaagccgaggccgccggcgccaaagccaccgacgcccaaggcgccgccaccgccaaagaagccgtgtccctgcccccccggcagcgacgaggcaaaggccgacagcaaaaactgattcatacgatgggatggatcggccagtcatcatcagaagcactcatatagtcatatagatagtatacttcacatcgtaagtacgcgtgtacgtgtaacgtacgtactcggcaagtaggccccactatatacgacgactcgtatgtgtacgcagtgggagtcccaaataattgttgctagcaagaaaggcgatgatgtctccgttgctgtaaactggcatatgcgtattatatatgatgagctgaaatttatctccgattctatgtactgcgcagagtgcgcagaggcacaatgcgcatattgttatattcaacaggatctctagagtagatcagtggggtaatctatgttctatgaagtaatttcgggttcgtaagactatctccattagtttatccatcctcatacccatattcaaacttcactctgcgaataatacaaaaa

SEQ ID NO: 40527 - DNA, 961 bp, Zea mays
  Clone ID: MRT4577_136965C.1
caagttttcatattaaactgcatcattctacgaagtttcattaagcatgctatatatggtgagaaagcttatcaagttagctttccaatgcaactagtcccacgtcatttgaagattcctagaagaagttatcgccaaaatactgaagactgcgcagaagtcaaacagccacacggaaatcaactttgcagatctcccgaagaggctccttcacattagctcgtgaaaaaacttttgttttgtgtttaaaccccgctaaggctggttgttactagtataaaaacccccctatgtttatgatgtaaggcagcttatgataatttaaaacagaacccctttgttcagttgtgtgctaacaaatattgagagtgatctctacccctttgctcttgtgaattccttcgcgggattgcagaagcggcggcttcatccgctcccaattggtgctcctactcccttcgaggtctcctcgattgattgtaggctatgttggttggttctttgagagtgtggttgggcgaatcctcgattcaggctgccggttaaagacggtggttggcttcgagttttatttgtcaggttgcactagttatcgctgcttgcagcaagttatcttggcttctttgaagctagttatctgaagattgatcctacgtcgtgaagatcgggtatcgtgacgcatcatctggtatcaaagcctcagttgccacggtaggattctttacccttagctacatatattttgtgttcgtcctatccaccaaaaaaaccataaaatatttttgccatagccttttctttcaatctgttgttccagtgagttttgttaagtttcagtccttagaatctttgtttagttgctggtcactctatcctttgtgttttcctttgagcctcttatatatatatgaaaatatccacaaaaagaaaaatctgaaaactctaaaaaaaaaaaaaaaaa

SEQ ID NO: 40528 - DNA, 667 bp, Zea mays
  unsure (1)..(667): unsure at all n locations
  Clone ID: MRT4577_136966C.1
ccgggtttattttacgagcgtgtctacttcttgattgggttgtttcctttattgagggtctagagaacttggttgcatatgctagaatgctagatggtatccgtgctcactaatagtccaaggttttcttaggtaaattagctattgttttcctttaaaaactttgtcctaaaatgattcaagactggtatttggttggtttaatttataccttgtacattctctgtgaggggtgcaactaagaacctctagaagaatagcgaacaagtaattggtcatgcattatgttgttagtcattgtatgctcagttaactactcattttccacctatagaagaaagttctttaataggaagctaaccctcttactttgttgcgaggctttgtcaatatttgacaagttcagtaagttaggtgtttttattttggagtctgtaggtacgtaatgcttatgtactgttttagttgactagtgataaaagttttaactgatattaacattgacaatacatgggcgatagatgaggctatcatcagttcgaattcttcctgtcttaggacatccaacatgatatactggngaagaaaaagattnttacacccttgtgaattccgncactttttacattctctgcanattctgctagaagcattacttttgcactct

SEQ ID NO: 40529 - DNA, 309 bp, Zea mays
  Clone ID: MRT4577_136967C.1
aaaaaaaacaccgatccgccccaaaccaaaaaagaggggctttatataacaagggcaggccaaagctagaaaaaaaacggcggaagtggaacattgaaaccaaatgaaggatgagggaacaaaaacaaccacagccaccacatgggagggggggccgggcttgcctaaaccccgaaaaagaaaaacacaggggaaacttaaggggggccgaaaatgcaaaaaaacctaaaaattctcccagagaaaaaaaaaggggggggaggggggcgccgtgaagcccaaccaaacaaattgggaagaggccccacc

SEQ ID NO: 40530 - DNA, 432 bp, Zea mays
  Clone ID: MRT4577_136968C.1
ggggcgtaacagggcagcatacattggttgggccttcgttgggcgaacaagttttattattacacaggcaaaaggtttacaaagatttaatcacactttacaaaggggcccagttttaaccagttaatgctaaaccaacctaataatccccgtcctatccgatgactttggccaaaatttaactcgccaaaaatttcctgggcccataaaaaatattaattccaaaatgtaaccatttacaactccaatggggtttccgcctttgtttacacaggaccatataaaataataatttaagctttttgccaaaaaaaatatttaagtagcttcccattgggggaatcccaaatgctggcatcggaccagggcccatcgggggattgccaatcccgcccatgggggggatgcccattccgccaatcggaggggggg

SEQ ID NO: 40531 - DNA, 174 bp, Zea mays
  Clone ID: MRT4577_136969C.1
gagcttggattttttgatcggggcttggaggtatttgcctgtgccccccgagagaggcccttaaatatcgagcgaagcagggggggaccggcaacttatgctaaaagggtcatcgataaaaattgcgccgaacagataacgaggaatgttaaggggaaggggctacaggggcca

SEQ ID NO: 40532 - DNA, 397 bp, Zea mays
  unsure (1)..(397): unsure at all n locations
  Clone ID: MRT4577_13696C.1
caatattttatggtagaaaatagcctacttagacaaacataaataggtcgtctgttccacgagcaatcgagcatgcatgggttttactccctccaactagaaaagactcaattctataatagtgctcaaccgaagtatcttaagatgaactagatttatatgaaaagatattagtgttttttatactaaggccgtgttcgaaacctcaaagtaacggttagcagctaaaattagctgagtggttcagaacaggccagccaataaaccatataattgttagttatacctcttaaatagctttataacagttgttagctgctctaacccagccaataacttattagctgactaataattntaactctagaaagttggaacatggcctaaataagtatag

SEQ ID NO: 40533 - DNA, 317 bp, Zea mays
  Clone ID: MRT4577_136970C.1
atactagcaaatacgcctatatattggtatagacaagactatataaatgtattatcgtagttttctagtacaatatgaaatgcaatatatataaaagaaagaaagagaataaacaatagagaacggaaatatctttagcttagcccggcccaaaaatcaaaatagaccagcgagcccaacttagccctaggtcctgccatggccggtggcgtccttcaagcgcgatagctattacttggtggtggtgaggttccggagcgcctggagtagcaccaccctgaatcggtcgacgtcgagtgtgatattcctgcccgatc

SEQ ID NO: 40534 - DNA, 4569 bp, Zea mays
  Clone ID: MRT4577_136971C.1
atggcgcggatggaggcccgcttgaccgaggcgacggtgggacgttgcgacgtcttggagcaacgcgtcgccgcgacagaggagaaaacagaggcgcgcctcatctcgttggagatggatcaagcacagattgagtcctggcacccagcagtggagaaacgcctggacaacatctccctcgagctctctcgcgtgaacaaattcatggagcgtgaatcgttcatcaacgatttcgccaagcccggtattctccccaacgccaagacgatgggcgagcgcctacctccacggtgccccaacatcgacgggctagatggccaccacttcgacaactgtaaccaggatcgtggttttgggcctgttttcacccaaccccgcggcctggtcaagggtacgctctatgattctcatcctgctccattcaatgatgatttagatccatggcggggcaacgagtgggatgggggccatgagggtggacgttctgggcaaggaaatttaccacgtgtgaattttcctcagttcaatggagacaacccgcaattgtggaaaacacgttgtgaaaattactttgatatgtacgacgttgatccgtccaagtgtattcgtgtcgcatatatgcatttcgagggccgagcagcttgctggttgcaatcggtcaagcggagagtgcgctactggtcctggcaggaattttgtgcccaaattcatgaccgctttggtcgtgaacaacatgagtcccttattcgccatctctttcggattcgtcaaaccacttcagtagcagattatgtagaacggttttctactttggttgatcacctatccacatatgaggcgaatgcagatccattgtactatactatgcgctttgtagatgggttacacgaagaaattaaagttgtaattatggtacaaagaccttctacattggatattgcttgtgttctggctttggtgcaggaggaggcattggagatgggccgaggagtacacgacgttactctatctcgtcagcattccaaaatgggggtatcatcatcaggacctcctaaatgggatcaaccagcccagttgaagactgcaggctctactgatgaaaaattggcttctctgcgtcgttttcgccgggcacgggtttgtgtgagaaatgtgctggaaaatggtctccaggtcacaagtgtgatgctacagctcaacttcaagccatggaagaggtttgggaattattgccaacagaagaggatgcagaacaggaaacagattctgttgaaccggtgtctgacacggtgcttatgtccatatctcaagcaacgtggttgggatcagataatgtttacactctgtagctccatggtggttcctataccgttacatgtgagattggccaatggagatatgttgcactgtcaggacaaatgggtgcaagtgcagtggcaggttcagggatgcaccttcttttccgatattcctttcctgccattgacatgttatgacatggtggttggaatggattgtcttcaacaattcagtcctatgaaggttgattggaataaaaaatggttatctatctcttatcaaggatcgagtgtggtgttgtatgggcgatcatcagtcattccagattgcaccgtagttgaaatctgtttggtgagtgacaactcttcctcggctgcaaataattcagttccaccccagattcagtcacttctaaaacagtatgttgttttgttcgaagaccccaccggactgcctcccagtcgtgactgtgatcatgctattccattggtgctcggagcccatccatttactgtccgaccataccactatccccctttactcaaagatgagataaagacacaagtggcagacatgttaaagcaaggggttaagaagaaagacaacacctggcgtttttgtgtggattaccgttatctcaatgctttaacggttaaaagtaaatattcggtgccagtatttgatcagttgatggatgagctcgcccagtcgcagtggtttagtaaactggatttaaaggctgggtatcatcagattctgctcaagcaaggagaggaatacaaaacgacttttcaaacacatatgggacattatgaatttagggtcatggccttcggtttgataggggctcccaatactttccttgcagctatgaatgctacattgcagccggttcttcgcaagtgtgctcttgtattctttgatgatatcctagtgtacagcaaatcatttcaggatcatttgtctcatttatccactatccttcaattactgttacgggacaattggaaggttaagttgtctaagtgtgactttgccaagcagtctatttcttacttgggccatgtcgtgagtgcccaaggggtggccacggacctagcaaaaattcaggatattgagcagtggcgaacgccttccaataccaaagaattgaggagtttcttgggcttagcgggtttctatcataaatttgtgcggcactttggtattatcagtaggcccctttttaatcttctcaagaaacatacattatttgtgtggacccaaaaacatcagaaggcctttgaccttctcaaaacagcattggtgacggcacctgtgttggcactcccagatttctctaagcagttttacatatatatagatgcacgtcagtacgggataggagcagtgctgatgcaacaaggtcatccgttggcttttctcagttgtgctctcggtcctaaaaatcaaggattatcaacgtggcgatcaactttaagagttggtccacaactcgagacatatcatcagagtggggctgaagcagcccgatatacgcagcgaagcaaatcaatggtccaacagccacatgcaaggttgggaacaggcgtaactcttacccgatcagcgatcaccttctctgaaaaacaacaaataagcaagggcatgggatgcagcccatgtgaaattacattcatgccctttacatttgctaatgactataagaagataactaaagagatattagaaggcttgtctgaagatactgatgatagcgacaactatgatgtggagagtggaggcgaagactctgaagattgtccttggcgaccaagtcatgcagtcttcaggaaatcaactatcaaacagagtcatcttgataatatgagaggaaggtttggagaccagtttatcgaaccagatgatgactggctgaaatgtgttgaaaatactagtgatgaactacttggagcatactccaagtttgaagataatgcactatctgcggccttcaggagccgaaaaaagaaaagactaaatagggtttttgatgctattggatttgtgtaccctgactatcgctaccctccgcggggacagaaaagaaagggtgcaacttctggaaaggctgctacttcggctgcttcaagcgagcccgcaccgaagaggaaaaagttgaaggtccttactcaccgaccgcgctacattgaaccggccatagtgcctgaatttggcggtgagacttcttcagctattgaagccaaaggacctgctcctacgcagaggattgaagagctggctgcaatgccgaagactgacaaaattgaagaaccaagaatcgaagggatgaaaacattagaagttctaagcccttcggcaggagtggagattgaaaccaagacaaagcttaccgaagccgaagctacaatgagccaggctgacgccgaagctgggccttcagagcccaccaaggagaaatcctcggaaactggagaaaagacagcggaagaagaagctatagaacagattttgcctgaaaaagctgccgctcctactcccgaagcgccttccgaagtccttgattatattattcaacacgcttcgggaaaaagattatctgaagaagaaatttttgaagctaaacactatgcccgagaactgaagtacccgaaaggggccttagtgtttaatggcacagatgaagatgacttcttgtattgcctcccagacaacaaagaattatctgtctgccgggagatggctagaagtatggggttcccgaagcttgaagctggcctctgcgccatgacgaaggacgatcttgcggatagccttgcatataacagtctgaagggtttaatacttagcaacgccttaagggcgcaaaagaatgccgaagacgagagttgcactattgctctcaataaccttcgaacagaggttatcaagctgaggaacgaagctttggaaaaagacaaaattctacttacattggtggacaaagtaaagggggacgaagctaacttcaaggctcattctgaaatccaaaggaatgagattgaaaaccttcaaaaacaactagccgaagccaaattgaaatgtgctattgccaaagctgaccgagatgccactgaactatctcctcccccagagccattcgacccactggccgacccagagacaaagaaggcaatagaaattattaatatggctgaagctattagagacgaagttgtcaccaaattactaaccgaagctgcagaaaaagtcctgaaggaagaagaatag

SEQ ID NO: 40535 - DNA, 192 bp, Zea mays
  Clone ID: MRT4577_136972C.1
attcggctcgagcggcacccatatgctttatttaccgcaatcgatcaaggcctaacaagggggaggaggtcaggccacaatgaatcccaccaatgggccattccatgaaaataggaggggcacattgcttatgtgaggaacgttcccatgataatagtaatcaagtgtgagagagtaatcaggacaacctat

SEQ ID NO: 40536 - DNA, 365 bp, Zea mays
  Clone ID: MRT4577_136973C.1
attcggctcgaggcattataggggcgtttttttttccggagcaatctccgatccagtctgcttcacacatcgtgtgcctactgacactctcagcgcctgacagttcttctccgcactgccacacggactattcctacaaggattctctgaggcgcgcggcatgatgagacattatcctgtcttcaggtcgagcacattgaggcgagctcgcgacagaatgcgatacgccgcctgtggatttacagactcaaggttgtgtggacagacaactacgtggacacagtgatcgccactttacaggaccagctcgtcctgtacccggcgccagacgacgtgcactatgtatctaccgtgggacccattac

SEQ ID NO: 40537 - DNA, 450 bp, Zea mays
  Clone ID: MRT4577_136974C.1
atggctagtgtattagatgtgctggagacgataaaaacttcaagccatactccaggaaaaattgccaaggcttcgaaaacacagattgaaaccgagacaaagctgaccgaagccgaagctatactgagccaggctgacaccgaagctgggccttcagtgcccgccaaggagaaatcctcggaaactggagaaaaggcagcagaagaagagggtatagaacagattttgcctgaaaaagctgccgctcctgctcccgaagcgtcttccgaagtccttgattatattattcgacacgcttcgagaaaaagattatctgaagaagaaaattttgaagctaaacactatgcccgagaactaaaatacccgaaaggggccttagtgtttaatggcacagacaaagatgacttcttatattgcctcccagacaacaaagaattatctgtctgctag

SEQ ID NO: 40538 - DNA, 463 bp, Zea mays
  Clone ID: MRT4577_136975C.1
agcagtggtaacaacacagatacttgtttttttttttttttttttttttttggttgggagacgaaactgaactgaatacaattcattttttcatcacaacagatttgaaataaaaagacgtgacagtgtattgtttttttagtttaatttattatgcgctgcactttatgggggggatgtaatttggttgggtgggactggactcgggccggccggacgggaataaaatactgcactctgtactgaagaggaggggagcagtaccgaatgaattgagacatggcattgaatcgttactaaactgaaccgttgctgagttgaattggagaggggaatgataaggaattgaattgtgatgtgactagtgaactgaccaaacgccgggcaaagagtctttgcttgaacggaacattggatctgtgctataacggaccggccgaccaatgctctgacgggccgacca

SEQ ID NO: 40539 - DNA, 554 bp, Zea mays
  Clone ID: MRT4577_136976C.1
ggacacgtgtcccatccccggtttgactgccgagctgattcgtgtgggcgtcaatggtgaacaccgggcgcttcgtcgtcctcgtcctcgcctaccgcctcctggtacccctcctctcaggctcagctgaaccggaccacaccaccaaagagtcgtatgtcgtatacatggggagcccgtcgggcggcggcgacccggaggcggtgcaggcggctcacctgcagatgctgtcgtccatcgtcccgagcgacgagcaggggagggtggcgctgacgcatagctaccaccacgcgttcgagggcttcgccgccgcgctcaccgagaaggaggccactgcgctctccgggcacgagagggtggtgtccgtgttcaaggaccgagccctgcagctgcacacgacgcggtcgtgggacttcctggaggtgcagtccgggctccagtccggccgcctcggccgacgggcggtcggggacgtcatcacgggcatcgtcgacacgggcgtctggccggagtcgccgagctttaacgacgccgggatgccggacgtgccggcg

SEQ ID NO: 40540 - DNA, 411 bp, Zea mays
  Clone ID: MRT4577_136977C.1
gacccacgcgtccgcccacgcgtgcgcgaactcatatgttcttttttaaactttaatattcatcatcttacaaggctaacggggcttttgaacagggccactaaaaccagacaacatcaccataaactaaaaaaattcatatgtccaaacagatcatacatattccttttaactcttctaaaaaaaatctctaatcttctaaaacaaccccacatacaaaaacatacttttaaccccaagtccaaattaagacttttacttaaacatgtaacacaactagtgctacttaacatactccatcactatattcttctacatataactaagacactttaaatgatccaaatttacttactcatgcataccaaaatataactcttatatatttatacctaaaatcaattcactttc

SEQ ID NO: 40541 - DNA, 305 bp, Zea mays
  Clone ID: MRT4577_136978C.1
tagcgcggccacatgttctgcggatgctgcagaagtgtggaccatggcgggaccccaaggacacttggcacaggcctggaagaggccgccctcgtcttgtctcggctccctttcatggacagactggcctacttagctttactataaatttgtgagtgaagttagagcccatctcacttagccagctcactttgagggcatcctataaacacccaactgttcttatatcgtctcggttttagccaaaagtgagattagcatgactgcatctttcaaacaaaaatattgatttctgcttttagggc

SEQ ID NO: 40542 - DNA, 305 bp, Zea mays
  Clone ID: MRT4577_136979C.1
actagttctagatcgcgagcgggccccttttttttttttttttaagatgacgatataccgggcatgaatcaaacatactacaattcaagttaagaatgtgccggcgatgaaatgattccgttaaccaaggaaaccacaccgcagttcgcgttgttattaccacatgaagtacagatcgaagaggcgtcatcaccgtaattgacacacagttataaaatgaacaagatgaccagcgagcggtgattttacaacaaccgcacaggcttataatacacgtgcgcggaccatgcattcatcaaaccgac

SEQ ID NO: 40543 - DNA, 733 bp, Zea mays
  Clone ID: MRT4577_13697C.1
gtgtagggttctctgctcattcgttcgccacctcgccccaagacgtctcgctagggtttcgccacagccgccgccatgcctcgccgcaagcttaggaaggtccgcggctcacgcccggctccacatgctgctccagtgaggaacccaccacagcctgcgcgctaggctcgtcctccagctcctgttcgtgatggtggtggtggctccattcttggaggaattgggtccaccattgcttaaggtatgccatttggtacgagtagtgccatggcacacagggctgttgatgctgtaatgggtctccggactgttcggcatgagattgttatctcagaagctgctgctgctgcccctcctgctccagtgatgaacgctaatgcttgcagcatccattctaaggctttccaagattgtcttaacaactatggcagtgagatcagcaagtgccagttctaccttgacatgttgaacgagtgccgccgtggtgttgtctgcctgagcttttgctccaattgggattattcatggattctcttttcactcccatgtatctcattaataagacaccgtgaaacttttaaccctctccacgaatgcaccatggcatcacgggttcatcttgttgaatctgtggttacgttctctttatcctgtgttgttggaacagacttctgtctcttctggtgatcataaatatttaaatgaaccagttgtgttggaaaaaaaaaaagaa

SEQ ID NO: 40544 - DNA, 447 bp, Zea mays
  Clone ID: MRT4577_136980C.1
aaacacaacgttttttcacattgccctgatagcattatgtaatgaaagaaacagtttcaacatgaacaacctttacctttacatacattttgattagcaaatttttctcgacaaccaaggacatcagctattggccgattcctcagggcaaagaaacttgggcgggtgccaacttaggctttgggagggtaaaacccggtcacagacataccttcgtcgaacgtaaaagcttggccaaaaatataagtggaaaccggcatgcagaaaaaaagcaacccgtgccgatacttctccaagttttccgacacgttcaaggggatttcaaatcaaaaattgtttcttaaaatttttaattgcccaaattacttaccttagtgaaatggtgaattaccacgggagcgacaaaaatgggtaaatatgttggcctttataccattcacaaactaa

SEQ ID NO: 40545 - DNA, 280 bp, Zea mays
  Clone ID: MRT4577_136981C.1
cctctgccaaatcattggaccgctgattactttaacttaaaactacatatcttccctgattgttgtactcaccaggctacatttccaaatagacatttcactttataatttgaaatgaactatgaaccatccattgctttgacaagctcatccgttagataccaccactaactgacgaaagatcatgttctactgctccaatacccaaagccatgataagctaccctctcttaccgattatactatatacattgccaaagtacgataatcatgttttatt

SEQ ID NO: 40546 - DNA, 310 bp, Zea mays
  Clone ID: MRT4577_136982C.1
tatgaaccagtgttttattgtatatatggcttctttcttcacgccgcatcttatttggacattgatacatatatatggttaataagtaaagcttagcatctaattcgctcgatccttttaggttaattttctgcctttattttttcttcttctctacaagcattacacgtacaaactatttttttacagtagatatttgtacaagcattacgctttggtgattatttgttagtttttttaaccaaattgtacaagaagcattacatgatatttgtacgaacgcgaaaaagatgttcgccacaaattcctg

SEQ ID NO: 40547 - DNA, 276 bp, Zea mays
  Clone ID: MRT4577_136983C.1
agtgcagagaggagctctctactgcacgactcctcccccagtctaccactacacgtgcctacctaccgcagcccagtcgatcagccctcgaaacgctatggttgctggcctgagatcaccgacgttgctctcactcgttgtcgaatcctgtctactccaacaaggagatcttcctccgcgagcttatctccaactcttccgatgcgctggacaagatcaggctcgagagactcactgacaacagcaagctcgatgaacagcctgagctttccatcc

SEQ ID NO: 40548 - DNA, 478 bp, Zea mays
  Clone ID: MRT4577_136984C.1
accactctttgcgaacgcgagtccattggatccgtggaccccaactggcacgatctgtggttcggggcaggacctcaatggctatgtacttcccagcggctgtgacctcgtgttgatgatctgtgcagctaacctgctccatgataacctgcttgtggcaggctcggctgactgtggctcatgtaggtaacactgaaaatgttgagaagggtgtcagttatcatcccttcttaaacttgacgaatatctctactacattgctgaccgtgttccacaccaagcatatcaactccattcgggaagtcctggcgctgctgcaaaggacctactgaaatatacatcatagatgaatatacagaccgcatgtatcgcaactaccgttggattaccttcacatcctactgtgggtagatctggagcacaactaggtgaactgcaagattccctaagaatatgactcaggggcagtctctgatac

SEQ ID NO: 40549 - DNA, 514 bp, Zea mays
  unsure (1)..(514): unsure at all n locations
  Clone ID: MRT4577_136985C.1
ctccgtttgctctttgctgctccgacatccgctgtttcacgcatccaacggctcgtcatgcccaactcgagcagagcactactctcgaatgcaagccctcactgtgctgtccacgaccgaccgcatgaacggtggatccgttacctggaacggtttgactgcgcacacgaccagtccatgcagtgagcattgaggtggtaccatcgacactggggagccttggcacgccgaatgccaatcgggcggcatagcaatatccaaggccaaaaagctgaaaaataactttactacctcacacaggtgggacatgctgcatgtcaacaagactcgcttatcacgctcgattgatcactacagcacgaatggatcaagtacacgccttccaacatgacgagtggcatcactagaangtgaaactcagactgccaactgtccacacttttgacaccaagatctaggaatgggatgcaagctgcaaggatcatgctgctactgaccaggaatggatggcgga

SEQ ID NO: 40550 - DNA, 1296 bp, Zea mays
  Clone ID: MRT4577_136986C.1
caggtacaaggagaaggtcatactcaagaagatcaaggtcatgacggtgggggcgaaggagtgtggggactacgaggagtggttcaactaccgcgtgtcgagagcggcgccggagtcgtgcgccgacttcctcgggagcttcgtcgccgacaagaacaaggcggagttcgtcaagggcggcaagtggctcgtctggaagtttgagggcgacaggacgctggccaattacctgagcgagcgcggcttcccgtccaacctggagcgtctcatgttcgggcgcgtgctgcagggcctgggcccgctggagcgcgaggcgctggtggtgaagcaggtgatgcggcagctgatcacgtcgctgaagcgcatccacgccacgggcatcgtgcaccgcgacatcaagccgtccaacctcgtcgtgacccgccgcgggcaggtgaagctcatcgacttcggagccgccaccgacctccgcatcggcaagaactacgtgcccgaccgcgcgctgctcgacccggactactgcccgcccgagctctacgtcctccccgaggagacgcccgagcccccgccggagcccatcgccgccatcctctccccgatcctctggcagctgaacagcccggacctgttcgacatgtactcggcggggatagtgctgatgcagatggccataccgacgctgcggacgcagtcggggctcaagaacttcaacgccgagctcaggtccgccggctacgacctcaacaggtggcggcagagcgcgcggcggagacccgacctgcagatcctggacctcgactccggccgaggctgggacctcgccaccaagctcatctcggagaggggcgccaacggcggtggccgcctgtctgccgcggccgccgactgccacccgtattttctcctgggtggcgaccaggccgcggcggtgctgtccaagttctcgctcagtaaatagcatccatccatggcccatggctgggtacctacgacctacgggatatatacacatcggcttattggaatcctccgatcgattcaccatccttgtatattgcgcattattgaatccttgggcataccataccggcagtgggaggcatcccaaattcaaaagggagtcatctggtaactgatgttacaacttttctgtatgggaatgctgtgaacaatgtggtgcagagtttcacacactaactaaccttacattatgctagacagagatcctacttcctttgcttcagttcctcgaatctatgcagatgcagacactcgcagagagagctcatcaactgg

SEQ ID NO: 40551 - DNA, 544 bp, Zea mays
  Clone ID: MRT4577_136987C.1
ctttcttctttttcttctttatttcttttttctgttgtgtttgtatttggtctaattttagacccttcttcttaattcaatgatacgcagctctcctgcgtgttcggaaaaaaaaacacagtgatttgttttatcgaggttcgattccaaagaacctagtccccgttgaggaggtcacaaagatcaggtctatttcaaccctttccctctctcaaatggtcacttggaccgagtgagccttcttccttaatctcacgggtcactaagacctcgcaaggaccaccacacacttggtgtctcttgcctcgcttacaaagttgagaatgaatgagaaaaaaagaaaggcaatccaagcgataagaactcaaatgaacacaaaaatctctctctcacaagccactaagtgtttggagtgaatttgggactcagagaggatttgatcttttgtattgtgtcttggagtgaatgctagagctcatgtattgaatgtgatcttcagaaaacttggatgcttcccgcgtgttgtgcgttgttgcggctgctt

SEQ ID NO: 40552 - DNA, 122 bp, Zea mays
  Clone ID: MRT4577_136988C.1
atcgtaacaactaattgtactgttgccactggggcaaaacatggcatgtttttagccactacactaaaatcccctcaaaaaaggccctttgacatttcccggggctggacacgacccaaaaa

SEQ ID NO: 40553 - DNA, 398 bp, Zea mays
  Clone ID: MRT4577_136989C.1
caaagacggtacctctgaagcagcaactcagttgcagatctcggaatcaaatactggtcctccgcaactaagaacagccgaagaaagtagcaccccaatgaacgcactcaagagcgccttgtacgaattcgtcaaaggctgtgtaagacctctgtgggaagacgggctgctgtcccgcgaggtccacaaatttgtcgtgaagaaggccgtggataaagtgctagacgtctgggctcactcgacggagataaacgtcccaagaatcttgtccgatgaagctgaaggtataaggacccttgttaaggactacctaaagatatacgtgggaagtgaagcccttaggaaaagcatccccacaagttcttgagcaaggtgaaacacgatgtagatgtttcccc

SEQ ID NO: 40554 - DNA, 315 bp, Zea mays
  Clone ID: MRT4577_13698C.1
gaacagaactaaccgggcaaagtgaacgctacgagaaacaggggccgacaccggtcatctacataccgaggctggggggaactgacatccccattacatagagcacgattctgtactgtgcaagcgggaagcccaaaaagttcactcttcagcaccagaaggtaggagacactggcatagatacattacattacattatgtgaccacatagttctatgacaacgaacagttccctaggtgcaggcttgaacaacatacacacctttataactgaactccaatgagcaccgtgcacgttactagtttgatgagagc

SEQ ID NO: 40555 - DNA, 675 bp, Zea mays
  Clone ID: MRT4577_136990C.1
aaagtgcggaggccatggcgccgatcttaccggctgcccttcatcgtgtacagacgcccatgccggggcaacagggaggaggtggtcttgtaggaccactctcacgcatcaactgaacatcatattggaatgtggctcagaatccaacatagctacaaccaatttagaaggtgctctgctcagactcatgcgtccttatttctcaccttaacactaggagatgcacccacgaggaactatcatgacccagagccgtagacgtcctatacagtatgatagcgacggctttattgcgcgatggatacctaactcacttttatgccattgcgcgatactgtacaggggtcgaaaccttcatgatcgatcacatgatgggacaggtatgagctgctgcatgactaaccgatctgggacgcattgttcgagcgagactgattatttaaatgagagatcagaacatcaggtgtgcacagctatgacaaaccatcgctggtatagtggattggtcaatgcggaccatgccagaagagggcaagactttcttgaggatgagacacagtgtttgtgacattcgcaacctgactacggatgcctagaagtatagcatcttcgtctactcaaagacgctgttcatgtctgatagagacaggtacggctactgtaagcgggaagctg

SEQ ID NO: 40556 - DNA, 585 bp, Zea mays
  Clone ID: MRT4577_136991C.1
ggggggaaaaaaaaaaaaaaaaaccccccccgaaaagggggatttttttttttttggccttttcttaaaaatttccccaatgggccctaaaaaacccccggggggggtcccttttttttttttggggggaagggggaacctgcccaccccccccgattaacacccaaacccccccaattcccacttggggaatggccccaaaagggcccccggggggccccccggaaaccccaagggcccaacccgggccccaaaggggcaaaaaacccgggtaaaaaaaaacccccctggccccggaaacttgtttccccttgaaaaccccctttggggccattttgggggccccacccctgccccccgggaggaacccccggccttttttttccccctggcaaccgaggggaccggcactttaaaggaaaaaaaccccgcccggccccaataaaacccccccctttgaaaaaactgaaaaaaaggaaccttgggggcaaatcctttttaaaaagggggcccttttaaaggcccccttacccaaaaaataaaccccccgtttgggggccccaacaacccctaggcaagggggaa

SEQ ID NO: 40557 - DNA, 349 bp, Zea mays
  Clone ID: MRT4577_136992C.1
aagaaccccatcgacaccgtccgccgttttgcaaaaatgacgcgggctctccaaactatagctgcgagcaccacctccactcatacaaacagctgctgcggctgccatccaccgcctccggttcatctaccgccgacagtgcatctgccaccttcggatcacctgccacctccagtgcatatcccaccaacaagccacctgacgacgccagaccacctgacaccgcctgtccatgtgccaacgccgattcatatgtcggcggcaccatgccactaccctactcaaccgcccccgcctgagcctaattctcagccacacccatgcccctgccaacagccgcatacaaacc

SEQ ID NO: 40558 - DNA, 872 bp, Zea mays
  Clone ID: MRT4577_136993C.1
cattgggaccctcgaggccggcctggccgggagcatccgcgttaccagagtcacagacggaggtgagcgtccgacgcgcgccggcggcgcttccagagtctctgcgccgcgccctcctctgacttcacccgtgccttcggtggccctgcgtcatctccctcgtcctcctcccagtcatgcccctccctcaccgagtgggaggcgacagatccgagttctagttcgtgcggcaccgtgcgagtagcgcggccccggtgcttccacgcgtggaaggaacgcgggctccgatggcctgacgcgcgggggcgaggtgctggcaactccggcggcgcggtgtggaaggcgagctcgtctccgggcagaggtcaccgaaaggctgagcgtgcaggagggcagtaatctgcagcggcctgcagagctcttatctcgacacaacccaccccgcctgacgggatagaatcggtgggataagaggaccgatatcctttgcttgtctgcaaaatttaagtacacaagtgcaaatcagctggatttggaggtaaagacgggaaccaaagagctggtggattagagaggtgtggggagatgtaccgtgggggccttgaccgcttcaagaaggcacagacattggagcccttctcagtcaagtctgagtcaggcaccaagaaggcacctgcagctgcaggaacagctaaagcaccaccggctccgttgacactgccacagaattctaattttgtgctgggtcagaataaccaaagtctgcaaggtaccaacaccaagggtggctgggcaagatggtgttgccccagggcatgttgggaccaagccggtgggaggcaatcgacgtggcaacctccagactgggcgat

SEQ ID NO: 40559 - DNA, 348 bp, Zea mays
  Clone ID: MRT4577_136994C.1
gagggggggctttttcggggggattttttccccctgggcaacccaggaccaaattatctcttataaccttagcgacgccttcaaacaagatccatgcacccaccatgatgacttaacttaacttgagagttctgctaccaaccgaacgaattttgaaaacgggggacgggatccttttacccatgaaaggaaagaggcttcggccactatggcccggttgggcaaaactaaacgggtgctacgacactcatggagaggggggtgttttttaagcgagatttataagggggggggcccttaaaaccaacaggggtgggaccaatccaatctaatttggctgaacggact

SEQ ID NO: 40560 - DNA, 355 bp, Zea mays
  Clone ID: MRT4577_136995C.1
gcgaacctgggacacaagcctgttgaggtttttgtaggtcgggcgctcaatggcgagggatcatcggtttatttcttatattgcctcattgtccagcagtatagccacatcattttgctcgaggaggtagtgttttgacagtacacttttttatgtctcaactacctaattataaacttggtagtaagggtacacatttaacccaagcttggatttctttccgtagtcaacatacagtcgctctagtatgatggaaccaatgccatagccccttcctccaccaacagtgttgtagacgatgaatccttgtataccatttccattatctacctactttctgatgctatcaaatcac

SEQ ID NO: 40561 - DNA, 447 bp, Zea mays
  Clone ID: MRT4577_136996C.1
ctcgagggccgcttttttttttttttttttcttgtatgaaggtggtctgggaatgattttgccacgcttattgtttttttttttcggttttgattaagaaagaatgaggaagaggctccatcacaaaccaactccacgttacccccgtgtggagaccgctctacgtcggtccacccccgctccaaacaacaatgatcacctcgctagtcttgagtgacactttgccgtcgttacccacctttgtggctgcccacataacaaagacggaaagataaccactttctgggcatcctagcgctgcgcggcgctgccctgacacgacagccacgattattgttctcaaagaaaatgcgaggtagtgccctaaacaccacagagtttctggcttccatcggagaccaagttcccttatgtgcacatgaccgcccaggaaccattttggatctg

SEQ ID NO: 40562 - DNA, 160 bp, Zea mays
  unsure (1)..(160): unsure at all n locations
  Clone ID: MRT4577_136997C.1
acttaactntactgatatatgaaggtaatttataaactgtttggggtttgnaaccgacaactatcactatgagcctatgagatggtacaacgtcttacctcacattgcgagaggaatgctctatacctcgctgtcggtatagagcctgaactactaagca

SEQ ID NO: 40563 - DNA, 270 bp, Zea mays
  Clone ID: MRT4577_136998C.1
gttcaagatcgcgagcagccgcccttttatttattttatttatttttttttgtctattattttcgatcctgaatataaaacatgtactgctggttgctctatatggacatggtacataaacataatgtcggttctgtcgctgctcatgctcaaacaaactagaagggcatggaacataatgcgcaatctgaatctgcagcattccttaacctacatagaatacacagtacactacgtataacgcgttggtggcgcgggagagaaagtgag

SEQ ID NO: 40564 - DNA, 399 bp, Zea mays
  unsure (1)..(399): unsure at all n locations
  Clone ID: MRT4577_136999C.1
caacggcaacaacaaatttccccaaattccaatcaaccctccgcaataaagcagcccaaggcggcggccggcggcggtcaaccaacaatccagaacgaaaaccgaacccgccgttgccaataaggcggggctggtcaagttcaagggcggacttctccggcggaagcgccggtaagcctcctccggcaaaccgggaacggaaggtggcaacctgggcgcctgcggcggcatcgggcagccgctctccctcctcatgaagctcaacccgctcgtctcctccctctccctctatgatatcgccgggacccccggcgtcgcggccgacgtctcncacatcaactcncccgccctggtgaaggggttcatgggggacgaccagctccgggaaggcgctcaagg

SEQ ID NO: 40565 - DNA, 392 bp, Zea mays
  unsure (1)..(392): unsure at all n locations
  Clone ID: MRT4577_13699C.1
caacaggggcatcaaatctaaaaggaccattacaccccggcgggccggatcaacaggggcatcaaatctaaaaggaccattacaccccggcgggccggataaaggacacaccaaaaaacccttctaacaaatccgcgaatcccgcagcgcgctcatttgctggtaaacttggtaacggccttggttccctcgaaaacggcttgcttggcaagctctccgggaaggactaggcccacggaggtctggatctcgcgggacttaatggtgggcttcttgttttaccncgccatcttggcggcctctccggccagcttctcaaaaatttctttaataaaggatttcataatggacatggccttgaaggatatcccaatttcggggtgcacctgctt

SEQ ID NO: 40566 - DNA, 703 bp, Zea mays
  unsure (1)..(703): unsure at all n locations
  Clone ID: MRT4577_1369C.1
agtcgccacgagtcgagtagttgagcagtagcgcttgcctagactccccgtctcctcctccctcctcccgccgccgcctacgacacaaccgccccgttcacgtgccctaatcctcagcggcagctcctcctctccgtccgtccgtccgtcccccgaaatggagcccaagaggtcctcgccccaggcgcagccccagccgcgcgcggcgactaagaagtcgcctccccgcgctgccgccgccgacgccgccatcgccgactcgccgctcagcagcctgttccacccggcgccgcacggggtaaacggcaaagagcaggacttgtacgccattctcttcaaggggcagaacggcaatgctcaggctagcatgacagatggtaaatcccagtggagtcctgctaggggccgcacaacatataccaaggatatcaagtatgactcggttggtacatcatcttgttttggttcttctgtgcactatggtggccgagaatattatggcagctctgcacctaagcaatccgcggaatacagtgattacaaggtggataagaaggatcctgtcgcagattctcatggcgattggtggcaaggctcgttttactactaagcaagagcttggtgtcctctcccttttcgacaaggaaatcgaaggngagaggtgtggaacctaatttccttgatagcagttatataccttaca

SEQ ID NO: 40567 - DNA, 509 bp, Zea mays
  unsure (1)..(509): unsure at all n locations
  Clone ID: MRT4577_136C.1
ccggggtctcagtaggccaggcgattcttcgttctctggagccatcccggcgacgccccggctcccagcgactctaaccctagcctctcgagctcctccccaacgccatcgctcgtccgccatcgccacgagctcctccgccgttgtcgtcgctcgtccccatgagctccccatccccacggctcccaacgactctccatctagcaaagcagtacataaaggtaacagccacctgatcctccatccccacgagctcgtctgtcgtcgccacctaatccacatcgagctctccgacgtcgtccccttccactcgacaagggaccttccttcctgatacaggaaggcagggttcatgagtggcggcacgcctgcagcaagcagtagcctgcggacatcactctcatactacgtgaggcaagtccgcgcctatgactaccaccactacctctgccttctccacctggccccggccgngcgcaaggccgcgttcaccttncgcaccttcaaca

SEQ ID NO: 40568 - DNA, 330 bp, Zea mays
  Clone ID: MRT4577_137000C.1
gggccgttcacagtaacaaatgaagtggaccgtgttcttatagtgaccaaaacagttagatgttgcaaacaaaatttagttaatccaaccacttataatgtacaaagaccacgctgcacagcacccgaagggagctgcacgaacctggctgtgtatgtgtgagcaggagagcacatgagccacacaaacatggtggtgcaaccacacacacggcatacttacgctaccagtgcaccaggctgagtcttgtgcacacagggagaccaaggaccaacggccatggtgacggtagccctgtaccttaatttcaagaagcagggcatcatagga

SEQ ID NO: 40569 - DNA, 294 bp, Zea mays
  Clone ID: MRT4577_137001C.1
tatctttttatatttttccccccttttttttttaggggttttttgttttttttttaatctttttcccccttagacccgaaaaaaccactaaactcgtttacaaccaaaaaaaatttgtgaaaaaaaaaaacttcaccccctaatatatgtgggtgtggggcaaattgccccccccctccccaaaaaaccattacataaaaaaatcaacgtccctcccctaaaaactcactcctttaaacccccgccatggcccatacaagggtcctccttacccataactctagaaggtggggg

SEQ ID NO: 40570 - DNA, 507 bp, Zea mays
  unsure (1)..(507): unsure at all n locations
  Clone ID: MRT4577_137002C.1
cttggggggttttttttaatccactaaacattatcaaaaactttattattgaactataactcataagaaatctaaaagaggcaccaccaattatggtttgttggtacaatgcccctgggtgtggggggggggctttttgaatggccccaattgctgcagttgtaagagggtgccagcgttaggcgcaccgcgctggtagaaccgcaacaactgtggttgtgtcaagaaggtagcagggctcacaccagctagctggctgaatggtactagttggtgctcctgtaaatcaccaagagagttcaatgctgtcacttggttgaatggaagaaattgctgggggtaggcaacanatagctcgctgaatggtacctgcagctgctgcaaataagaagcagaattcaaagcaactagtcgccctgaaaggaagaaactgctcctgctgagagtgggcagcaaagtttgccagcacaagttgtagaacttgttgtgccctcgtgttttgtgcca

SEQ ID NO: 40571 - DNA, 572 bp, Zea mays
  Clone ID: MRT4577_137003C.1
attataatgccattaggctgccgttggacattcttatattccgacttatcaaagcttatattcgttcctcatctttacggaaagccgctttgaggttttctttattggaaccagacagaaatggatgcatcactcttgacaatatcagaatggccttaacgagagaagctactgatgcaatgaaggaatcccgagttcaagacattcttgtttcgttgagcgcccttcagtacagaagaatggacttccaagagttctgtgcagcagcagttagtgtgcatcagcttgaagcattggatagatgggagcaacatgcgcgatctgcttatgaatattttgagaaggaaggcaaccgagctattgtaatagatgaattagcttctgaattgggcctcagtccttcagtgccactgcatgtcgttctgcaagattggatcaggcatacggatgggaaattaagttttcttggatttgtcaagttgttgcatggcatgtgcagcaggtccctgtcaaagatgagatagctgtcgataatctctaacgacagcgcgtgtttacaccgtcctgttgac

SEQ ID NO: 40572 - DNA, 1167 bp, Zea mays
  Clone ID: MRT4577_137004C.1
catggccttcgctgactccagagcaatggattttgttaagcgattgctgtgcaaggatccacgtagaaggatgactgcagctcaggctttaagtatgttgccattcattttattctggtggcttctattgaatattgcattgttgtgtgtattcatgtttttttctaggtcatccgtggatcagaaattataatgccattaggctgccgttggacattcttatattccgacttatcaaagcttatattcgttcctcatctttacggaaagccgctttgagggctctatcaaagaccttaacagttgacgagcttttctatctgaaagcacagttttctttattggaaccagacagaaatggatgcatcactcttgacaatatcagaatggccttaacgagagaagctactgatgcaatgaaggaatcccgagttcaagacattcttgtttcgttgagcgcccttcagtacagaagaatggacttccaagagttctgtgcagcagcagttagtgtgcatcagcttgaagcattggatagatgggagcaacatgcgcgatctgcttatgaatattttgagaaggaaggcaaccgagctattgtaatagatgaattagcttctgaattgggcctcagtccttcagtgccactgcatgtcgttctgcaagattggatcaggcatacggatgggaaattaagttttcttggatttgtcaagttgttgcatggcatgtccagcaggtccctgtcaaagatgagatagctgtcgataatctctaacgacagcgcgtgtttacaccgtcctgttgacttggttcacaggcaaattaacagggctaaagaatcgtacgattggagcttgcatatcaagggcgtctgagctctaacagcacctgatccgacactaatttaactatagagttatgtttattgttgcctgcctactgatcatttagccgatagggaaatgaaagaaaatctcacccatgtctgcaacatgtgatgtttctaacaaccttagattaggcgtcatcttctgttatgattctagaaattttgtaagcttcttttctcgaactggagcaagttagctgcagtcaccaggttggcgactggagcatggacatatcactgtcattgtgacattgttactgtatcattgtaccgac

SEQ ID NO: 40573 - DNA, 558 bp, Zea mays
  Clone ID: MRT4577_137005C.1
cacatcacaatcgcaaaagcagttgctgttgccgcctctaaagaggcagattcttctgaagcttccatgacaaatgagcagaagctgaaggctgagaggcttcggcgtgcaaagatgttcacttcaattattaagggtggtggcaacaagagcgatctggtgacaagtgagataactaatgaatctgcaagggccgctcctgctaattcgaacctccccgtgcctccagaacctttagcaactgaacgggaaggtagctctgtgcgttttgaacgggaaggtagctctgtgcgttttgaacgtgaaggttcgaatatgatcaagcaggagaaagactctgatgacgagcagaacagggcacgcaagtacagaaagcatcatccagaatccgatgaggacaaagattatttggaggaggaaagttataaacactcaaggaagaggcatcgttcggagcgttcaagaggccacagtaaggatgcacacaaacgtaagcacaagcagcactccaaggaaagggagtataggcatgatcatagctcttcggaagatgagcta

SEQ ID NO: 40574 - DNA, 1592 bp, Zea mays
  Clone ID: MRT4577_137006C.1
cccacgcgtccgcccacgacccacgcgtgaaggtggagagctacttgacagaatactttccagaggcgggaagtactccgaggatgatgcaaaagctgtcctggtgcaaatattaaatgtcgtcgctttttgccacattcaaggagtggttcatcgagatctcaaaccagagaattttctttttacatcaaaagatgatgattcccatcttaaggccattgattttggcctatcagactttgtaaaaccagatgagaggctcaatgacatagttggaagtgcttattatgttgctccagaagttctgcatagatgctatagcacagaagctgatgtttggagcataggtgtaattgcatatatccttctttgtggcagtcgtccattttgggcacgcacggaatctggcatattccgttcggttctcaaagccgatcccagttacaatgaggcaccatggccttctctgactccggaagcaatggattttgtcaagcgattgctgtgcaaggatccgcgtagaaggattactgcagctcaggctttaagtcatccatggatcagaaattataatgacattaagctgccgttggacattcttatattccgacttatcaaagcttatattcgctcctcatctttacggaaagctgctctgagggctctgtcaaagaccttaaccgtagacgagcttttctacctgaaatcacagttttctctattggaaccagacaggaatggatgcatcactcttgacaatatcagaatggccttaacgagagaagctactgatgcaatgaaggaatcgcgagttcaagatattcttgtttcgttgagcgcccttcagtacagaagaatggaattccaagagttctgtgcagcagcagttagtgtgcatcagcttgaagcattggatagatgggagcaacatgcgagatctgcttatgaacattttgagaaggaaggcaaccgagctattgtaatagatgaattagcttctgaattgggcctcagcccttcagtgccactgcatgtcgttctgcaagattggatcaggcatacggatgggaaattgagctttctcggatttgtcaagttattgcatggcatgtccagcaggtccctgtcaaagatgagatagctgttgataatctctaacgacagcgcatgcttacaccgccttagcccttgtcgacttggttcgtgggttggagcttgtgtatcaagggcgtatctagcagcacctgatctgtcactaatttgagtatagagttatgtttgttgttgcctgcctactgatcattagccgataggaaaaaggaaaatctcacccatatctgcaacatgtgatgttatctaacagtgttagattaggcgtcattttctgttgtgatttttggaaactttgtaatgcttccttcctggaactggagcaagttaactgcaagttaccaggttggcctttagagcatgaacatatcacttaccgtgcgtggtcgttatgtggtactacgtcaggttctcttcgtgtatatattgatgagatggaactgtgcattattttgaatctcaatattagcatgtcaatttgc

SEQ ID NO: 40575 - DNA, 244 bp, Zea mays
  unsure (1)..(244): unsure at all n locations
  Clone ID: MRT4577_137007C.1
anaatanttaaaaaaaaagtttacttcttccaacaaagacnncaacaaagaaaggttatatccacaaactgtcccatccttcccaaccaanaaacccttacaacccataaaaaaaaccaaccctcatgataaaacgtacaacacacggcccggtaatgcaaaacactacactaatagcccagtacttttttcaaacacccctacaccccccgaagaaacaaattccccaaaaaaaaccacaccc

SEQ ID NO: 40576 - DNA, 502 bp, Zea mays
  Clone ID: MRT4577_137008C.1
gccggcagggccgggctctctccctccttgtgcacagccatgtctagacgcttccagctgccccccatcctcacctgcctaatcaccgtgctgatcagcggcacggcgtcggcagacacgccggactgcccatacccgtgcctgccgccgtcatccgttgtaggagccatcagcagatacccgccaacgtgaccggccactggagggcgaggagtcctcggcgatagcttttcgacatgttggctagggagtgtccatgtgtgcccgtcgagggtgcaacatggcgcatgtaattgcacacgaagggaggatccaccacggggtaagtaccgttgctgctcgaaatggaagtaccatagagactatggagacttctttgcttgctaaacaatactggcgaagaacaagtcgactacatttttgcgtcatgtttctgcgtgtatttgcggatatgaaatgccatcaacttgaatatgaaaaagaaaaaaaaaaaaggccccta

SEQ ID NO: 40577 - DNA, 438 bp, Zea mays
  Clone ID: MRT4577_137009C.1
attcggctcgaggggacttcccctcttatcatagccaaacgcgagtaccagcctcgtgacgtcccgatctcgggctatggccgcgcggagtctgggatcccccgaatcaaggtggctgaggccgtccgcgctggtccttctggacgactgtgctgtactgtcggccccgtcgacggcccgggcacttcggtgcgacctggaggccggccacaccaagtgcgcatccgacgagatcaaggtcaacgccatgggcgacggacagaaccacagggatgggcctgaccccaactcacccgtctcccagttgccggagacgtaccgaatctgcttgagggtgacgtgctcgttcaggaacagcatgcactactcggagaacgtgcagtcggtccactagaacttcacggaggcgggggccggccactacctggcctgattctg

SEQ ID NO: 40578 - DNA, 312 bp, Zea mays
  unsure (1)..(312): unsure at all n locations
  Clone ID: MRT4577_13700C.1
ctaccnncnnctaaaacaagctcttttattattcattcattcaatacnaaaaagaagtctatatcacatacagtagaaggtttctntcttctctcatcattctttattcaaattntatattttaactacactattaccaatttccttcttttaattcattcaaccctttctttcttccatttaaactttataataaatttttctaacactttactttactatattctctactatataatcaataatctcctccatattaactttatatatatctcctatatacaatttataactccttccttctttttattt

SEQ ID NO: 40579 - DNA, 360 bp, Zea mays
  Clone ID: MRT4577_137010C.1
ggcctttgtcttttgcgccctggtcacgacgctgagcctcatgcccggcgcggacgtcggcaccaagcaagagcaggccggcacgagggggcaggagacggacgggtccgtctacacggaggtgccaatcaccatcttctacggcgtgaggggggccgtgtgggccaactccccatgtgaaaaggcggacgaggtcatgcgcctcgcagccggactctagcgcccgagcgtccctgcctaggagccttgcgacgacccgcccatagaccggaaggcaatatctggagcgggtcctggccaagcgcaaggaccgccttgagcagcgcgcccagtaccccgaccattccaatgcgaggaggc

SEQ ID NO: 40580 - DNA, 151 bp, Zea mays
  unsure (1)..(151): unsure at all n locations
  Clone ID: MRT4577_137011C.1
cgcgtgcggtactagcatntnagtaatatactgttacttctagtttttctagactacctctacacgaggccgtggtaagtcttcttcgggtctatacgttccccttgtctccgtaaccgtcgccctccacttatactgctgatatgcgctt

SEQ ID NO: 40581 - DNA, 457 bp, Zea mays
  unsure (1)..(457): unsure at all n locations
  Clone ID: MRT4577_137012C.1
ggcgggccaagccgaccangaacccttggtttttaatttaaaaagaatttttttttcctaggaccataataccaaaggggggcttaaaataacaaatgagtgaccccaattttttccttattatttccatttttccttttccaaaaatcctctgtcctataattaatgtttttttaacctaaccattttaacctttcaaatttccaaaatttttccaaataaaaaaatattatataaattttaatataaattatcataaaaaatttaattaataaaataaaaagtccttcctttttaaagtaccaaacttaccttccccgttcttccaatttataatttttttattattttcccctaatttaattcaatttcccctcttttaaaacctttttccttttaaaaccctttcctttccccaatttattcctttttaattaaatttctttttttccaattt

SEQ ID NO: 40582 - DNA, 227 bp, Zea mays
  Clone ID: MRT4577_137013C.1
attcctctgggttgatttttttagaaaccccatccttcccaaacccggcatggtttttacaagaaactcttattaggtcccaaaacttgacccccaattttttcggctgttccactattcgtcaacaaacgatgctgaaatgcccccggacaagttaacatcgtataacgcccctgtttctggtggctgtccggctaacctttccatttcccatgtatccttccgaa

SEQ ID NO: 40583 - DNA, 265 bp, Zea mays
  unsure (1)..(265): unsure at all n locations
  Clone ID: MRT4577_137014C.1
ccttgacccaaagataagcttcctgtagatatgaaaagagcttgtcgtttgcgtgcttgctcttctgtgtggagtgctcgagtggtgatgagtgtttgttttgtgaaagggagacggttgctggcttgatacaggtgtctcatggcaaaatcaacaagttgtttctcctgactaaaaaaaaaaaaaaaaaaaaaaaaaaaaaaaaaaaaaaaaaaaaaaaaaaaaaaaaaaaaaaaaagnnaaaaaaaaatgaaagggaaggggg

SEQ ID NO: 40584 - DNA, 358 bp, Zea mays
  Clone ID: MRT4577_137015C.1
agacatacacattcacaataagggtaaggggctttctttttactacacaaagggaaaggttctacgacaggctgctcctttaaaagacaacagttcggcggcgggtaaaaagcatgaaatttattcttggaaactgggaccacgagaggttaaactgttcccccggattggccctgcaatgatcaagcttttttagggtgcaagaaaaattgattcttttgcgggaccaacttggctggacaactacgccgaatcctgcaaaaattttcaactattttgggaagggggtcaccgggaacactcttagatcaaactcccgttgtgtccccagaattgccattccaaaaaaaacccgggc

SEQ ID NO: 40585 - DNA, 429 bp, Zea mays
  Clone ID: MRT4577_137016C.1
acgaaacgaccttattcagaagatcacatgcatcccgctaagtaagacctatggaatgcagcattcacatgtacacagttaaatcacaagaagaagaaaaacccagttaaatcacatacacagtgatttgagcctctgtacaagtgcaagaggtggtgttcctgttgcctttgggttcctggagtgggttcgggtatcctgttggaattcagctacaagtgtgatgtctgatttagattgttttgctgctgctattgttcttctcatcttctgttatccttgtaaactggtaagcagagaaataaatctcgagcactaatcctcatcatcttcttctgagctcccaacgtcactactgtactcgtcactactactgctcccaaaatcaagctgcacaggcttgacctgtattgtctctggtcccattgg

SEQ ID NO: 40586 - DNA, 317 bp, Zea mays
  Clone ID: MRT4577_137017C.1
cccacgcgtccgcccacgcgtccgcccacgcgtccgcggacgcgtggggtgcagggggtggggcccatcggctgagtacccgcggaggtggggctgaacagcctcaaggggacctgcacactcctagctgtccgacaccgggtagatgaccaactcggggatcaagaacttcctggaggaggtgaactggagcaacaggtggggcaaccacaggaaggccatctccaacatgctgaggatcaacaacgccttcatcaacataccgaacgcgtacttctggcagaacatcacgaacaggcacttcaggtagagcccga

SEQ ID NO: 40587 - DNA, 999 bp, Zea mays
  unsure (1)..(999): unsure at all n locations
  Clone ID: MRT4577_137018C.1
agacaagtgcagttcgtttacatctcaagctctcaaccctccaaggacaggttatactggtacggttacaccaagcttccggtcgtaaccgtctgtagaacatggagcgttgccgcccaaacccaaccaccgccaacgtttgtgaaaaacaagtggaaacatattaagctttcatcctaacaaaaacatacaaaaatagttaacgggcgactgttttgggagcaaaagtccacgtcactgaaaaccatatgcgtaatcgttaacagctctgctcaatgattgggcttggatcctcgtcttcccagcaatctggtgggatcagcggtaaactccaggaaaaaatagcctcgttttctgttagaaaaatgcaccagataatccaagacttgattgacagacacgtcactcagcttctcaggatgttttcaaagtctggtcataatttttcctgccttcattttggcatattcatgaactatagtagccgtgctttctctgtgtcgcagatagaactcagcaagcaatatcctattttcttcaggcaagagatcaccgtgatggcccaggcgggaaactctatcacaaacagcatggtgcatgaggattccagctgcaacagatacattaaacgaatccaccatgcctttcattggaatgctgcagtgcaaatctgacaattctagagcatcatcacttatacccctaagctcattgcccacaacaatagctgttggttgagaccaatccatatcatacacacaaaccgaatcagttcccaaataagtggtcgcaatgcgataaccgcgtttttttaatgcactgaaacattctgcaggtgagttccatatctcaatgtcaagccatttctcagcacccatgctcacatgcctgttgtctctatagcccttttgctgctatcacaggaaatgacgtgcacggactgcacgccgagcgcgtccgcggagcggaacctcgtgccgaattaaacagcccnnnnna

SEQ ID NO: 40588 - DNA, 607 bp, Zea mays
  Clone ID: MRT4577_137019C.1
aatctgaatgcgagggacgggatcgcggcataactggaggttgcgccgctgtatgaggaccacaggaggggccgtcgaggctaccaaacaccttgccacccatgttcccgaaggagctaaagccgccgccgggatggaagcctggtgatccgatcacgctaccgcttgatgagatactacctggtatcaagggtgaagagcgggaggcacaggcccctgtgccgcaggcacctgtttcagtgcgaccagtggcaccaatgggaccagagacaatacaggtcaagcctgtgcagcttgattttgggagcagtagtagtgacgagtacagtagtgacgttgggagctcagaagaagatgatgaggattagtgctcggtaagctgctctattttgttggctttcaattgtagttgcctttctatcgtatgcttggagtagaatcttctatgctagcgatttttacctgctcatgtcttactgactatttatgaactttagggctgatctcagatcattgtaatggtgctttatcctgtacttcttaaaccaatgtattctaccattgattttacttattatatgcttagtatcaattgtttacctttggt

SEQ ID NO: 40589 - DNA, 346 bp, Zea mays
  Clone ID: MRT4577_13701C.1
cccacgcgtacgcacgctcctgcagggctactccggcatccgcttcgagatccttgaggccatcaccaagctgatgaacaccgcggtcagcccgtgcctgccgctcctgcgcaccatcaccgggtcaggcgacctgatgccgatctactacatcgccggactcatcacgggccgccccaacgcgcacgccggcaccgcagacggcaggaaggcggacgcccacgaggcgttcaagatcgccggcatctagggcggtttcttcaagctgaacacgcacggagggcctcgtcatcggcacggcacgtccgtgggctccgagctcgagggcaccggatgtgcgacgcca

SEQ ID NO: 40590 - DNA, 1861 bp, Zea mays
  Clone ID: MRT4577_137020C.1
ccggccggagagcaagcccgcccattttcggctcatgagcccacgaagtagaggcttggcttgagcttattggcactctctcgaactcgcgtccgtttgcagcgccctccgccgtcgagccgccgcgatgatgcagtcgcacctgccctccccggcgaggctggggctcacaacctcgtcgccgtcgctcccgcccaatccggtccccttgaatcccacatcctcgccttcacatggtagcctgccctcgagtgcagccgccggcaccagcgctgccccaaccctaatcacctcgccgtcgctgctaccgctcctgccgccgcttccgcgcgcgcaatcgctgctccagcttatatcgtcgctcgccaccaacctcttcgagctctcgcccaaccgcgccgcgtggatcttatcgtaccgggggtcgctccccaccttcctcccatcggcgtcctcctccgcgccgccgctcccaacatcgatctcctctaccaaggacgcgctctctcttctcaccaccctgcagacgcagctcttcgaggccgtcgccgagctgcaagagaccctcgacctgcaggatgcgcgcgctcgccttgtccgtgaggcgcgtgccaaggatgcttcgctggtaacctttgcgaagaagctgcacgaggctcaccaggtacttgaccgcctcgtcgacgattacgctgactaccgccgcgatcccaaacgcccacgtggcgccgctgcggctgacgatcccgagccggcgtcggaaggcgacttcggcacgtccctccactccagccttaagctggatgacatcctgacctacgcgcaccgcataagttacacaacctttgctccgccggagcatggggctgggctgcctctccgtgtcagcctgccacctgtgccacaggaaaatcagatgagggcgtcgcagctgtatctttttgctgatttggatgtaggtgtgcccaagaagccattggatgcgaaggaggggatcgcaccagaagtggaggctgcgccgctgtatgagccacctcaggaggggccatcgaggctaccaaacaccttgccacccatgttccctaaggagctaaagccgccaccgggatggaagcctggtgacccgatcacgataccacttgatgagatactacctggtatcaagggtgcagagccacagccccctgtgccgcaggcacctgtttcagtgagaccagtggcgccaatgggcccagagccaatacaggtcaagcctgtgcagcttgattttgagagcagtagtagtgatgagtacagtagtgatgttgggagctcagaagaagatgatgaggattagtgctcggtaagctgctccttcgccttctatcatatgcttgggcttttccagtagaatcctctatgctagttattttacctgctcatgtcttcctgactacttatgaactttaaggctgatctcagatcattgtaatggtgctgtatccttaacttcttaatccaatgtattataccgatgattttacttattaaaaaaaaaaaaaaaaaagcggccagatttatttctctgcttaccagtttacaaggataacagaagatgagaagaacaatagcagcagcaaaacaatctaaatcagacatcacacttgtagctgaattccaacaggatacccgaacccactccaggaacccaaaggcaacaggaacaccacctcttgcacttgtacagaggctcaaatcactgtgtatgtgatttaactgggtttttcttcttcttgtgatttaactgtgtacatgtgaatgctgcattccataggtcttacttagcgggatgcatgtgatcttctgaataaggtcgtttcgt

SEQ ID NO: 40591 - DNA, 346 bp, Zea mays
  Clone ID: MRT4577_137021C.1
ttccttgcgggcgggacaccgttaccggggagaggctggattgcgtggacaggaacacctggtttcgctacgactgaagcaccataggctaggatatattgctacatgagtgacaggaaggcaagatgcaggccggggggttgtaggtctgggcgccacccggagggaagttcgaggctaggaacacgccgatcggtataatatcctgcatcatgggtgtcacaggcggagtgatgcatggctacgacgtacgcatatgaggtggtgtgacgctaacggacgactctctggggcaagacttcacggaggagctgcggaagaaactgtaggatcaggagagttacta

SEQ ID NO: 40592 - DNA, 504 bp, Zea mays
  Clone ID: MRT4577_137022C.1
cgttctttttagccttggatctaggctctcctgctccagacagggcctaccgatccaacatatagctggcgaacctcacgcggctgatggaggctcacaagcgctgcatcgctatattcatcaccgagagcggagataccttcacccgcaccatcaaggagaaggacacggtgaggggggagcaatcgggcgtcccctgttgtatagacactctgagaggcttgtaacactatgggaggacgagagaaaggcattctaaggtgcggatagaaatcgagattgcacagcatgacctgtgagagtgagccaaccgtgatggagaatgagcttatgcactggtacccaacatatactgtgtgctatgaatgcgaaaatcaagagcacattgaacgacctatggatgttgaaccgcttactaacttttatgggaatgactcttacaaagcatgcgaagcaaaccttgtatctggttgcaggtcgggacatttaccaagcctgtggtga

SEQ ID NO: 40593 - DNA, 789 bp, Zea mays
  Clone ID: MRT4577_137023C.1
atctttccgatcaataatcaccacgaaccaacgatgagaaccgaaaaaaggggggaaagagaaagggtagcggagcaggccggaccggagcagcggaagcctcacccccttcctccgattcagatctcccctcccattccaccgaccggttccccttccgtctccattcctacacaccaaacgcctcttccgatctcggcaacgacctcctcgtcgtacagggggccaccagcggcggcggaggccaatggaggccatccgtaagcaggcatccaagctccgagagcaggtcgcccggcagcagcaggccgtgctgaagcagttcgggggcgggtacgcggacagcgtgttcgcggacgagggcgaggcgcagcagcactcgaagctcgagaagctctacatctccacgcgcgccgccaagcacttccaaagggatatagttcgtggggtcgagggctatatcgtcacaggctcgaagcaagtcgaattaggcaataagttatgtgacgatggcaagaagtatggtgttgagaatacctgtaccagtgggagtacattgtcgagggcagcgttgagttttgcgaaggcgcgatccctgatggagaaggaacgggcaaacctgctgaaagcgtttggcacccaggtagcagagccactgagagccatggtgatgggagctcctttggaagatgctcgtcaccttggcccaagatatgacagaatgcgtcaagaagctgaagcacaggccattgaagtttcaaagcgccaaatgaaattaagagagacatc

SEQ ID NO: 40594 - DNA, 665 bp, Zea mays
  Clone ID: MRT4577_137024C.1
ttacagcaccaacaccttgggtgttcctaagctgataggatggaaggatggcgagagcagcttactggtggatcccgaagaaatcggctgcttggacaggctacgaagcttgaacgaggaggccgactgcgtccatgagctatacgccgacggccaaccgacaggaggctcgtcgtcagcgtggcaggacctgctggtcatgtcgccgtccagggtgtcggcgcagcgggagctcaaggctgccatcgagaggaacgaggggcgcttcgtcaaaccggcatagccgtgtagctgctacgttcgttcgttagttcggttccaacttccaaaggaatcgttccctagccggattgttgatcagctggaacgatttctgaatagattccttcgtaaccgaacatgcccttatcaggcgcatcatccaaaaacggggaaagatgaagctaatgtgatgctttgattgtggaggtggcctgtctttttattttctttttcaaacatacgaatatcgcaatgcgttttgtatgatgcgatccaaaatgctttgcaccgcaaatttattgcttgagaaaactagtttgttagcatgaagtatcagtgcaagcatcggattgcggcttgtcgtaaaagaactaattaataagggtggtgttatatagtatatc

SEQ ID NO: 40595 - DNA, 185 bp, Zea mays
  Clone ID: MRT4577_137025C.1
aaagattttatatacgcatacaacaagggctgcacagaaagtagatccagctcggccatctagagatccgtggcggcgatacgagacaccggagcaggcgtgcgcttgcctcatcaattttggtttagtgcggcggcaacgatgcatgcattttcatcaggttatggtttgggagaacaaaacaa

SEQ ID NO: 40596 - DNA, 188 bp, Zea mays
  Clone ID: MRT4577_137026C.1
gggggggacccaggccaactccgcgcacggttgccctcttatgatcatggacatcaccacgggcgggggagacttcccttgaaacgtacccggccttattgtcccttttcctacctcctgagtttggcttttctccaaccttccctcgtttggttgtatgcggtactgaaaacgcacacaattttttt

SEQ ID NO: 40597 - DNA, 324 bp, Zea mays
  Clone ID: MRT4577_137027C.1
tcgattcacaatgctgaggcgttatctccgcgtagatgctacaggggatactttctcggtgggcagcgtttacacaaagggctcctcagggaaaaagccatgagcagcgaactggttgcctacataaagcgctggatgattgtgcgtctcagctttacccacccttgcatcgtgctccggtgaaagggtatggtgacatatactaataactactatgggcggatgtggtaacgcatatgtgatctcttcaacagtgatttcaatgtcatgctcacagaagcatactgtggccgtttatatgctatgatcagctgcgtcgtgggg

SEQ ID NO: 40598 - DNA, 535 bp, Zea mays
  Clone ID: MRT4577_137028C.1
agctcggaattcggctcgagcggctcgagccctgttcctgtacgacgcgtacacgtccttctcgggccagcctgtgtacaacgactgggcaatggcgagcttcaacgtcttcttcacgtcgctgcccgtggtcgccatgggcgtgttcgaccaagacgtgtctgctagattctgtctcaagttcccgatgctgtaccaggaggggcctcaggaccttctgttccagtggcgaaggatcatcgggtggatggtgaacggcgtggccagcgccgtgatcatcttcttcctgtgcacggcgtcgctgcagcaccaggcgttccgcagcggcggggaggtggcggacatggcgacgctgggcgccaccgcgtacacgtgcatcgtgtgggccgtgaacctgcagatgtacatcacggtgagctacttcacgctggtgcagcacgtgtgcatctggctcagcgtcggcctctggtacgtgttcctcccggtgtacggcgccatcgcgcccagcttctcgaccacctactacatggtgttc

SEQ ID NO: 40599 - DNA, 583 bp, Zea mays
  unsure (1)..(583): unsure at all n locations
  Clone ID: MRT4577_137029C.1
cgggacacacctcagcacaccaaggagagtacgtggaggagtttccatggcttcatgggggggcgcggggggggagccattcctgggcacccgcctggggggcccggcgccacaaaacgggcgcatggtgggccgggtcgggttcgggttgggcgggaaggggaancctgctccgaagaagggggggaanacatcgacctcctctgaccgggcgctggggggccccggcgccgtggcgccccactacctggacgggtcgctgggcggggactacgggttcgacccggtcggtctcgggaagcccgtggagtgcctgcaggtcgagtgggactcnctggaccagaacctgggcaagaatgagggcggcggggtcatcggcacccggttcgaggcctccgaagtcaaggccaccccgtggcagccctacagcgaggggtgcggcctccagcggttccgcgagtgcgagctcatccacggggcgctgggccatgctcgccaccctcggcgccctctccgtcgagtgggctaccggcgtcacctggcaggacgcccgcaaggtggagctgggggacgggtcctccta

SEQ ID NO: 40600 - DNA, 295 bp, Zea mays
  unsure (1)..(295): unsure at all n locations
  Clone ID: MRT4577_13702C.1
accggtttcgaccccacttcttatctttcagtctccagactcctgcttcattacgtcctgcgcgctattccgcagcccaggacgcgtgaccgccatcccatcccactctccatagtccccctacctcccccatcccaatcctcatgcttcgccttgccctcgtcaccggcagctagcggctgtcttgtgccactgcacacacanccaggtgtttcgattggagtcacttgccgaagcggaagatgttcctaaatcaagatggacggccgccagaatacttttcacttctacatga

SEQ ID NO: 40601 - DNA, 1194 bp, Zea mays
  Clone ID: MRT4577_137030C.1
cggctcgagccctgttcctgtacgacgcgtacacgtccttctcgggccagcctctgtacaacgactgggcaatggcgagcttcaacgtcttcttcacgtcgctgcccgtggtcgccatgggcgtgttcgaccaagacgtgtctgctagattctgtctcaagttcctactccactgtatatctcatcctgctagctagaatagatcgatacgcatgatgatggtcgagtcgtcgactggctttgatatgtggcgcaaatgcgtacgcagttcccgatgctgtaccaggaggggcctcagcaccttctgttccagtggcgaaggatcatcgggtggatggtgaacggcgtggccagcaccgtgatcatcttcttcctgtgcacggcgtcgctgcagcaccaggcgttccgcagcggcggggaggtggcggacatggcgacgctgggcgccaccgcgtacacgtgcatcgtgtgggccgtgaacctgcagatgtacatcacggtgagctacttcacgctggtgcagcacgtgtgcatctggctcagcgtcggcctctggtacgtgttcctcccggtgtacggcgccatcgcgcccagcttctcgaccacctactacatggtgttcgtggaggcgctggcgggggcgccgtcctactgggtggtcaccctgctggtgtccgccgcctccctcgtcccctacttcacctacgccgtcgtcaagtcggtgttcttcccggactaccacaacaggatccagtggctgcggcacagggagagggccaaggcccacccggacccggagaccagcgccgacgtggagctcagccaggtcctgcgccagttctccgtccgctccaccggcgtcggcgtgtcggcccggcgcgatgccacggccgtgctccgtcgcctcaacagcacgacgcagcgtgcggactattcgcagtcaccacccaccccaggtgtcgcagtcgtcgtcgcagcagatcgatgagcgaaagcattcgttagagtctatacatacaaacatagatgtaaatacagtagtacacactacacaggaggaaggaaaaacatgcaagctagtgtcaactcaacaactagcatgagggccagtttttttttttttttttgaagtagctacaaatgatgtacattatttggaaggaaaaggattgatggggccatggggggagggat

SEQ ID NO: 40602 - DNA, 475 bp, Zea mays
  Clone ID: MRT4577_137031C.1
acttcgccaaaaaagaggccggcaactgttgaagttggacccatgacaaaatctacacttgagaaaaaagaaaaaaaaaactaaaaaaataaaaataaaaaaatgtgaaataaaacaaaaaatcaaaagacgaaaaatttaaagtcaagcaaaaggaatacagaaaaagaaataaaaaaatgaacaataaaagaaaagagattgattaaaaataaaaaaaagaaaaaaagatggataaaaagattttaagatcaccaataaagtaacaattcataaggaatttaaaaaataaaaattcttaagaaaaattttattaaccaggtataaaagaaaaaaaaaaaaggaaaatggggaattttaacccgaaaaatattgaaaaaaattaaattcattaaaaaaaggaaaaatattttttttaaaaaccccctttaaaaaaaatttgaaaaaaattttaaaaaaaaaaacaggcccaaaa

SEQ ID NO: 40603 - DNA, 536 bp, Zea mays
  Clone ID: MRT4577_137032C.1
gagccgagcctggccacgctaacatagcacataccgatgctctcccgtcgtcttctccctccggacggcgtctccgtctgtgggtgctgctgctcccagatgcgtgccctctgcctctgcgtctacaactgacgcgccttcttcagatccacacatttggtgtactacgcctccgtcgctctagctgctgaaagggcagaaggacctatatgtccccctacagaaggcgctgcagttgtcgcacaccgccgctactcgcagcaagtcctgcctgtgataccatcgctcaggaggcgtcctggctctgcgacccttcgcagacatgaccatgcacatggctccttgcatgagtgcataataagggggtgtcctgataccggtgacatcttctatgctctacccgggtcgaagcgtgcgatatcactgatatcatcgtacccgcgagcagcgtaacgaagtagcacttacgcttgcctccgtcgtgcctgtatggggattttacagcaccatgattgtgttgtctcctactggtatct

SEQ ID NO: 40604 - DNA, 383 bp, Zea mays
  Clone ID: MRT4577_137033C.1
gactagttctaagcatttccttatgctgcatatttagtgtaactcagtgccttcattggcatatgttatccacatcatcatttcaaggtccactactctgttccctgtgctggtttagatttgtagagcacataagtcaactgtcatatgcagcagtcacgttcaataagctgttagctgtagcaggttggttcctggaccagctagtatttgcgaaaccaatgccctttgcactctgccagaaaaacggtgaaattctatatccatattctaattttactgaaaacctggtgtgccatcattgctcataaccttgtttgtcagttgtcacagtattggttcacagaaaatgtttgcaataactatttgtttgtatttttgtg

SEQ ID NO: 40605 - DNA, 336 bp, Zea mays
  Clone ID: MRT4577_137034C.1
ggggggtaagcattttaccgggagaaataagcaaaacaaacatgcgggattggtttacattgacgttcccgggggtcatttaatttactggccaaaaaatctaaagacaccagttcccaacatttttcattaagggggggaaggcccgatattgtttgtttttttggatcgaccgattatccgcgcgcattttccttttttttttggcattgctgccccccggaagaaggggctcccccgttttgttagccttccacttgggcaacccattttgtgcttcctctacccccttggtccaaccagtttttaaggggacccacacttaatttgccggtt

SEQ ID NO: 40606 - DNA, 312 bp, Zea mays
  Clone ID: MRT4577_137035C.1
ggaccaacaacaaagggtgctgattcacaaataaacaagtccttgcggggttacatgacccaattcccggggggggcggccgagaaccccgcgccatttaaccccccccggggggaccttaacccaagggttgcccacaaagggggggcggcccaccctaggggggggggaacttggggacggccctggggccctaaaaaacggggtgctttgcgagcccccccgggaacccaagggcccccgagggtttgatctcccgggacgtgaaggggggcttcttttttgtacccccgaacttggggggccccccgg

SEQ ID NO: 40607 - DNA, 346 bp, Zea mays
  Clone ID: MRT4577_137036C.1
ccccccccccttttttttttttttttttttttttttttttttttttttttttttgggtgggcaacacaaaggggggggtttggataaaatcttaaatggatggggacccaccacaccggggctcatgggttgcctgttatgggggggcacccaaaaaacacatctcactgtttttcaaaaacccccctgggggcccgggggggacacgaccccctcatatgctcatataattattttaaattcagagattccctgggcacccacttgattggatgacttgaaacacacccagtgccgctcgtttactttattaagctttataatttagttgggttcctccggccgg

SEQ ID NO: 40608 - DNA, 631 bp, Zea mays
  Clone ID: MRT4577_137037C.1
gccggccgggttccggacactcattcctcttacaccccgtttatcctaaacgccttcgccgctcatgtcccgttcctccgcccgaccgatgctactcctagaacctgaagatagacgtcttcatcggatgtcgccgcggtcgacgaccttgagatgctcgccgctcacatccgcctcatgatctatgactaatgcgttttgatgaataaggatgacattgttgttgtccatgagtcagagtacaactgccgtttgttggattacattggttctccgattctgctacatagggtcttcagtgggatccttttcatctcctgatatgagttgctacttcaatctggctgcgcgataaggtcctgtttcctttactcctgaccattacctgctgcatgcaccctctgtacctcgtgtctgagcttatcctgaagaactaccttagggtgtgaaatgcagcgccgacgatgctactggctcgttctgggcatcccaacataagatgtcctacgtgatcatgtctcccctctgatgcgaatgtcacactgatatttagatgctgtatgattgtgttgctcggtgaccagatcgcgagtctgacttctgtattatccgagcttatacctcgtctgta

SEQ ID NO: 40609 - DNA, 415 bp, Zea mays
  unsure (1)..(415): unsure at all n locations
  Clone ID: MRT4577_137038C.1
cacacccgagctataacagtgacagacactacgctggggtgagcgccanaatcgttgtcctcctcgccaccctcctatgcgctgccgccgcagtcgcgtcgtcctgggaggactacaaccaccaccaccacgggggccacaagtcctggcgatgcctgctgcggtgcgaggaccgggcctggcaccagcgtccccggggcctggagcagtgcanggaggaggagcgggagaagcggcaaaagcggagcaggccctaggcccaccaccgcagcggcaagggctcctcggaggattaaccccagccccagccggaagaggaggagaagccaaaggaccggggggcggacctgttccacccggcccacttttccttccgtgggcccggaaccagcaggggtcccttgaggtgctcccg

SEQ ID NO: 40610 - DNA, 514 bp, Zea mays
  unsure (1)..(514): unsure at all n locations
  Clone ID: MRT4577_137039C.1
tcccgggcacacgagcaactttttaagnattcgatagatggtacgacgccgtggaggggggggtatgagattgacgatacacaaatgacagtcgtcatgagcggtcttatggtatggtgcatncgaaaacggttgctcaccaaacataaacgggaatccccccccttctccatggcggctgctttttttgaaaatctcacgcgacctccgaatgaaagtggtgtaagctactaacgattcttgttagagccaggaaagaggctctccagccaattataaatttattcctcaagctctgaggatcaagttcaagctgtggattatataggaagcacgtttaataattaataaagagggagaggatgagcatctctctgttgctgctcaagtgttgtgcgcagtgcgagtgatgaatatatacgagtgcgtgtgggtgaattctttgagaaatctctctgaagctgctcaaaaaaaaaaaaaaaaaaaaaaaaaaccgagggaaggtcgcggtacc

SEQ ID NO: 40611 - DNA, 444 bp, Zea mays
  Clone ID: MRT4577_13703C.1
gaagataaacatgaatcttattatgtagccgtgattttgataaccaaaaggagtcaaaaacatgagcccatgcctacctatgcacctctaaagttacgagaatcgaaaacttccaagtttggctaaactaaccaacgaaccactatgcaaaagacaccgagcgaaaaaaggacctgctgaaagcaaaacaagctcccttgatagaaatgcataggaaattgtgtataacccaagccaaaccctccaaagtgcgacaggttcctcacatcagagaataaagctcgacacctttactcacgttgcctaaacatgggaaagaccttgtccactttatatgatcaaggcttgtttgcaagacctatcgctgaacactcggcttgccaactataaaaccacctactgatgcctagaacgataccgttaaccgcgggcgctggaggaaag

SEQ ID NO: 40612 - DNA, 296 bp, Zea mays
  unsure (1)..(296): unsure at all n locations
  Clone ID: MRT4577_137040C.1
cactcccnatcagcanctgatcgctcactcttcagctcggtcattctttactcggtagctctagccctaggtaagagctanccactcnntcntntantcatcanccttctgatcgtcacccatggccactgcctaggtacgtagagctcgatccatcgtagtagtagtctttgattcatgcatatgcacggatcggatcgtttggataatcccgaataccagctaataatgatgtttctctatctcatccatccgttcattcgatcatgcgtgcacgtgtgcgcaggtccagaccc

SEQ ID NO: 40613 - DNA, 541 bp, Zea mays
  Clone ID: MRT4577_137041C.1
gcgtccgcggacgtgaagaagctcaacaagaacaagaagctcatcaagaagcttgctcgcaagtacgatgccttcgtcgcttccgactccctcatcaagcagatcccccgtctcttgggtcctggtctctccaaggccggcaagttccctacccccgtctcccacaacgaggacctttccgccaagatcaccgacgtcaagtccaccatcaagttccagctcaagaaggttctctgcatgggtgtcgccgtcggccacgtcgacatgaccgatgaggagctcgtcggtaacgtcatgttgtccatcaactacctcgtctccctcctcaagaagggctggcagaacgttggctccctcaccctcaaggcttccatgagcccccccaagcgtctctactagacgtttcgctggatattgagtgaggaagcccgcgggcggatacccttgttttttttttgggctgggaatggcgtagccaggatttgcaatttctcgcctcactggttgagaggttatgaaatgaagtacgcttttttttcct

SEQ ID NO: 40614 - DNA, 733 bp, Zea mays
  Clone ID: MRT4577_137042C.1
tacaaaagaaaacttgattcttcagtctcccagcacaaaagttgtttgaagataagttcattcaagaatttgaaggctgcttgtgcttttggcccccacccacgcccacgcgtccaaccgcccgtccgcccgcgcattcgatagctttgttttttttctaggattagctgcgacgaggctgttttttcttggaacagttacattatcttttggtcgggtactgcttgatttgatttgtgctttcacgcttctgtaggaggtgattcgtcagtacaagaaatttgtatcctccttttcttgacagaatctatgacataataacatctcaagcatgcatggcaatgaggcacaatcaggattgagaacggatgggctacaaagttctttgaagatgctgctagagaggagaactgttgagctagaggagctcctttcactaaggtcatcaatgcagacacataaaccatcaatagtggggtatgatgaggataacaatgtgatttttcctttggacaagcgtcgtcatgatccaacttgaatcaatgaagttcaccaaagttttcgatgacaccaatattcatagctacccttcttcccccactttctatattgctggtaatagctcatctttgcttttcgcattgcacaagtaactaaatgaaattactttgtgtatgtgatacagagatgttcctttgattagtctatagtagtaaaagaaaatatattgtcg

SEQ ID NO: 40615 - DNA, 601 bp, Zea mays
  Clone ID: MRT4577_137043C.1
ctacaatgtgttgcatccactcagttggatctaatcttactcgtactagggagctactagagttgtagtagaatgtgttcatgcagagcgggcaagaagctttcacagtgggtaaggattcaaacaggactccaacaagtgtgcatgagctggttgtacctatttgttccctggaaactggagtgcttggaaagagaatcaaaaggtctctaactggtgggcatgagatgcagtctacccaggacaagtgatcagggaggctagcatggtgaaggaagcaatactccaacatgtcaagttacaaaaccttcaagttcagtgagatggggtgacaggagtagctaaccacagttgaggcgacaaaaatacatatccaagtttaggtccttgtgcagatagacagataaacaagtatgacagtcacttcagaagtagcttccactccctatgttttgcaaggtagagagctccacgatgtagattccagacccaatgttgcgcaaggtagtaaaagttgtacacatctgttagcctgttgctgttgttgatctggtgatgaacattctcttctacaaaatcaaaagatgttttatttacatag

SEQ ID NO: 40616 - DNA, 417 bp, Zea mays
  Clone ID: MRT4577_137044C.1
ccccatcggagcacccatccacacggtggccaacttcagcggcgtgcaggagccgaacctgtcctcgtcggagatgtttgacatacaccgcaagccgttcgtcctgtaaaacaccacaccaggaccgctccgcttgtacgcacaaatcactattactgctgcagttcaacaagaatacttaatgatcgccgtatcagaataatcagttatccatcgggttgagctatgatgcttcctagtgtaaaccaagtgtaataatcagttatcctcccttagacttctagtgaacctcagtgtaataattaaggctgtcgttcatggtcctcttatatacgtatatatgtaaaccaagtgctacatgcggcttcagcatgcagtttcagtgatcaaaatgcagtttatgcggcttcagcatgc

SEQ ID NO: 40617 - DNA, 1354 bp, Zea mays
  Clone ID: MRT4577_137045C.1
ggtctcccactctcccttctcgcgccgttggaggcaaatcgccgcgccgccccctccgcccccgttgtccgccttggttccctcctcgcacctccctcttctgccccctccctcgttgcccgccctccagcgacaactgctcccctcccacacgcgcgactcctcccagcaccgtttagggtctcgcgactcggcggcgaggcggcctttgtcggcaaactcgggcacgacgagttcggaagaatgcacgcggccatcctccacaacaacggcatcgactactacgtcgtcgtcttcgatgtgggcgcgcgcactgcactcgtcttcgtcaccctatgcgccgatggggagcgtgaaccccagtgccgacatggtcctcaatgccaacgagctcattatgaggatatttgttggtaagggacataacacttcacatgcccatatgactttagaagctcatggatcctttttgtgtctcctgaaattgaggtatatgaagggatgatagtttgatgccatccacgtgacagtgaccttgaggccattgacaccaatatagatcatgctgagcctgagcacaaagaccttctgagagtccatgaagtgggaggtggctctacaatgtgttgcatccactcagttggatctaatcttactcgtactagggagctactagagttgtagtagaatgtgttcatgcagagcgggcaagaagctttcacagtgggtaaggattcaaacaggactccaacaagtgtgcatgagctggttgtacctatttgttccctggaaactggagtgcttggaaagagaatcaaaaggtctctaactggtgggcatgagatgcagtctacccaggacaagtgatcagggaggctagcatggtaaacttgacatttctcctcataaattatcataagtcgcacataactcaatcctacaaaataaatatgttcatcttataactaacatcaccgctgcatgacagcatgaatggtgagctgtaattttccatgaaaatgctgcaggtgaaggaagcaatactccaacatgtcaagttacaaaaccttcaagttcagtgagatggggtgacaggagtagctaaccacagttgaggcgacaaaaatacatatccaagtttaggtccttgtgcagatagacagataaacaagtatgacagtcacttcagaagtagcttccactccctatgttttgcaaggtagagagctccacgatgtagattccagacccaatgttgcgcaaggtagtaaaagttgtacacatctgttagcctgttgctgttgttgatctggtgatgaacatctcttctacaaaatcaaaagatgttttattt

SEQ ID NO: 40618 - DNA, 198 bp, Zea mays
  Clone ID: MRT4577_137046C.1
ggccaacgtgcgcctggtcgccgacgtcaggctgctcttggacttaaccaaaaggaactgggtgcccttcccccggttggactcgtccttcgtcaaataccggccgggggccaccgtgccaggggtcgacgtcagcgagtggctggctttaacccccgtttgtttcggcaaaaaaaccaaaacctttgccgccttttt

SEQ ID NO: 40619 - DNA, 378 bp, Zea mays
  unsure (1)..(378): unsure at all n locations
  Clone ID: MRT4577_137047C.1
cataaactacattttgtttgttatgtgcatgcttcatctgcattgtctgagtcttggtctagatacaccagcagtcaaccgtatacatggaatctgtagcatagctatttgtcactaccttgtcacttgggagcattgaattaaatatcagtgtcttatatatcatgttctgttcttcaaccttgggcacgcccacccatccatactgagtactgacaccgcttgcatttggtctagatatggggngaagttcttgatccctcaccccccttctatttttttttctttccagactttctatgctacaagatctaaatcgttctgaaaaatatgaagtaccaccttaagaaaacaagaggacccgactatgattgaatc

SEQ ID NO: 40620 - DNA, 364 bp, Zea mays
  Clone ID: MRT4577_137048C.1
ggaagaaccaagcggacgcaagcattcagaaacacacacaagctaatctcattaccaacaacctaacaacaacggctacgaagacattaggggggtttgcgctgcttgcgcttttttcgagctcaacaaaagcggccattattccacaaagctcactggctggaagtgtcataattacacagcgggctatcaacaaatacttgaatggtgcttcaacacccaggtgttcacacctatagggtacaacaaaccaaaggggcaagcgtcttacaacaaccaactttccacgtgcaacaacaatcctgggcacatttaactatacaaaccatcgcaacgcaacaacaacaacaatgcctaccagcac

SEQ ID NO: 40621 - DNA, 531 bp, Zea mays
  Clone ID: MRT4577_137049C.1
gccccttctcgagttttttttttttttttttttttttttttttttttttttttttttttttttttttttttttttttttttttttttttttttttttttttttttttggggccccggtaaaacaaaaaaaccccaaggggaaaccaaaggaaaaaacgggacccccggccaaaccctttgatcgggccaccccggggggccacaccccaggaaaaaagtaacaccttggtaaaaaacaacccttccatgtcccataaacccaagggaacccccgtaagccctccccccccttgggacagccccccccgggggacccccatggcctggaaccccccccccattttgccccggttaagggcaaggaaaaaccccccccggcccccgccaaggaattcccaacccccccccgcctttttggggtttgggaaggcccccccctgcccggggcccaggtttcccccccccttttttgcccttccaagggcccacgggaccttccccaaaaaaatagattgggcccggccggggggg

SEQ ID NO: 40622 - DNA, 285 bp, Zea mays
  unsure (1)..(285): unsure at all n locations
  Clone ID: MRT4577_13704C.1
ggcggggccggcgcgacgacgacggccgcggcggcgggggccggggcggcggccgcggccaacgccagcaacaacgacnacnaggccggcgcgggcgcgggcgcggacaccnngacgccgacgcagggcaccaggangccgancnncnnggnccngagcgcgccaacccggacgccggcccnggncnccaggaccaggacganggggaacacgccggaccaacagacgncagagccggccgcggaggggncgaccgcgagcgcggacgcggagacggaggcccgg

SEQ ID NO: 40623 - DNA, 139 bp, Zea mays
  Clone ID: MRT4577_137050C.1
ctcttttcgatgtacgaactcttttttaccgtcgttagtacagctctttgtattgctgttatgtgcgtttttagatgtcggattcggatagggaaaacaattacaacaaatatatgcacgaattcaaagtatactcttg

SEQ ID NO: 40624 - DNA, 1773 bp, Zea mays
  Clone ID: MRT4577_137051C.1
ccacggcgtctttgggtgagcacaccgcgcagcaacgagaggggaacaagagccaacaaacaagcttgctactgtgatttctcgtccgagcagcggcggaggagagagatgctcctcgcgccgccgcagcgacccgacgacaggtaatggcttccgcccgcggtgctccggaacgccggatctcgccgcctcttctcctaccccaccctccgtgctgctgcaatctcgggacccgccgtgctaccagatgcgcccgtggcggcgtcggtgggcggcccagccgcccccgctggcctggacactctgggcgatgtccatggccaccttcacacgcacgaagccccatgtgaacgtcggcacccttgggcacgtcgatcacggcaaaaccagtctcactgccgctattaccaagggaatatcaactacaaggaatttgcttgcagatgatgctatggtgcctatctcctctcctttgactcctccactaggtgacagtgaagaaactgacaaaaagggggctgtggtaaaacgcctaaaggtccaagccataaaaaaagatatcaaacagagtcccaagaaggtgaatctagtagcaaagctggttcgaggtatgcgtgtagaagatgccctactgcagctgcaagtgactgttaaaagggctgccaaaaccgtttaccaggtgatccattctgctcgggccaatgcatctcacaaccatggattggatcctgataagctcattgttgaggaggcctttgtgggaaagggacttttcctgaagagagtgtcttaccatgccagagggaggtccggcattatggtgcgaccaaggtgcagactgacagtggtggttagagaagctacagctgaggaggaggcaaagatcgccaaactcagggtgagcaactacaagaagctgaccaggaaggagcagcagcttatgcctcacaggctcatcgaggttagcccgaggtggattcgcaagaggaaagcggaggctggtgctacggcgtagtactttatgtatgcagaacctgcattcactgctttgcacatccgaggagcgaacatgccttccctggcacaaatacttgatcctctctcggtgtcgattcacgcaaacgggttacaaagctaggcttggtttgttttgctctaaatccatgtggattggatgtgtttaaatcgcaaacaagtcaaaatcctttataagtttttctaatctcatcaaatccacatgggatagagaataatcgaacaagaccgtaggtggattcgactatttggtaatcttggtcgtttggagtctaggaagagaggaaaatgctatgtattttagcgatgtgcattgtagccaactaaaacctcgccaaagcattggatgtgcatgagacacgtaccattgcttctacaatttcatgcaactattggtttcagctggtttcaatgctttgtctagtgcgcattgtacaagaagactacaaatggtggtaagctgtagttccatgcagctggaaagacgctaaggtgtacaggaccgaaccgcagcaggaccagcatatgccatgatatctcccgttcccacatctcaggttagaactttacatacaaattttcttgcccgtagcaatttagtaaagaaatgaatgctgacatgtttcttggaatgcatgggcaaaaaggcagagctggctggtctggccgccattcattctggacagtaccttgtgctttcttgttgaggtggctcctcataaagcatattttgtagcc

SEQ ID NO: 40625 - DNA, 272 bp, Zea mays
  Clone ID: MRT4577_137052C.1
cagctttgctggggcttcctctgacgagagaatcagaaccgacaggtgacagttgtttcaatgaaagcaacagtgtgaagagtaagtagttagtcctattattcatctcactcagtggagataatgaactcgtctccactgccaagatgagaaactaccatttcttacacatggacacacagatgaggacaataaacactagagacttcaagaaggagtgaaggagagataggaacaagacttgatatctacctatcaggtacgatctttac

SEQ ID NO: 40626 - DNA, 576 bp, Zea mays
  Clone ID: MRT4577_137053C.1
atacctgattatatgatgccaggatccaggaaaagtacgggcaatggggcaagatagaggggaaaacgctacagggagtactatatagagtatatatatccttaggcctctctttgaggggcagctcgggctgtgctgccgctgctggcttcgtcttcgtcttcgtcagacaagcagtcggtgacgtcggtaacacagctggaggacgacggctgtggcgccgagaatggcaacggctgctgtcctctcacgtcttccggctgctgctgccgccgccgccgccgagcggaggcgccgtgtcgcagagttttgctgccggcgtcccggttcggcctgttcttcaggaagacccggcacacgacccactcccctggctcagcaacgcagccctgcagtcattggcaacggcacgcatataggaatcactatacatgtgcaaaacgaataaaacattgccctccaaattcgtggggggagcaaatgtaagctacggcggcaaaacatcgcgaatcgagttgcaaagcggatcgagtactccagtcgaatagtcgatgccaaactgccaccgttgccccc

SEQ ID NO: 40627 - DNA, 150 bp, Zea mays
  Clone ID: MRT4577_137054C.1
ggtcaatattctgtagaacatctcaaagagggtgggagaagattagacatgtttcgcatccaaaggaggaatgtattatggcactcctaggaatcgcataaccttgttgacgaaggcaatcgccatcgtgtgcgcacgctaacaagtatc

SEQ ID NO: 40628 - DNA, 259 bp, Zea mays
  Clone ID: MRT4577_137055C.1
aaaaaaaaccttctttccttccaaaattggggattgggcccctttcccagggggcttttttttgcccccctgggggaaaaaatggttctggttatcccgccctgggcccccaatttcccagaagggggggacctcccccatttccccccaagaggggggggggcccccggcgagaattggagaataaaatttgggcccctgggaccccctttattcccgggaagggtgggaacaaataccagggcccctttccccccgg

SEQ ID NO: 40629 - DNA, 410 bp, Zea mays
  Clone ID: MRT4577_137056C.1
tcgcgaggctgatgcagatggcgcatggagtattgccttgtctgcgcactgctcgcagcccatttgttatggcgcacctgatgcatattatctcactcaatcacctactgatgtctattatacttgcggcactcagaagaacctcagtttcactcccaaggcgagcgaaaactgtaacagtagagcatctaagccacatcactacataaacttactagctggtggttcccatagtacgggtaggcttctgatgccgtggcatacatgtttgggtgcggaatctgggaggcgcctccatatccaccgtagaatggagccccgtctgacatgcacctacttttggctttgtgccaacggccagaattacccctagactgataacgtgaccgtcttggaccacacgcaagtga

SEQ ID NO: 40630 - DNA, 214 bp, Zea mays
  unsure (1)..(214): unsure at all n locations
  Clone ID: MRT4577_137057C.1
cnnnaaagaacaanggggggcttttttggtgtttttacaaacgcgtaggcgcggattttaaccacgcattggggggatcacctttttgaatccgagtaggtaattgcttccttggatgaccgggactatttggcaagaggcggatcagcttgaccacgcactaattcaaagcgagccacctggtgaatgtagggcctaccaagcctttgggccc

SEQ ID NO: 40631 - DNA, 113 bp, Zea mays
  Clone ID: MRT4577_137058C.1
acggaaatatgtgcacgtggagtctgtagctacattgaaccctgggaccatatcgaaccctgtcgcagcatgcaaataggaggtgtgacctaagaagctaacttcgatcgaca

SEQ ID NO: 40632 - DNA, 776 bp, Zea mays
  Clone ID: MRT4577_137059C.1
gccacacgcccgccacagctaggcaggctagtatagctagtccgtcgccgcctcagggttagcgatctgtccatggccgccgccggctgtttcgaagcaggagaagccagcagcggcagccgggcgacgccgcggcgtcgggggcggcgacggccattattactagccaagaagccgccgtggcggctggtgctagcctttttgatcctgatgctggtggcgccgagctgctgccaggcgacggcgcgagcgcgaggcatgcagccgttccggggcaggccgctgctggagccaggcagcgccaaccgtttcctggggttcttccccaggggccccgtgccgccgtccggcccctcgcggcagcacaactccatcggagcgcaggaccagagccatccctgacgatggcgtacgtgtaccggtgcgtggaagcggccggccgcccgcgcgccgtcgacaaagtgtttggagagagagagagagagagagagaggctggtccagaaaagatatattgtagagtaagatctcgaaggatagatacgtagttcgcgtcgcatgcatcgtcatcgtggattaaattgaatccttgcttccttgtcggtcgtgactcgtgatcgtagctaggctctcgtagtggttgattagtttgtagcacgcagcactagcatgtatacttggaaaagaggcacgtttcttctctgtaggatatgatgtacatgaggctatgtttttttagaagaaaaggtgggtggaggcgttgtttatcggtgcttc

SEQ ID NO: 40633 - DNA, 252 bp, Zea mays
  Clone ID: MRT4577_13705C.1
cttggatcttttccctactgatgacgatgatgattgatctggttcgggtccgctgcaaattctccaaattgcaactttggattaattgagctttggagtatacataaatttactacaaattgtcattcgatcttcttactagttgtgtgcttcggtactcgcattagcagtttggtacgtcgtgtggcacgtatagaactgtgctatgtacatgcgcaacaaaacaagttacgacatggtaaaaacagatgg

SEQ ID NO: 40634 - DNA, 814 bp, Zea mays
  Clone ID: MRT4577_137060C.1
gccggccgtgccgggatccactatttataacctttcatatatcaaatctctgtacatatattaatcatgtcctgtacttcaatcttcaatgtaccttttacatcattttttgatgacacttcaagttataaagctacccctgatgaatcattcaagaaaccatttgaagaaaacctttcaaccacattcttgtcaaatcaagcaaatgaaatcattttacagcaaggattctctgcacctgttgatatacccaaaccacaattttattcttttaatgctccactagatcatggttattatgaaggtaagctaaattgtgtgtgtttcaatcagtggatcaacgttaataacacgattaacgtagatgactatccaagtatactttccgcaaaggatttggtgtcttttgccgagcatttttcacaacaacagcaaccaaaacccatttgtcaagagtcatctctttactataacaacagtcctccatctccattattacaacagtttagtgattctgactatacaccaagccaagtcttggcaggcagtagtagtccaagttctcttggcagccctaatcttcaactgaattacttgtctccagtcagtctttccactttacctgacagtgaatcactcgaatcatccgatttactctttggcaattatcaggtagattcattatttccagacgtcaatcaaaaaaagaaaatgaaggcaacaaggaccaaggttcacaaatgtccttactgtgatcataccagtaatcgtgccaacaacatgcgtgaacatactcaaattcataatcccaaca

SEQ ID NO: 40635 - DNA, 2585 bp, Zea mays
  Clone ID: MRT4577_137061C.1
cattgggacctcgaggcggccaattcggcacgaacctcgagcgccgctcgcctcccgccatttccttcccaaatctaccttatcatattataagcgcgcgtagccttggcagctcgacgcatcttcgcctccgctcaacgctcgcccacgcccccagcccccaaccgatccaagagaaaccttctcgcctccgcgggacgattcgctagggagagcaaaggtagcagagccgccatggacgctgccaagttggtgacgccgggcgccgtgtcctacatcctggcgcacccgtctacgggctccgatggcgccgtgtcggatctcgtcgttcaggtcctcgatctcaagtccatcggcatgggcagccggttcagtttcacggcaaccgatgggaacgacaaaatcaaggcgatgctccccacttactttgcgtcggaggtccactccggcaatctgaagaatttcggtctcatccgcatcctcgactacacttgcaactccgtcaaaggcaacgctgacaaagtcctgattgtcgtcaaatgcgagactgtgtgcgaagcgctcgacgccgagatcaacggcgaggccaagaaagaggatcctccaattgtgctgaagcctaaagacgaaggctcagtcgtggctgaggaaacaaattctcccccactcgtgatgaagcctaagcaagaggtgaagtccgcgtcccagatcgtgactgagcagcgtggaaatgctgctcctgccacgcgcctttccatgacaaggagggtccatcccttgatcactctgaacccctaccagggtaactgggtcattaaggtgcgggtcacgagcaaaggcaatctgagaacatacaggaatgctcgtggagaaggctgcgtcttcaacgtagagcttactgatgaggatggcacccagatccaggccaccatgtttaacgaggctgcaaagaagttctatccaatttttgagctgggaaaggtctattatgtctcaaaaggatctcttagaattgcaaacaagcaaatcactccagtcaaaaatgcgaatcattggtcactgagttcaactagcatgcagagaggatcatagggggcagcgttgactcgcccgatcggatcaggaaagaggaggaggacgacagttaggctctacagctcaaggaagccacttgtgtacatcacctggtgcgggtcagcgtcacacagcatcaattacaattaggagaaaaggcagagaatcgacgatacgagtgaggcacagtgctggaacagatgactctggcagtaccggcactatctctcatcgagactgattgcttgctagtagaagatccagaccttttggacgtgggtgacagttcgcccgttgttgtgttccaacagggttaaagtatctctgtaagatatacgtatctctttgaattcttggatgtaagtactctcgtgataaatcctgacctgcatgaggctaaaaatctgaagtcctggtatgactctggaaggcaaagatacttcactggcaccaatcagtgcagaagtgggtgccacacgcgctggtggtttcaagtccatgtattctgatagagtttttctgtctcacatcaccagtgatcctgctatgggccaggaaaagcctgttttcttcagtctgtacgccatcataagccacatcaagcctgatcagaatatgtggtaccgtgcttgcacgacctgtaacaagaaggtgactgaagcttttgggtctggatactggtgcgaggggtgccaaaagaattactctgagtgctcgctgagatacatcatggtgatcaagctctccgatcccactggcgaggcttgggtgtctgtgttcaatgagcatgcagagaagatcattggctgcagcgccgacgagcttgatcggatcaggaaagaggagggggacgacagctacgttctcaagctcaaggaagccacctgggttcctcacctgttccgtgtcagcgtcacgcagcatgaatacatgaacgagaagaggcagagaatcaccgtgaggggtgaagcaccggtcgacttcgcagctgagtccaagtacttgcttgaagagatcgcgaagctcaccgcttgctagaagacgcagtctttctggtggttcttgaaggactggcccccgatgtctccctcgcagtttttcttttgagctccagtaacttgattactgttctgtgtgttgctctcactgggttttagcacttctgtaaggtatatgtagatgctagattaccttggtgtcaaggaacagatgctatgataagccttgcaaaattgcagttccaattccgtgtatctgcaactttgagcaaataggaaaagattatgagtactgattgatgatgttaggtcgctgcagctaacaagtgtttggtttttagtgactactgtttagtccctgtattttattctattttagtattttaaaaaaaaaaaaaaaaaaaaaaaaaaaaaaaaataagccttgcaaaattgcagttacaaaaaaaaaaaaaaagggcggccgccgactagtgagctcgtcgacccggtgaattaatccggaccggtacc

SEQ ID NO: 40636 - DNA, 399 bp, Zea mays
  Clone ID: MRT4577_137062C.1
ggacccccgcaggcaccggcccggacttactggctcgaccgacccacgcgtacttacgggggcgtgcaccaccatgcgaatttcattttagacaatgtagccattccacggtctaccttcgtggaagagacggcagtgcgtctactgtgcacaagactgagcaacaggcattactgccccgcgggcaacatcgatcgctattcgaccgtgggaccctgcaacaaggcagtggtagccctagtgcacaaagccccgcagatcaacgtcacgcagttcggctacttcaaggtgctcgggaagggtggtgctgccgaccaagcccatcgtcgtcaaggccaagctcatctccaaggtcgccgagatgtagatcaaggccgtcggcggcgcccgtcgtgctca

SEQ ID NO: 40637 - DNA, 1360 bp, Zea mays
  Clone ID: MRT4577_137063C.1
atgtctcaaaaggatctcttagaattgccaacaagcagttcaagacagtcaaaaatgactatgagttgtcactaaacgagaatgctattgttgaagaagcagagggggagactttccttccaccagtgcaatacaaccttgtcaagattgatcagctaggaccatacgtcggtggcagggagcttgtagatattgttggtgtggttcagagcgtatctcccacactcagtgttaggagaaagattgacaacgagacaataccgaagcgtgatattgttgtagcagatgactctggcaaaactgttactatttctctctggaatgatcttgctactacgactggccaagagcttttggacatggttgacagttcgcctgttgttgcgataaagagcctaaaagtatctgacttccaaggcgtgtctctttcaactattggcagaagtactctcgagattaatcctgacctgcctgaggctaagaatctgaagtcctggtatgactctgaaggcaaagatacttcactggcaccaatcagtgcagaagcgggtgccacacgcgctggtggtttcaagtccatgtattctgatagagtttttctgtctcacatcaccagtgatcctgctatgggccaggaaaagcctgttttcttcagtctgtatgccatcataagccacatcaagcctgatcagaatatgtggtaccgtgcttgcacgacctgtaacaagaaggtgactgaagcttttgggtctggatactggtgcgaggggtgccaaaagaattactctgagtgctcgctgagatacatcatggtgatcaagctctccgatcccactggcgaggcttgggtgtctgtgttcaatgagcatgcagagaagatcattggctgcagcgccgacgagcttgatcggatcaggaaagaggagggggacgacagctacgttctcaagctcaaggaagccacctgggttcctcacctgttccgcgtcagtgtcacacagcatgaatacatgaacgagaagaggcagagaatcaccgtgaggggtgaagcaccggtcgacttcgcagctgagtccaagtacttgcttgatgagatcgcgaagctcaccgcttgctagaagacagtctttctggtggctcttgaaggactggccacggatatgtttctctcgcagtttttctcactgggttttagcacttctgtaaggtatatgtagatgctagttacctttgtatgagcaatctgatgtacgatagattgcgcgttctacattattgtgccatgcatccagtctttctgcaatcagatatgtttccgggaattcagtgtcagcttattgtgggctcctattcatcgccc

SEQ ID NO: 40638 - DNA, 293 bp, Zea mays
  Clone ID: MRT4577_137064C.1
cgcacgcgtgcgcgcacgcgtgcgcgccagcatcagaatgtgaaattcaatgaagcgcgaatggaaagaggacacgattcttgtacaaagttacagttgactaccctcacgacacacgcacgcacgagttcatatataattctctcttcaacaagtgaagagtacgcctagcaccatagctaaaccttgtgtagcatctcatccacaacagaggtaagcatctgcgtcagattcattgcttgagctgtaactagactccctggggctgcagcctgccgttcctagatgagatg

SEQ ID NO: 40639 - DNA, 361 bp, Zea mays
  unsure (1)..(361): unsure at all n locations
  Clone ID: MRT4577_137065C.1
cgacgcacgcagagccgcactttacgcgcacactgcaagatttagaaacctgttttttaagagggcatcagcagagcttcccgcttgaaaagtgacatggcgaactcgcggcaggcccagaggacgaggaaaggacgagtcatggagaaggtagcgaaaactggtgactcagacgagctcactggggaggagcgcaacctactgactgttgtattcaagaacgncattggagcccgccatgcctcatggcgcatcatctactccatagagcataaagaggagggtagaggcaatgatgaccgagacacactcatcaaggactaccgaggcaagatcgaaactgagcacaccaaggactgcg

SEQ ID NO: 40640 - DNA, 897 bp, Zea mays
  Clone ID: MRT4577_137066C.1
atggagcgggagcttgagcggctgagttcccatgcggtggtcgtgtggctcgggcgtgaccgccccgacatcagcccggagcgggtgatgcgggccttctgctcccgcttcggggtgaggacagaggacattaaggtggctcgaagccctccgggtgacttcctcgtcaccttcacacaccgccaccaccgggaggcggccgtcgctgcaagagacttcctacacagcaaccttgacttccgcatcaggccatggcagctggtcgccctcggggagcgccatgatctctacttccatgtcagactgtgcttggagggcatccctccccacgcctggaacgaaaacatcgccaagcgctcggtggctcatgcctgcgtccttgactacgtcgaagaagattgtctctcctccaacaaggcggacgcgcgctgcctcaacctgtgggcgtggacgggaaatccgtctgacatccccaagatcgtctggctcaccatcacgggccagcgacgctttctgcctgaccgggtctaccgcaggcgcgcccgttctgccccaccagaaccggggcaacattcacctgccaccatcacgatggatgcaacgccgggggtagctgtgggttcggagacaactcttgtcaccggcatggagaccgctcagcaggctacaactgttttcccagagctaggggagccggccactaccaccgtggcgtccttcatcagcaaccacacctgccctgttgcaccaccactgctccaggagctccatcaagcgccaccaaacctgaagacaaagaagaagcaagctgccagggcgacccgcaagagcatgcggctggcggcgatgcatggccgcgtgggaacatccaggaacgcgcacgccaggtcctgctaa

SEQ ID NO: 40641 - DNA, 578 bp, Zea mays
  unsure (1)..(578): unsure at all n locations
  Clone ID: MRT4577_137067C.1
agcagtggtaacaacgcagagtacgcgggnngaagcttcagcattactnttncaagcatatcatcatagtcgtgcggcgcgtggcggccaaatgatgtaaatgttaaggaatgggagcgcacctgcgaggatccgaaaagtacaaacgagagctcattcaaagacgttcctaagggaatgcagagcttataccgcctaagtaaaaggcgaagaagctgcggtgtagcccctaagggaatgcagagcttacagcgaaaagtcaacgctgagtccgcctaagttaaaaggcgaagaagctccaaagtcgttcctaagggaatgcagagcttacagcgaaaagcaacgctgattccgccaaaagtaaaggcgaagaagctccaaagtcgttcctaagggaatgcagagctaaggtgtgattgtttttaagaaaataatggctatgaatatagcttcggatacgtgtttggccattcatttgcacaacacattacatcatagcatttgcattcataaacattcatctaggcatatgtaggataatcatcttcatcgcataaaatgattgcttcggcaatgag

SEQ ID NO: 40642 - DNA, 349 bp, Zea mays
  Clone ID: MRT4577_137068C.1
accttgattttctttttttttgaggtaccaacacccgtcagaaaactgaccaagaacggacaacgtggcatgcccacacttccgggcggtgttccctctagtggtctatcacaatccatttgtcgcacttagaccgaggtccctagcccacgaaacactggaccttattgctcaacggggaataccctaaccgttcaatgcgcaactcgtcgtatgacgggttgccgtgaaggatctgaatgtctaggaacaagggctggaggtagtcgttacggccaaccgatatccacatgtcctagttgacagggtggcggttgaccacagtttccgctctcattccagatgacag

SEQ ID NO: 40643 - DNA, 286 bp, Zea mays
  Clone ID: MRT4577_137069C.1
ctagaactagtccggacgcgtgggttcaaaatcagttcttcgatcgataagaatggcttgaatggaaggatcatcaggacggacagacttgagtgattccatggagggtatgtggtactcttcctgtacatcagtgcatagtgaccatacaagccattcttatcgatcgaagaactgattttgaattaggtatgttggagagttatgcttccagcattctttccagttctgctgatgccaaagatgtggtaatccaactggccaaactcatatcttcaagaatggg

SEQ ID NO: 40644 - DNA, 361 bp, Zea mays
  Clone ID: MRT4577_13706C.1
ttagaggcctgtccagccgtctcaagccctggggcatttttacagccgattggctttgaatctatcactacttctaccagatcctgaagaacaaggtggcagatataggggttgctggtagcaagaagggccttggggatggcactgccgagatgctttctaggcttggtatggcagctgttgctgtgacaatcaatgttcttctcaccaagccaatatgggttcttgcgactcctatgcacgacacatactctaacccaccgaaacctattggactctaatatggggctgtctctggcagacatgtctcgggctaattcattggatgccgcagcattgaaggataggctggttaaattgg

SEQ ID NO: 40645 - DNA, 788 bp, Zea mays
  Clone ID: MRT4577_137070C.1
ccggccgggagttgcgttcgtcgttcccgttctcctcctcgtatcccctggtccgtacgtcgtggccaccggcgccgcctagctcgcaccgccgacagcgtctcagactagatcgcgcctccccctcccaaatcgggttccagtcgggctcccgcaaccgccgccgtctacaccaggtgccgaggccgatcttttcgtcggcaaagatcgccgagcagatctgcccctggccgtcgccctacaccaggtgccgatatcttcgccagcgaagagcgcccagcaggtacagtgatttgggattctatactacctagctttatgattgcaagacctggttattttcacctgaggttgtgttcaacatgttagtggcatgaaaattgcctcaattgggggcaatggcatctagtacaaaatcagatttagtgtctggtagccctgatgggcatggatacttcaatgcacaacgtgggtcctatgcagctgcttcattggaaaggtcaggaagcttccgtgaaggcggtgatggctatgcgatgttttcagcatcaaactcatcaaggtcagcggcagtgaactctatcaatctagttcagtcacttgcactggacttgagactggcaactgtggatcacaaaacatctcggttagatctagagaaatcaataagttccatttttggaacctctgcagaagatcaacatcacttccatctctagggagaaatttacaaatgctatcgaagagatcagacgtatgaggagtaatcttaacgacaattcaaataa

SEQ ID NO: 40646 - DNA, 725 bp, Zea mays
  Clone ID: MRT4577_137071C.1
cgcagctggtccgcatgctggcgtcctgggcatggcatgtggctagccttggctgctagagcgcagaccggaaccacgctcattgagcactctacggtcatggacaagcgcttcggcccggctatcattgctccggcgcgaatagccaccttcgactcgagcaacgctatggtgcgcgccatcgtctacgacctcgtgctggtgtctctgtacctggcgtgccactggcaacgaccgatggctgaccgacgtgaaccgcaatatccatctgggatcgcgctggcgcggacttccatggtgtgcgcgagagctgcgtcacgggcaggcagcctgtgcctctcgccagccatgatgccagactgaacatccgaggaggcagcccatagttatgcgtgcacggcgacgtgggctgtctacccacacgcgcagctgtgcctgagaagttctacaatcagacaaccaacagctagaagagtctggggacacgctgagctgatttctggggacgggagatagtaacaatgttggctaagcactgtggccggataaaaggagcggccaagaacgaagcgggctcttagacgagcaggacgaggtatacttgggctcatgactggacatgatggccattatatgaacgatcaaccagatgcagttgatgtactaatgcatgagtcaatacacgctgtgcagcaacagcaggtcatgactagagctaaagagct

SEQ ID NO: 40647 - DNA, 229 bp, Zea mays
  unsure (1)..(229): unsure at all n locations
  Clone ID: MRT4577_137072C.1
gcctggntttttttgttgtagtgtggtgttgtgggggggtttgtgttagaggggggacgatnnntaataaaagcaactttattccttttccatctaatttcttttcaatccctccttttttttagatttacatgtaggtcactgtttacatataatntgggtccagaggtataggagacaagnntgcaggaccttggtgctgtgccctgcaaagctgtggcaacctcca

SEQ ID NO: 40648 - DNA, 174 bp, Zea mays
  Clone ID: MRT4577_137073C.1
cagagattatcagtgggcggatgactttcgccctctgttgctattctctgacattcatgagatttgcctacaaggtacaaccccgaaactggcttctgtttgcgtgcatgttgtctataatccgctcagctcattccgggaggacgacttatcaacttcgagatgagtaagcgg

SEQ ID NO: 40649 - DNA, 1645 bp, Zea mays
  Clone ID: MRT4577_137074C.1
attggatttaatccccatggacagcggcacgtccggtcggtcatgcccgctcgcccccgcgtccgcgcactcgtgggcagccccagccccagccccggctccggctccggtcccggcccctacggtggtcgagtggcccgagggcggcgcactgacgcgggactgggtggcggggctggcgtccacgctggactggtgctcgcggcacctccccgcggaccgcctcccggcggtgctcccgcccgcgctggtccagcgcctggtcctggccgccgccgccatcctgcaccgcgagcccaacctcgtccgcgtcgacccgcgccccggccaggccgtcgtcgtcgtcggggacgtccacgggcagctccacgacgtcatcttcctgctccgcgacgccgggttcccgtccgaggaccgcatcttcgtcttcaacggcgattacgtcgaccgcggcgcctggggcctcgagaccttcctcctgctcctcgcctggaaggtgctactcccaaactgtgtgttccttctccggggaaaccacgaatccaagtactgcacgtcagtatatggtttcgagaaggaggtaatgactaaatacaaagatcagggccctcaaatttaccggaagtttttaagatgttttgaggaccttcctctggcgacaataatagcaggatgtgtgtacactgcacacggcggtatcttccgtggaacaattgtagtgccatcaaagaaatcaaaaaagggaaagaagggtcacaaatacaaggcgaattttactgttgatctgacttccatgaaacttggatccttggatgagttattgaaagcaaggagaactgttctcgaccctccttgggaaggctcaaatttgatccctggggatgtgctgtggtctgacccttccttgcagatgggtctttctccgaataaagaacgaggcataggtttgctttggggtcctgatatcactcagcagtttctgaggacaaatcatttgaagctaatcatcaggtcacatgaaggtccagacgcgagagacaagcgacacgatctcttaggaatggataaaggatatacgattgatcatgaagtagaatgtgggaaactaattactctcttcagtgctccggactacccacagtttcaggcttcagaggagcgatacaacaatcgtggagcatatattgtccttagtccacctgattttgctacccctgttttccatagcttcggagctgtaaagcctcgacctgcggcccatccgttctatgattttgaacaagtgatcgactcagatgaagaattggatttaatcgccatggacagcggcacgtcgagcctgtcatgacgactcgccatgtaccttttgcacttagggttgtatttattattatcgctccaattgttgccatggaagcgtggcatcaaggttttttgctgtcgttgttgtaagctaatgccaacgtagtaacgttgcaggtttctggatggcctgagtcctgacatgcacacgccaaatctgatctgttggtttggttgaggttgatttgtatctaaaactaagtgagcgtgagatgtcatctaaaaaaaaaaaaaaaaaaacggtaaaaaaaaaaaaaaaaaaaaaaaaaaataaaaaataaaa

SEQ ID NO: 40650 - DNA, 274 bp, Zea mays
  Clone ID: MRT4577_137075C.1
gaaacgtggtgatattcctcttcaaccggggctatgagaaccaggactggtccaaggacatgcgcttcaagacctaagtaacggacgtggagggtagccttgctttggacctgttcaacaagggcagtttgttagacatgaagcactacctagatcagtacgacccttggaaggtggtgccgttcaaccagttttactgcacgagtctttgctgggtaccctgagcgaccacttgttcatgggcttacgatgcatgcgtatggtgaacaacatg

SEQ ID NO: 40651 - DNA, 558 bp, Zea mays
  Clone ID: MRT4577_137076C.1
ggccgctttttttttttttttttctttttttttttttttttttttttttttttccatttatctttttttcataccactatataattaattattaagcagggcgctcggtttcaaggaccatcattaatgacccttgcaccaatcaccatgcaatcgctactacgggcggtgggtcatagaccacgcgtgtgacccggggatcaaacacctggcacatgcaggacggccgcatggcggtgcacgcacaccgctctgggcttgtgattagatgggggggcctccagcttactgctaaatgccgacctccaacaacccttactcggtggagcatggccgagacgggccaaatcaggttcatacggacgccacctagtaacctccccatacgggaaacaggccagagaatgcctaggccagtgaatacttgacccattattcaattgcctaaagaaggggcagacgcctgtacttcctgacgcaagacatctctcacgcgagccatcaacggatgatggactatgccttttccgtgccccatacggggcaggccccaaacgc

SEQ ID NO: 40652 - DNA, 237 bp, Zea mays
  Clone ID: MRT4577_137077C.1
cgcctggcaaagtggtatatgcagttcgatgatgacgagaagcagaagttgatcgaggaagtgcacgccgtggtcaccgtcatggatgccaagcacaccaactttgtggaactccggaacttctagatcatctaccgtcgctacgctggcctctacttctgcatctgcgttgacgtcaacgacaacaatctggcctatcttgaggccatccacaacttgtagaagtgttaaatgaat

SEQ ID NO: 40653 - DNA, 514 bp, Zea mays
  unsure (1)..(514): unsure at all n locations
  Clone ID: MRT4577_137078C.1
tttagnagcggcaagaagcggccggcgcacgcaaagacgtgcccctacttcgacgagctggacaggctctactcccgctcgggccactcggcggcggcggcgcgcgacggcgaggccaatgccgggggaggcgaggccaagcaggcgagctcggagctgctggacgcggtggtcaagtaccccgacgtgcgctacggcccgccggggttcgggatggacagggagcaggtctccggcggcaataacaacgctaataatgaaggtggagaggacgatggcgacggggaggaggacggcattggcaagggcagggccggcgatgatcaggacgacgacgaggtggacagccatggccacgatgatgagtagctagagctacagtacccccacacctctctctctctttctaaccgttgatgatgagtagctagctagctgcattgcattgcattgcattgcatgcatggcaatggcgtttgtgccatggatatggatgcgagcccagggacggacg

SEQ ID NO: 40654 - DNA, 692 bp, Zea mays
  Clone ID: MRT4577_137079C.1
ccggccggggtaatacccggcccccatccataccggctcgatcgaggcttctggctccggcagccgtcaccgatcattcattccctttgcctctactccttctgctggcttgttcaatagctgattgagaaacggcggacgacgacgactctagtgtgctgcaatagctgagatcgtccgtggcgcggcggggccgggggaccaagtgccgcaggagcaggaggggtgggtgatctgcagggtgttcaagaagaagaacctcgtgcaccacggcgccgcccagagcggcggcggcggcggtacggcggcggcggcgtccaagatggagagcagcccgaccagcaccaccatcatcggcgaccatgccagcgacgacgcgctcgaccacatcctgcagtacatgggcggcggcgacaccaagccggcgctgctgaaccaccacaaccaacacctcgctgccgcggcagatgctactactactacgaccgccgcgtgtcctgccgccgccacaagcgccggcctctacgggaacaacaagttcatgaagctcccgcccctcgagcacgccggcggcgggctgccgccgagcccggggccgtgcgagtacggcgcctcggggatcgccgactgggacgccctggaccggctcgccgcctacgagctcaacggcctctccgacgcgttcaagaaca

SEQ ID NO: 40655 - DNA, 192 bp, Zea mays
  Clone ID: MRT4577_13707C.1
tatacacgtaagaacacccgacacgagctgggtggaattacaacggctcatagctggctgcgaagtggatctgaggggtaggtgggagctctcagctggagatgaatggaaagcgacccggcagggtggcacactgcattaatcgagagcatacatgtgagggataggtacacgaatgaaccactggcaaat

SEQ ID NO: 40656 - DNA, 385 bp, Zea mays
  Clone ID: MRT4577_137080C.1
gttaccgcaaccattttcccacattgctcacaagctcctatagctcaccttcttaccccatacctctcaccagcggtgccttcaatgtgtgtaaacccaggcgcccaaccctacaggatccaacaggcactctgaacaggcatcttaccattgtcacccttgtggctgcaacagccgccagccctattacagcacttaccttgggttcatttgctggcacaacacatccgggcgcagctgctacaacaactcgtgctagctaaccttgctgcatactctgagcaacatcagttgctgccattcaaccaactggctgcattgaactgtgctgcttatttgcaacaacaattaccattcagccagctagttgctgcctacccccagc

SEQ ID NO: 40657 - DNA, 435 bp, Zea mays
  Clone ID: MRT4577_137081C.1
cgtcactgccatccccgcgctgcactgccccggatcgctcatgtacctcttccgcggagacctggggtgcatgctgtacacgggggacttccggtgggagctcggatgcgatgaagcgcggcgagcgaagcaggatttactggacgcgcttgacggggataccattgatgtgctctatctggacaacacctactgccacccatcgctcaacttccctccacgccccgtcgtcgctgagcaggtgattgatattattcggtcacatcctgatcacgaagttatcattggtgttgacactcttggaaaagaagacctcttgcttcatatatctagagcactacaaacgaagggatcttgccttctgctattccttgtctttggaagagcagtgaaggaaaggccaaatccaagggtaggttatctgtgaagtgtatc

SEQ ID NO: 40658 - DNA, 292 bp, Zea mays
  unsure (1)..(292): unsure at all n locations
  Clone ID: MRT4577_137082C.1
ganacagcaagcttacccagattctcagcgactcgctcggcgatggttcgaaagttgtaatggtggtgcacgtcagcctatccgaggacgacgtcggcgagacggtctgctcgctgaacctggcgaaacgagccagatcgatcgagtccaacagagaaatcccacaggatctgaaaacgctgaagcagaagaggctcgcggagctggacagggagatccgcgccgccgaggaagagctgaagcgtctcgacgaggagataaggagagcggaggagaaggagatctcactcga

SEQ ID NO: 40659 - DNA, 187 bp, Zea mays
  Clone ID: MRT4577_137083C.1
atggggaacgcggacgctgagtccggccgaattcgccgacagcgtcgccaccgccgctttttttacacatttgcatttcttggaagcgctatctgatggtttgcctctaaagacttttacctcttgtgaatcgcttgcagctagaccattatggctgcaggcttgctacagttccacagttacaaga

SEQ ID NO: 40660 - DNA, 1880 bp, Zea mays
  Clone ID: MRT4577_137084C.1
gagacggcgaggtgagttctggagacttggagaggcattccgcatcggtatcccgtatccagcaaaggcggcgagccatggaggagggtctggtatcagtggacaagttctccggtggcagccaggcgtactttctgacgcacctccaccaggaccacacccgtggcctcggcgcggtgggcgggtggcgccacggcccgctctactgctctccgaccacggcgcgcctcctccccatccgcttcccgggaatcgacgcctccctcctccgcccgctagccccaggtgcctctgcctccatctctctgttctctccctcctcgggccagtccctctcccttcacgtcactgccatccccgcgctgcactgccccggatcgctcatgtacctcttccgcggagacctcgggtgcatgctgtacacgggggacttccggtgggagctcggatgcgatgaagcgcggcgagcgaagcaggatttactggacgcgcttgacggggataccattgatgtgctctatctggacaacacctactgccacccatcgctcaacttccctccacgccccgtcgtcgctgagcaggtgattgatattattcggtcacatcctgatcacgaagttatcattggtgttgacactcttggaaaagaagacctcttgcttcatatatctagagcactacaaacgaagatctgggtttggccccagcgcctacagacaatacacctcctagggattgatgaaaaccgtgatatttttaccacacagaccagtttgactaggatccgtgctgttccaaggtacagtgtcaccattgataatcttgaagctctaaacacagtgtgccccactatagggatcttgccttctgctattccttgtctttggaagagcagtgaaggaaaggccaaatccaagggtaggtcatcagtgaagtctatcaggagctcagggagaggtgaaggcctaacagaaatggattgcaatcccttgtcaccaccaaagctgtttgacaaggattcttatactttgccatattctgagcatgcttgcttttcagagctggaggattttatgcatacagtgcgtccatggacagtcagcggcatcgtcagctcatcgttctgctatgtgaatccccgtcaccacttcagacatctttgtttagacaataatgttaatgatgaaactgacatgacgcccataaaaaataagggcagggataatgataagctgacaccaaagagatggcgaaatggttctgtgactccaaaagaaaggaaggtcaggatctccagttcaagtctgtatagaagcaaagttacaatgaaacggaaggagtgctgcggtgcaaggatcaatgacactgaagaacacattggtgttacctgacttgtcgctttccaagtgatgttatgttttcttttgtaaagattaacaactggatggtggaagtcttgaagcaatgagatgggatatgctgttccaagccaaacttcagcttgctggtcaggaatctggacgtggtctttggctctctgctatctgttccttagaaccctgtcgtgctagcaagatgcattttggtccagattcggtttgggttgtacagtgctgttccttttgcgatggtgttcagtatttagattgctgaaaccttttatgcatgttagttgctagttgcctgatacatctatttgtagtattttcatatgtctgtgacatgatgtcgcgcttcaaataataaagttcaaaaaaagtgccggccctggcgggggtcgaacagtgcccccgaccagggccccagattaatggggccccattttaaatcctaaaaaaaaaaaaccaaaaaaaaaaaaaaaaaaaaaaaaaaaaaaa

SEQ ID NO: 40661 - DNA, 506 bp, Zea mays
  Clone ID: MRT4577_137085C.1
gtcgatacctctgtaagatagcggcctgcattcccctatgatgccctcccacccgatgctatctacgcactgcggggctttaacggctcactgattgaaagccaagctgatggcctctgatgatatcacatgccattgcattggccatctatgagagactgatggatcaggccgtactgcacgtactatgacacaccacactaccaacaacatggctatgcctgccccaagccacacacaagcatgtgcactgatacatgagcctcttacccactatactgcacctaacaatgacatagctagaaagcttcattataacgacatacctatgactgaaagcataggtactgatgcggagagcatattagccaatccagatatgcctcctatataaagctcaactaaactgctgacaaaacatgatcatgcattactagatgcattgggcatactactggaatcatctcatagcgattgcggaaactgaagatatgactatgctagac

SEQ ID NO: 40662 - DNA, 285 bp, Zea mays
  Clone ID: MRT4577_137086C.1
aacggggcaatttcaaattcaagagctttttttgaacaaacaaatgctggttttaaaaaaatctcacctacctacagggttttttgatcgccccattaatcgggattaaacgactggtcgtgatcacccatcccaaaaggggtccccccccgatcagggggatcaaaaacctgatcgtccgattaggcgacaactaatcgcgattagtcctcccactaaaaccgggacaaacagtttggcctggtttgttacttaatttcggcccactcactggatgcatttttt

SEQ ID NO: 40663 - DNA, 361 bp, Zea mays
  Clone ID: MRT4577_137087C.1
agctcataattctgctcgaggacccatacaacacctcatgcacaacccacacacagccgccccagggtgggatttttaaaaacgccgggggaccacatcaaaccccgggcgaaacttaaacaccaatacgtactccaaacaaaaccctcggctccccaactaatcagccaccgatcgaggagcttcacctacatgccggaggcacaaccccacgaaaaccatcccagacacttttaagccaaccccaaacagaccactacacgccccaaaaaagaaaatacctctccaacacccagcccaaccacacacatgaaccccctctcaacacaccacagaccttacccttccccaaacatcacca

SEQ ID NO: 40664 - DNA, 435 bp, Zea mays
  Clone ID: MRT4577_137088C.1
cagttctattgatcctcttattcaggcgaacactggatgcaaagcgagttcatcactataatatatgaaagggatcctgccgaatgatgagacatgtccataggcattttgaatagtaccgtgtaccagacagtgaaccgtacatactaccctttggagctcataatactgtgatgatggttggcctggatggcagcttctacaggtgcagcttcgaccaagtgaacggagggcagatgttgcagaaggagtatttccggtttctcaagtccgacagcccaccattgaggagcgcagccatctgacctacctctctcaccctgtaaataccgaaggcagcgggaataaggaggagctggccgtgtcggatcgccgcaacccacaggatttcaacattgaaatttctggaagcggtggtgtcccatccaagttgca

SEQ ID NO: 40665 - DNA, 107 bp, Zea mays
  Clone ID: MRT4577_137089C.1
gtggagacgctgcctcacccaaagacttttcccttccagactttgagtgtcttcccttctagactttcccatctcctggtgagatgtttcccacttatgccgtggtc

SEQ ID NO: 40666 - DNA, 479 bp, Zea mays
  Clone ID: MRT4577_13708C.1
tttttttttttttttttattaagaaagatatgactaaatatatttctcttaaattttctcgtcctcataaattccagaataaggacaagacgtcaagtcttgtgataatatttctaatttattcactaaattctaatcgatgcgaccacgtgccttgcggacccatgaggatatgagtatgacgcttttggtagtacgtactacgtactgacgtgggcggtaaattcaggctgcccgcctcctcgacgcgcttctgcttttccgggaagctgccggctggagcaaggagacacgccgagatccgcaccggccgcgcggcctctccaccggccgtacatgtggctcggccgcggcgcgatgcctggcagattcgccgaccgaggcaggcgccacgagaccccatctggcagtcgtcacgtacgtacgactacgagaaaagtcggcgccctgccactgcgtgtcaaaaccgcgtcatcgcc

SEQ ID NO: 40667 - DNA, 610 bp, Zea mays
  Clone ID: MRT4577_137090C.1
cggacgcgtgggtacggccgtaggcgcgcttggtgacgtgggcgctgtcccagatctagtggaggaggaggaggtacctgtcgacacgcccgccaagtgtttgatgagagtcctcaaccgcagcgactactacgtttccaaccgtggcgactactacggtccatacacttcctccaccgtcgacgcggcggcggtgctgctcgccgacgcggccgaggctcgactcgactggcgcttcgccaagctgccgcagccgcaagctgaggaggtggacgagccgttccgcgacgtggcgaaccctccgtcgcatccttccatcgtctacgagtcgtaccgcgacgcggccgaggctcgactcgactggcgcttcgccaagctgctgcagccgcaagctgaggaggtggacgagccgttccgcgacgtggcgaaccctccgtcgcatccttccatcgtctacgaatcgtaccgcgacgaggccatggcgggagccagtgctagagcgcttgctggccgttgcaacgagcggtccgcaaggggacgcaattcctccctccgacgacagatccgagcaatcctacctcacgcccacctgtgaggccccccacagggc

SEQ ID NO: 40668 - DNA, 1958 bp, Zea mays
  Clone ID: MRT4577_137091C.1
ttgggtacctcgaggccggccgggccccgactcttccatccctctctgcccttcccctgcccgccgatcgcttgccccactcccttgcttccgtggcgcacacgccgcgcacgcgtgctcgcctctcctggaaccgtctccgccgccctcccgcgtcggcgtcgcggcgcaagagggtaccctgaatttcgtcagtgccaagtgacgaccgcttttgcccatttgtgatagctgaatctctgtggttcaaaggcgattgatttgggtttgctgacgcacgcctaatgagctcccaagtctccacatcacacggtcttcatcccccggggaagcttgggacatttgagtcgccccatgcctggccgctgtcagcgcctacggcccagcccgaagcgggacgcggtgatgaccaggaggtcaggctgttgtcggtcgcctggaaccaagattgcggatgcttcgcggctggtaccagcaatgggtttaggatatttaactgcgaccctttcaaggagactttcaggagggatcttaagagcggcggtttcgggatcgtcgagatgttgttccgttgcaacatccttgcccttgtaggaggcggctccaatgtgcagtacccgccgaacaaggtgatgatctgggatgaccaccagagccgttgcattggagagtttgccttccgctcagatgtccgagccgtaaagttggcgaaggactacatcgtgattgtcctcgagcgcaagatattcgtctacaactttactgatttgaagctgctctaccagattgacaccctgtcaaatcccaagggactttgctgtctctctcataattccaatacttcagtattggcctgccctggggtgcaccagggtcatgttcgcgtggagcatttcgggctgaagatggcgaagacaatctcagctcatgattcacacatctcttgcatgtcactgacaatggatggtctcctactggcaacagctagcaccaagggcactttgatcagaatattcaacacaatggatggcactcgcctacaagaggtacgcagagggcttgacagagcagaaatatatagcattgcagtgtcgcccaatgtgcagtggttggcagtgtccagcgacaaaggtactgttcatattttctccctgagagtcagagttgctggggaggatgcaatcaatgagcaacgcactgctgaaagtccacggatggatcaccagagctcttccagttctattgatcctcttattcaggcgaacactggatccaatgcgagttcatcactgtcatttatgagagggatcctgccgaagtatttcagttcagagtggtcatttgctcagttccatttaccagaagtcacccgttacatagtagcctttggtgctcagaatactgtaatgatggttggcctggatggcagcttctacaggtgcagcttcgaccaagtgaacggagggcagatgttacagaaggagtatttccggtttctcaagtccgacagcccacctttaaggagcgcagccatctgacctacctctctcaccctgtaaataccgaaggttgtgcccggtccattgtacatatcaccatcttctcgccggctaaagttattacaggcagcgggaataaggaggagctggccgtgtcggatcgccgcaacccacaggattccaacattgaagtttctggagcggttggtgtcccatccaagttgcaagcatcatttgccatctctcttctttcttctagcgagaaccacaaccacccattggtacactacatataacgtaaaaagttcgataacgaatttgaccgtgtggtctgcaatgccgtgtaagaaatctccgacttgttcttgcctttggcttgttgatcttgatgatgactggctgcgcaagtgcaatctggttctgcgtgttgtgaaaaaaaaaaaaaaaaaaaaacacaac

SEQ ID NO: 40669 - DNA, 557 bp, Zea mays
  Clone ID: MRT4577_137092C.1
gccggccggtccgggatcagattaggcgtggaattgtggcggcggcggccgtatcctcccgagctgctccctaggcggcggccggtcctctacaggcggctccccagcggctacccagtcggcggtcgggactcccaagacgccgctcgtcttcctccccaggcgccaggcggccgcggctcgtgttcgtcccccggcagccacgcctcctgttcctccccaggcgtcaggcggccgtgtcctccccagccgtcggttcttgacttcataggtttcctctggacctcatgtgcatggctgcttgctgatttttagatagcatcacgttctgtcccctagcaaattagtctctatgcctatgtgtcacaaggaggaacaaagggctttaatgggaatcagctttagatttgcttgttcgttgccttcattgtttggtgcctggaaaaaggaagtgtgcctccattattagctagcacttattctgttaagattcgaaatggattcaattgaaaatattggacgcatagcaagaaaaaaaaaaaaaaaaaaggccccta

SEQ ID NO: 40670 - DNA, 340 bp, Zea mays
  Clone ID: MRT4577_137093C.1
ttatctagctaactcttacttttttcgctagtttttctattaagggtcccataccctcacttttcttctttttgttcattatcttcaactccattttccttccttctaatataaattacaatcatatttcacaaacttcccataccaccttctacaaatattcttattctaccttcacaatttaatgaacttatccttatttaaacctctacaatcaaaactatataactatcacaacaacttttatcacttcacttttcaacaataactctaactacatttccttctactatctccctttcaacaattatcctcaattcttcattaatctaaccataac

SEQ ID NO: 40671 - DNA, 533 bp, Zea mays
  Clone ID: MRT4577_137094C.1
taacggtcatattttatactgtcagtgtatgggctacataatgatgcaattaaagacggtgatcaagtggtattatttgaaccatactaccgaatccttgatgcatcatgtaaagacaaggtaaacctttggtatcatgaattctacctccaatcacaccatcacctcagcactatcagttcaaatcaatacgagtggactttccagaacaaattctagttaacgagagagttccagcacctcatcatgttgcacgggcatcaatccatgcacacaacaaatcttgaccggtgaaaatttggtattgtgatttagttggtagccagtacttattttgtttttgatgtttattagacttattacaggaaaaccattctgcaagtttttatcagggtactgtgtggcgtcaataccgtgagcaactgccagctgggcatatcatgtgtactcgcgtaaatgtgtagtgacatgttaccctatggctcaaaatgtgtaaggaagacttgggaacatattaaccatctcatttctcc

SEQ ID NO: 40672 - DNA, 2089 bp, Zea mays
  Clone ID: MRT4577_137095C.1
atttgaacataacatgtcttgtattgtatcacattcacagaatggttgtgcatatttgttgataatgggaaacttaatatgttcatgaggtttgtcggttgtcaaactaactgttagaattgggccaactgatgtattcctaggcccaaaggctcatagtcatatatacaatgttacacgtgggcaaagcagccctttaaccctccaagtagaggaaaaatatataacatctatacatcttaacacccttcttcagactcatggtggatctataactataacattgagtttggacagtaggaatctatgatgtgccccaggtttatgccttagtaaagaaatcagctaaaagaaccactgaaggcacatggtggagcgtgaaggcacatggtggagcgtcattacaaggggtcaagcagtctcattagctacctcgaggccggccgggtaccggtccggccgtctcgactgccccagtcctttctcagatccatgtctacccagaatctgctaactggcgcgtgcacgagctccgccccggccccgtccgaggcggaggaaggggacaggacgcctttggctgacgctgcgaacgcggcggaagagctgtaccgcctccgtgacacctttttcccgcgggacccttccgagaaagtcgccgcactccgcgcccgcgccgacgccgccctcgcgctcctcgacgccttcccgtccgaacaaaagaagtctcgacaactgcgtggtgtttatgaatttttgaggggaaaaatactggatgtctttcctgattatcataaggaggctgaagatcatttatccaaagcagtaaagttgaacccatctcttgtagatgcatggttatgtttgggtaactgcatttggaagaagggggatctatctgcagcaaagaattgtttttcattagcactaagcaagggttcagataagaaaatactgtgccagatctccatgcttgaaagaagtatggctcaaggtagtgtagaccaggcgcttttagtagaagagagcattaagcatgcaaaagaagctattatgctggacattagagatggcaattcttggtataatatgggcaatgcttatctcactagcttctttgtgggaggagcctgggatcacactaagcttcatcattcagtgaaagcatatcaaaatgctgagaaggataaaactatgaatttaaatccagacctctactataattgggccacagcagacaaatatttagagaattatgaaagggcccttcgtggttttgaagttgcagctttaaaagatcccgggcttggtgctaatacagaagttcagaagatcatcagtctccttgataagcttgataatgcaatgaagggacaattacgatccaaaagattagcatcatttgtgtcatccttgagtggagtcaaattgaaatcatcgcacaagaaagccaccataagcactctatcagtgggtttgaacaaagccgttgctgttttgggaaaagtaattctgttcataagacatgacaatgttgctccgctgtattatttaatatgtgacttggaacggtcatattttatactgtcagtgtatgggctacataatgatgcaattaaagacggtgatcaagtggtattatttgaaccatactaccgaatccttgatgcatcatgtaaagacaagcactatcagttcaaatcaatacgagtggactttccagaacaaattctagttaacgagagagttccagcacctcatcatgttgcacgggcatcaatccatgcacacaacaaatcttgaccggtgaaaatttggtattgtgatttagttggtagccagtacttattttgtttttgatgtttattagacttattacaggaaaaccattctgcaagtttttatcagggtactgtgtggcgtcaataccgtgagcaactgccagctgggcatatcatgtgtactcgcgtaaatgtgtagtgacatgttaccctatggctcaaaatgtgtaaggaagacttgggaacatattaaccatctcatttctccaatattcgttaaaaaaagggcggccgccaccgcggtggag

SEQ ID NO: 40673 - DNA, 813 bp, Zea mays
  Clone ID: MRT4577_137096C.1
ggagaaatgagatggttaatatgttcccaagtcttccttacacattttgagccatagggtaacatgtcactacacatttacgcgagtacacatgatatgcccagctggcagttgctcacggtattgacgccacacagtaccctgataaaaacttgcagaatggttttccggtcaagatttgttgtgtgcatggattgatgcccgtgcaacatgatgaggtgctggaactctctcgttaactagaatttgttctggaaagtccactcgtattgatttgaactgatagtgcttgtctttacatgatgcatcaaggattcggtagtatggttcaaataataccacttgatcaccgtctttaatcttcgatcgtcctggctgatcatcacagccaggccggtgacgatgattgcccttccccctacgccttgcgatctctctcctgttcctctcatccacttgtctctcccctgcgtactctgcatcattatgtagcccatacactgacagtataaaataagaccgttccaagtcacatattaaataatacaacggagcaacattgtcatgtcttatgaacagaattacttttcccaaaacagcaacggctttgttcaaacccactgatagagtgcttatggtggctttcttgtgcgatgatttcaatttgactccactcaaggatgacacaaatgatgctaatcttttggatcgtaattgtcccttcattgcattatcaagcttatcaaggagactgatgatcttctgaacttctgtattagaccaaagcccgggatcttttaagctgcaactcaa

SEQ ID NO: 40674 - DNA, 260 bp, Zea mays
  Clone ID: MRT4577_137097C.1
tttttggcccaccctaaaaaaatttttctttttagcttccccaatggcaatgtcaaaccggctttttccccaccaccaaaaaaaacttgggggactgaaaccgatttttttgttttccggggggataaaacacctttcgaaagcctgacctttgtttgtgaaaacttgtttccacccttccaaaagtaggggggctgcatcaagggggagggtttgggcttagcatgggcgcccccttggttctgaaccttcaacccttt

SEQ ID NO: 40675 - DNA, 142 bp, Zea mays
  Clone ID: MRT4577_137098C.1
ctccagggtagtcgcacgactatagtcgtcatgggggtaacgacgttaggcatggcgactgaccgtgattagatgatgcggttgaacgcgcgtcgcacttttgggatccagggccagcggtatggcgcttgtgcatattgac

SEQ ID NO: 40676 - DNA, 225 bp, Zea mays
  Clone ID: MRT4577_137099C.1
agatgacctgatcaatctctccttttgtaataattacaataattaccctgcatgtacgtacgtacggccggcgatgggatgacctgctcccggtaaggtaacatcgcatcgcatgcaatgcaagtacgtgttgtgttaactacagcagttaattagcgcgatggagtagtgaactagtgacatactgtactagataggcgcggcgtacactgtactgtatatgtt

SEQ ID NO: 40677 - DNA, 307 bp, Zea mays
  unsure (1)..(307): unsure at all n locations
  Clone ID: MRT4577_13709C.1
ccgctcgcgagctagaactagcgcgagcggccgcccgggggggggggtgctttctttctcttggttgcgccgtcttcgtgcctgaattatgttccgcgcntgggccccgctgggggcgngactgctttttttttttgtgtgttngcccctcttccgcgggggtgttgggggggctctcntcccccttggacctgggtttctcttgtgctgggcttcgtccgccttcgggtcccgggcctctggggtcttttgtttgtggtggccacgcccggcctccccgggctccgtgtgttcntctttgctctgg

SEQ ID NO: 40678 - DNA, 456 bp, Zea mays
  Clone ID: MRT4577_1370C.1
agagataaaaaaaaagaaaaaacgttttattttggacagaattgaataggccaagactcaagagaacactacccagcaccgcctggccatccactgtgatttgacggaaggggcctctgcgcaagctgctatctaattaaagccaaccatggaccgccgagcccccggagtacttgttgctccttcccctcatcacgataccgctcatcgacttcctcgtcctgacccgccgaaggtatgaccagcggcgcttcccaccggagctgtgggcgatgccggtcatcggccacctgcaccacctcgccggcgcgccacagcaccgtgacctgcgtgacattgtgagggggcacggcccgctcatgacgctccgcttctgggagctgcgcccacggggtcgcctcgtagccggacgccgggaggcagatgttgaggaaccacaaccgggacttccgcgtc

SEQ ID NO: 40679 - DNA, 535 bp, Zea mays
  unsure (1)..(535): unsure at all n locations
  Clone ID: MRT4577_137100C.1
ccgggcctagtatattccattgttcgcctcctttctggacctgtaggggtccgtgctcgatccgatccggcgagtgcacaccatctttccgcactacgatcgaatccatggcctgccggggacgagaagacgatgataactctcttaaaagctacgatggacacgagttcgaggtggaagaggcggggggaatgtagtatcagaccatccgccacatgatctaggatgattgagcatctgcgggatttctgttcctaacgtaaactccaatatcctataacaggtaatctagtactgcaacaagctcgtacatgcgcgccttctgcagggccgccggctcctggggcagatctgcgacttgggtgctcgctacgataacagctccacgcgtctcaggtgtggaccttaagaactgtgatgcgcacttggttaaaggcgaacagcccacgcttttctganctatgtaggatggacactatctgaacatcaagggtatgttgcgactgtcctgtcacactgttgctcacatgatcaa

SEQ ID NO: 40680 - DNA, 1857 bp, Zea mays
  Clone ID: MRT4577_137101C.1
tgccaacaatccagagctcaactggatttcccgtgtattaaagttgagcttgaatgatctaccaagttatcttaggagctgcttcctatactgcagcatctttcctgaagattacaagattagaagaaagatgatttccaagctatggatagcggaaggtcttgtggaagagagaggagacggaacaacgatggaggaagttgccgagtgttaccttatggagctcactcaacgttctctttttgaggtcacagaaaggaaaacatgtggaagagctagaacatttctgatgcatgatcttgtgcgagaggtaacttcaatcattgctaaaaaggagaagtttagcattgcacttgcacatggtggtgccagtacaacccaagttgcccatgaagcacgccgcctatgcatccaaagaggtgcgcagaccattaattctttaagaagctcgcggcttcgctcattcattttgtttgacgctgaagtaccatgttcttggatacatgatactgtatcatgtttcagactactgagagttctatgcctaagatttgtcaatgttgaacaagttccaagtgtagtcacagaactgtataacttgcgttatctagatatgtcatacacaaaagtgaagacggtccctgcatcgtttggaaagctcgttaacctacaatctttggatcttagagagacctacgtggaggagttaccactggaaataactaggctaactaaattacggcagttacaggtgtatgcactctatgatattctacaaagatcatcgaaatttctcagtgctacaaaaattcctggtaacatttgtcatctaaaggatctccaaactttgcatgttgtttcagccaataaagttttggtttcacagctggggaacttgaagttaatgagaagtttggctatcgcggaagtgcaacaaagctacattgcagaattatgcaactcgctgacaaagatgactaacctgaaaacactatttatttccacgtgcaatgtgaatgagactctcgacatagaaatgctaaagccgctgccaaatctgacatcatttctcctatcaggaaagttggagagaggcttgcccccgtcgatattttctatgaatttaaaacagttaaaattgttcgggtctagtctgaagaaggatcctgttagctcgttctctcatatgctaaatcttgttaatctattcctcactggagcatatgatggggaacagctaactttttgcaccagatggttccccaatctcaaatatctgcaattagctgatatggaacatctgaattggattgagctagaggatggaacaatgatgaatctacaatatttgtcacttgctggtttaaggaatctaaaggctgtacctgagggcatcaagtacattagggcactccatgagatgcttctgacagatatgccaaatgagttcatgctaaaactgcatggaagtgacaatcacattgttcaacacatacccaacataaaaaagtatgactcttctgattctcaagcagtaaacaacctggcttatctgccgtggcttgccaataagtttggtcctggtgctgcaattaagtatgcctccataaactgtggctcatctggctcttgacggttcattgggagttgtttgtgccaatgctagtcgttttaagtcttaagagtcatcaatatgtagatgtaggtctacatcttggtgccactggatgagctaattgtttctattttgtaccctgtccaataatgtataagagcacaggcatggcaaactatctctaagagatttttaatgattttttttctcaaagcaaaaaaaaaaaaaaaaaaggggcggcc

SEQ ID NO: 40681 - DNA, 388 bp, Zea mays
  Clone ID: MRT4577_137102C.1
aaatcaatctgcatgagctccatctttgttgaagaaaagatagttcatccaaggcgcccaacagtatgaatggctctattattgtgaatagcatatatacatagtgtcaacataaggcaattttgaatgataacatagaccattaaaaggcaattggtttcatctgtctcgtcctcatcggaatcatcagtctcgtcctcatcagaatcatccatgggctggctgcctctcgtgcccaggctcggacgcgttcagctggacgcgacgaagccgatgctgaacccgaacgagatgcagctcagctcctcgttgtcgtccccgacaatcttcatgtagatcgtgtaggagccctgttcggaagctccgtgatttcctaggaggcgagaga

SEQ ID NO: 40682 - DNA, 1670 bp, Zea mays
  Clone ID: MRT4577_137103C.1
ccctctcgttcgcccaatccaccaccaccaacggcgccgcaacccccacgcaatctcaccggaaaaacgcctcctccagttgagctgagcctgagctgcagctgagccgccatgtgcccgcggacccactgagccaaaacccctcgaccccgcccccactgcaggccgttccctttccaagatccgcgctttgatccgtccgccgccgcccgagaccatgccggccacggacctccagggctcctccccgttctcctccttcggccgcaccctcctctccctccgccgcgacgccccggcgtccgcgtccgcggcggctgcgatgccgccgcccggcgtcgacccggagctcgaggagttccacgcccacgtcgccgcgcacctcgcggacctgagcggccccggcgctgctggggaggaggagttcatgtccatcgcgtggatccggcgcctgctggaggcgttcctgctctgccaggaggagttccgggtggcggtggccgaggcgcgccgccgccgcgccggggccactccccccgccgccgagaggctggtggccgagttcggcgaccgcgccgtcaaggtcctcgacgtctgcaacgcggcgcgcgacggcgtcgaccaagcgcgccgctgggagcgcctcgcgggcatcgcggcgtccgcgctgctggcgcccgccgacggccagatccacgagggccagctccgtcgcgcgcggaaggcgctctcggacctctccgtgctcctcatcgacgacgccgcagccgccgccgccacggggcccgccggcgggctcgcctcgatcctcgcgtcccaccgcaaccgctccttcggccgcgcgcgggcgtcgccgtcccgcgccgcctcctcctcctcgtcgtcctcgtcgccctccgcgcacttccgctcgctctcgtggagcgtgtcccgcacctggtccgcggcgcgccagctacaggccatcggggccggcctggccgcgccgcgcgccagcgaggcctcctggagcctcgccgcgccggcgtacgccatgggctgcctgctccacctcgccgcctgggcgctcgtcgccgccgtcccctgcccggaccgtgccgccgcgctccaggcgcaccacctgccggccgcgccgccgcgcgccgcgttcccctgggcgccgccgctcctcgcgctccaggaacgcctcgccgaggaggggaagcgcaaggaccgccgcaattcgtgcggcctgctcagggaaatccacgcgctggagaagtgcgcgcagaggctcgcggaggccatcgatgccgcgccggtcccactcaccggcgagcgggaggccgaggtgcgggaggctgcagcccaactcgccgccgcctgctccgccatgaaggacgggctggacccgctggagcggacgcgtggggaggtcttccaccgcatcgtgcgcagccgaatggagggtctcgattcaccgatgcccaatgccgattgagctcaatcaacatgatcatcatcatcttgcctttagatttcccaatgtggcggtgctaggtagctatcttttttcgctcgctcttgtgatcagctagtggtaagtataaaatgtgtgtccttgtgtaaaggattacagaaaaagggagagggaaggtgtcatctttaggtaaagatggttcctttattcc

SEQ ID NO: 40683 - DNA, 663 bp, Zea mays
  unsure (1)..(663): unsure at all n locations
  Clone ID: MRT4577_137104C.1
tgcgtttcgctcagaggcgcggcnncgggccgggaaataaaaaaaaaaaaaaaaaaaaaaaaaaaaaaaaaaaaaaaaaaaaaaaaaaaaaaaaaaaaaaaaaaaaaaaaaaaaaaaaaatcccccccttttttggaaaccaactatccaacgttaaaaagcaaaatttggggccccaaaagggccccccaaaatattttggcccccttatgccccttggaggtttccggaaagggtgctaaggggaccattttcccctaatggccacaaacccctaaaagttccctttttccctcggaccaaacccaagggggggtttcggggggggaaaacccaatttttcaaccctaaaggaaccaaaagggaattggagcgggcattttacctttatcccccttggtcccccaaaaatggtgcccccttttacacaaattaccttggggggattttttggcacaaaaattttggggaaaaaaactacaaaaacttggggaaaaaaacctttttgcttactctcaaaaaaaggagttttttccgtttaaccaattaagtggattgaaccttgcttcttatttgcaaaaacaaataccattcaaccagttaggtggtgccaacacccagaaatttcttcccttgaaccaattgggaagattcaactccccc

SEQ ID NO: 40684 - DNA, 298 bp, Zea mays
  Clone ID: MRT4577_137105C.1
tgctgacgtgcgtgatgagcatggaagagtgcacggaggcgctgactgaacacgcggacttcctaacagtgattacatccacagcataggaggagctatagaaggagaacaaggagttcttcaacaagttcaagccgtatatctcggacaacagaagcgggagcaccttctagctctagtagcacaggactgatcgagtctatctgctctgtcttaactcgctttaaattagcccgtgatgtgtattacgggtgcttagttatttcaggatgcatcatcactcactgtgtttgattag

SEQ ID NO: 40685 - DNA, 1316 bp, Zea mays
  Clone ID: MRT4577_137106C.1
caggtacccttatgaccccagatctactttaccatccttgagaatgccatatctgaactactccagctccctgtcctcggaaagctccgagagtcttaaggatgcaaatgaacttctgaagcaagaggttcaaaaactacaagcggaggttaatagtttgagacaggaacgtgaacagcaagatgctgagctgcagaaagcagatgctaaagcccgtgaagcgatgaaccttgccaccgaggaagcatccaaactgaagacggcgaaggatgtcataaattcactaacagcccagctaaaagaaatgtctgaaaggcttcctcctggagcatgtgacgtgaagaacaatggacgcgttatgggcgatttagcgcccgaaatggggagagagaagcagatgcgatatggtgatcggttcagtggattgcctgctcaagtttaccaaacaagcaactacagtgaaacagccatggttcctccacaagggagcagcaggagcgagcacgtcgacggtgtccgagagttcttctcccctgtgcagcagatggccaatggaggagggtctacgactattgggtatcgttacaggtcagatgaccacgaccgaagggagacagacaggttccagataaatctgcagagcttgaatacgagaagctctaattctcccagtaaccaagtcgacgcggagtggatagaacagtatgagccaggagtgtacctgactctagtttctcttcgtgatggaaccaaagagctgaaacgcgtacggttcagccgaaggagatttggtgaacaccaagcagaatcatggtggaaagacaactgtgagaaagtgtacgacaagtacaatgtctgcggaacagatcgtctctcttcggtaacgacagcctagcgtaggccctgcatgcatgacatccaaaaaggagggcaaagccagtgcgcctgtagcatcgttgtgccctctttctttctctccatcatttgaagagcgggaggcatccagcttggttttggaacgtgcgctgcttaatcgacttgtttatctttttctgtcacctgcttggattcccctctctctcgttgtcgttgtatagaggagatgatggaaccaaagcagttgttgctcctttgactgagatatactatatacacgtagctgggcgtaaatcgtaatgcaagccccgttatcgtcgccttgtgatgtatctcttctgtcagtcgtcatgcatactctgtctgtaacacctggtacactctcgtattgatggtacatatttctgacagtcctttttaaaaacatagaaaaaccatat

SEQ ID NO: 40686 - DNA, 319 bp, Zea mays
  Clone ID: MRT4577_137107C.1
gtaatattgggggttgtttcttttttaaaacgaaccaccaaaattatggcgacttttccaatccattccacactcaaaagttgcaacaagcccaaggggaaaaaaatgatcccaacaattatatacttaaaaaaaagtcccccctaaaacaacttaaatcgtgcaaggcacaacttctgctcaagtccaaaaatcatgatcctttttactcaatcaaatcattattctcatcaagaaaaggttgttcattttctgcaaaaaactcaaattcatgctgctgctgcataaccatgttcaagggaactttccgggggcttaa

SEQ ID NO: 40687 - DNA, 716 bp, Zea mays
  Clone ID: MRT4577_137108C.1
ccggatctgtaggctgcaagcgctgctccttgtcttcctccgatagcgagacgaatcgctagctcgaccccagcggcgatgaggcatcacggactatccgatctgaatcacgcgcccaatccgtcgcattcgtggaggtatgcatgctggagccaatcttgccccttaaagtgccggaggcagaagacgtgcgatcatgatgagctttgtgacccgagggagcatgtaccgacatcgatagccggtggctataccatggttcatctgccgaacgcagatccatgctaaatatgcagggagcaggccgaacgaatagtagatgccttcagctatgattgtaactgttcttggtggggtcatggaacagaactcgcactagaactgtatcaatatttggcttaggattggcttgtgagcctcactaatgaccacgagcctgagatgcatgccacgtgccagtagcttgctgatgctgcatgtgacaacaggtgcttcggtgacactgagctgcgtgtgcatgtaccgacgtccattaccctaggtactagaggccggcttcagagcatcagacactaactgggtctgattgatcgagaagatgacgagtacattataacactgtgagagcattgtatgctgacaatatcccacatgcttcatgtatgattgaagaagaaataaattctctttctgtcctcaaattaaagttcaggcac

SEQ ID NO: 40688 - DNA, 367 bp, Zea mays
  Clone ID: MRT4577_137109C.1
cttgcaaaaaatccgttttgggctggtcaggctgtgactaaaacctgaccccaggaaagaatgtacagaccaagcatgttgagtgggccatcattgggatgctgcgactttctccatgtagtcgtccagcattttgttctgcactctgccgatgaaccttacgcagatgggcggcgtgacgttgtacctggcgagcagcgcgtacggtatggagaagagcccgtccccgcatatgagcccggacgcaagcacccgcgcgaacacctgcgcgtcctttttgtccgccctgttccacatgaagaggatcaagcttcccacgcacatttcgatggacacggccgggaccagtaagaacgaaacggccatg

SEQ ID NO: 40689 - DNA, 856 bp, Zea mays
  Clone ID: MRT4577_13710C.1
aggccggccgggtctgggaagcggctcatttggggatggtgtacgaggggatcagtgagaaattgcactcctcggtcagtttgaacatgaaaatatagtccagtattatggaactgacaaggaagaatccaaactctatatttttattgagcttgtcacacaaggatctctttcatccctctatcaaaagtataaactacgagaatcacaagtctctgcatacacaaggcagattcttaacggattggtttacctgcatgagagaaatgtggtccacagagatatcaagtgtgccaatatattggtgcatgcaaatggatctgtaaagcttgcagattttggattggcaaaggagatgtcaaaaatcaatatgctaaggtcatgcaaaggaagtgtttactggatggcacctgaggttattaatcctaaaaagatgtatgggccttcagctgatatatggagccttggctgcaccgtgttggaaatgctaacccggcaaataccatttcctaatattgagtggacaaatgctttcttcatgattggaagaggggaacagcctactattccctgctacctgtcgaaggaggcacaagatttcattggccaatgtgtaagagttgatcctgagagccggccttctgcatcacaacttttggagcacccattcgttaacagaccactgcgggcttcatttgaatcttcatctcccccagccatctgattgtactattgatatagttgatcatcatgatttacgctactggttccagaatagaattatgtgggcgtgttagtttagtatctctgtagtacatagggttggtaggcagcattgctatgtttttgattcttt

SEQ ID NO: 40690 - DNA, 1039 bp, Zea mays
  Clone ID: MRT4577_137110C.1
gacccgaggtgtcagcccatcgttcccagccggatacacagtcaccacggccgtcgagatgcagcagcatatgaagcagcctgcggaccatttcagcttcgcgcctttcaggaaaaccttcgaccaggaggttggtataggtggtgatcaggtgccatctaatcagcttggacgttcagagccgcatcatgccggcctggggcagcagccacacggcccggtgctcgcgacgaagacggctgtgcctgctacagctttcctgatcagtaggccatcgaaccctgtctcgactatagtgccacctgcaatgcagcacgcatcagttgttctcgatcatgatcagttccatgtgccagcaatccttctccatcaccatgacaaatttcagcaccaacagcaccaacagtcgcagccacaacaaaagcttgaccgcagatctgccggcttggaagaactgataatgggctgcacgtcgtccacaagcacaaaaggagatgcttccattgctcacccccaagagacagaatggccttacacgtactggccacctgacaaccaagatcatcatggatagtagcaacagggacctggtaaatagtggcgatgatgtgaatgctgaaggaacactaaccgcaaccactttcactggaatggtttttgtctgcttgaatatgcagcgttgctttcttggagaatgtacacctacaatagtggggaaagaacagaaaaaaaaaacagatctctgtaaatctccctcaaaaaaaaaataaggataaaattagttcagtgtgagctctccaagacaaaaaagccaaaatggcccacgaaaaaaggagaaaagatcgatgggaggaaaggtatcgtttgtgctgacattgaagggatcatgtgtgggcccctaaatgtattagagaccattttagtcaagtagtacaactataatcagttcacggtttatcgtagtttttttattcgtgctacctaatttccaattgtaaaaagtattgtttgccccccttttaatattttttgctttccc

SEQ ID NO: 40691 - DNA, 588 bp, Zea mays
  Clone ID: MRT4577_137111C.1
gccggccgggttccgccacgtcactttccccgtcctctctctctctggttcagcgcaggagcaggacctccatggcgccaccccttccctcggctccactaccgacgggatgcccagcccggccacctgctgctcgccatggctaccacaagctccagcacctcctctccgcggatcgcggctcctctgctcctccctctcccaagttgcatgccgaccttcacacgccgtgcatggccgagctctcccctctggcctctcccagccatgaagcacagcatcgcggtgcccagaagctcgccagccccttccctgcgctccacctccctcagctccggtgtggcctggttcggtctggacaagaatgccaaccccttatcccctgttgtgcgtgacgcatgatgcaaggtagaagatgaagacctctgcgagtcaatgacgaatgggcctcatgtgcttttgtgctgaaatttgcagattttttgtgtagttttctaatattcatgtctgttgattagtagttccaaaactcatgaaatttgttttgttggctttcttatggaaaaaaaaaaaaaaaaaaggccccta

SEQ ID NO: 40692 - DNA, 2021 bp, Zea mays
  Clone ID: MRT4577_137112C.1
gccggccgggaatcctcagtcggcctttgactgctccttgacttgaacttcgcgcagcaagacggagaaacaagaaccatccctccccctaccgctgctactcatgcacgcgcgcactgcctcctggtgccgccgcgtatgatccagacatgaatagggcgcacagcagcagctccaagctcatcaacgagaagctcgtggaacaccggatctccactgcgaagcactgcccccactgcggcgagaaaatcgacagcaaaccggattgggtggggctgccggcaggcgtcaagttcgatccaactgaccaggagctgatcgagcacctcgaggcgaaagtgaaggatgaaggctcgagatctcaccctctcatcgacgagttcatacccacaatagatggggaggacggcatatgttacacccaccccgagaaacttccaggtgtgacgagggatggcctaagcaagcacttcttccaccggccgtccaaggcctacacgacgggcacgaggaagaggaggaagatacagacggagtgcgacgtccacaagggggagacgaggtggcacaagaccggcaagacgcggccggtgatggtgaacggccgtcagaaggggtgcaagaagatattggtgctgtacaccaacttcggcaagcaccgcaagccggagaagacgaactgggtcatgcaccagtaccacctcggcgacctagaagaggagaaggagggggagctggtggtgtgcaagatcttctaccagacgcaacccaggcagtgcagctggtcctccgaccggggcgccgccgccactgccttggcagcaacggcggcggcagcggcggcgcaggagcagcataggagggatagtggcagtggcagctgctcgtctagggaccacgaggtgtcagccacatcgttcccagccggatacacagtcaccacggccgtcgagatgcagcagcatatgaagcagcctgcggaccatttcagcttcgcgcctttcaggaaaaccttcgaccaggaggttggtataggtggtgatcaggtgccatctaatcagcttggacgttcagagccgcatcatgccggcctggggcagcagccacacggcccggtgctcgcgacgaagacggctgtgcctgctacagctttcctgatcagtaggccatcgaaccctgtctcgactatagtgccacctgcaatgcagcacgcatcagttgttctcgatcatgatcagttccatgtgccagcaatccttctccatcaccatgacaaatttcagccacaacaaaagcttgaccgcagatctgccggcttggaagaactgataatgggctgcacgtcgtccacaagcacaaaaggagatgcttccattgctcacccccaagagacagaatggccttacacgtactggccacctgacaaccaagatcatcatgggtagtagcaacagggacctggtaaatagtggcgatgtgaatgctgaaggaacactaaccgcaaccactttcactggaatggtttttgtctgcttgaatatgcagcgttgctttcttggagaatgtacacctacaatagtggggaaagaacagagaaaaaaaacgtatctctgtagatctccctcaataaagaaatgaggataaaactagttaacagtgtgagctctccaagacagaagagacaaaatggccaacgaaaagagaagggggaaagaccgatgggaggaaaggtactgtgtgtgctgacattgaagggatcatgtgtggacagtttagatgtattagaacaccttaatcaagtataactataatcagtttacggtttatcacagttttttattcgtgctacctgttttccaattgtaaaaactagtggcattgtttgcatgtacattaacccttttaatttcttttagtttctaaattgatgctgattttcctttggttagttcatgctaatatgcatcacgaagaaataaagttagtaagaagcgcaaaaaaaaaaaaaaaaaaggccccta

SEQ ID NO: 40693 - DNA, 346 bp, Zea mays
  Clone ID: MRT4577_137113C.1
aaaatggaccttccccgtccttttttattcagggggtttaaattaaaaaaggaagtggggggtgacaaattttcaagaacggggtgtataaaggaccaagaatttgcccgggccctgaaaaaagaaccggggagggggaataattggcagtgccgggggccctgccacgaaggaatccagcgccatggttattttgaatccaatatatccatttttatttaaagaacctggcgtgattataagggggcccaaaagggaaccccggacaaaaaagtcctgaattccgggtatgcaaacagttattttgggatgaccaaatagggccgggggacatacctagcaacaa

SEQ ID NO: 40694 - DNA, 272 bp, Zea mays
  Clone ID: MRT4577_137114C.1
ggaagatggtgaaagaccaccacaaagagaccctcgctcacgccttaattgcgcaaccagtgccgtctcagatttcatcagtgccttctctacctcagtcgactgagtggctcttagactcaggagcttctcatcatgtcaccggtgacttgcttcgcacctgtcctcttattttgcttatgctggttcagatactctcaccattggagtggagtggagatggtactggtatgaaaatatcccacattggctcttctcctgcggccttgtct

SEQ ID NO: 40695 - DNA, 602 bp, Zea mays
  unsure (1)..(602): unsure at all n locations
  Clone ID: MRT4577_137115C.1
cgggncgcgacgcctcaaatcgctccctgcctctggtcacctcgcttccgctcccggctcccctccggccacccagacatcgtccgttcgctcgccaagagacaggaccggagaccatggcggaccagctcaccgacgaccagatcgccgagttcaaggaggccttcagcctcttcgacaaggacggcgacggttgcatcacaaccaaggagctcggaactgtcatgcgatcactgggtcagaacccaaccgaggctgagctccaggacatgatcaacgaggtcgatgcggacggcaacggcaccatcgacttcccggagttcctcaacctcatggcccgcaagatgaaggacaccgactccgaggaggagctcaaggaggcgttcagggtgttcgacaaggaccagaacggcttcatctctgcggcggagctccgccacgtgatgaccaacctcggcgagaccaagtgagaaagcctgcggtaacggtatactaccccgcgggaatggaggaggaaccaaaccgtgcatcgcatattagaaagggcatgcaggtcttggttccttcgtctncccatgaagaaccgtactagctgtagctgc

SEQ ID NO: 40696 - DNA, 1296 bp, Zea mays
  Clone ID: MRT4577_137116C.1
aaaaaaaaaaaaaaaaaaaaaaaaaaaaaaaaaaaaaaaaaaaaaaaaaaagacgcgacgcctcaaatcgctccctgcctctggtcacctcgcttccgctcccggctcccctccggctacccagacatcgtccgtgcgctcgccaagagacaggaccggagaccatggcggaccagctcaccgacgaccagatcgccgagttcaaggaggccttcagcctcttcgacaaggacggcgacggttgcatcacaaccaaggagctcggaactgtcatgcgatcactgggtcagaacccaaccgaggctgagctccaggacatgatcaacgaggtcgatgcggacggcaacggcaccatcgacttcccggagttcctcaacctcatggcccgcaagatgaaggacaccgactccgaggaggagctcaaggaggcgttcagggtgttcgacaaggaccagaacggcttcatctctgcggcggagctccgccacgtgatgaccaacctcggcgagaagctgaccgacgaggaggtcgatgagatgatccgcgaggccgatgtcgatggtgatggccagatcaactacgaggagttcgtcaaggtcatgatggccaagtgagtaaagcctgcggtaacggtatactaccccgcgggaattgaaggaggaaaccaaaccgtgcatcgcatattagaaaggcaatgcaggtcttgtttccttcgtcttccccatgaagaaaccgtactagctgtagctgctgaacgtttgagtccccctgctgccacccttatctccatttgtgtcatcatgaccttgacgaactccgcgaggccgacgtcgatggcgatggtcagatcaactacgaggagttcgtcaaggtcatgatggccaagtgagtaaagcctgcggtaacggtatactaccccgcgggaattgaaggaggaaaccaaaccgtgcatcgcatattagaaaggcaatgcaggtcttgtttccttcgtcttccccatgaagaaaccgtactagctgtagctgctgaacgtttgagtccccctgctgccacccttatctccatttgtgtcatcgaaactccttgcttcccctgctgtgtgaatctgtacggctttgcgtgttctggacactgattgcagttgaatccagtttgtagttctatttgttcatcgaatctgcccagacttctttggtaccaaaaaaaaaaaaaaaaaaaaaaaaaaaaaaaaaaaaaaaaaaaaaaaaaaaaaaaaaaaaaaaaaaaaaaaaaaaaaaaggggcgggccgttttaaa

SEQ ID NO: 40697 - DNA, 1228 bp, Zea mays
  Clone ID: MRT4577_137117C.1
ggcgattggtcccctcgaggccggccgggatatgcggtatctagtatgcttgactaaagtattcgtgtttaaatttgtatctgggtttcttgttggaaaattctgtgcgggggcacaacagctgttgttggtcacgctaggcttgacttgtgtctccatgacatcaataatattatgtcatgttcgtgtgtggtcattccactattagagaaagcaccatatgtaccggttgggaattggctttaaagaggagattttagtaaaaaaaaaaaatcgctctctgcccccgatcaccggtcgcctcccttccgctcccctgcctgcctaatccctccggccaccccgaaaccgctcgctcgctcgctcgctccccgcgcccagagacaagcccggagaccatggcggaccagctcactgacgaccaaatcgccgagttcaaggaggccttcagcctcttcgataaggacggcgacggttgcatcacaaccaaggagcttggaactgtcatgcgttcactgggtcagaacccaacggaggctgaactccaggacatgatcaatgaggtggatgccgacggcaatggcacgatcgacttccccgagttcctcaacctcatggcccgcaagatgaaggacaccgactccgaggaggagctcaaggaggcgttcagggtgttcgacaaggaccagaacggcttcatctctgccgcggagctccgccacgtgatgaccaacctaggcgagaagctgaccgacgaggaggtcgacgagatgatccgcgaggccgacgttgatggcgatggccagatcaactacgaggagttcgtcaaggtcatgatggccaagtgagtaaagcggtaaagcctgcggtaatggtatagtaaccccgctcggaaggaggaaaccgtgcgttgcatattagtaaggcaatgcaatgcagctcttgtttccttcttcccgtgaagaaaccgtactagctgtagctgctgaacgtttgagtccctctgctgccacccttatctccattgtgccgtcgaacctccttgcttcccctgtgtgaatctgtacggattttcgtgttctgaacactgattgcagttgaatccagtttgtagttctatttgttcatcgaatctgcccagactcctttggtaccattcaacaggctgctgctttctgttgaaaaaaaaaaaaaaaaaaaaaaaaaaaaaaaaaaaaaaaaaaaaaaa

SEQ ID NO: 40698 - DNA, 1769 bp, Zea mays
  Clone ID: MRT4577_137118C.1
aacatatataaaattgccaacccttcggttgtttttgagacattgtagaccttaaatgattctgaaacaatttcagtttcctttcagctcatgccacaatcacatgcatgataaataagatccaataaacaatagatatgttaggctaagaatccatgttttttgacatactaaaaaaatctgcatagatgacattgatgtttctagaaaaaactatgtttagaacccttaactcaaaaattatatcatttacctcaacatcaaatgaacatgcaaagagaatgtttctgtaaatttagtaaatggtaatggttgtgacgtgatgattgtgatgttatatgttagattgttatatgcatggcgctcagtttttaggtatgaagtacacatgcagtggttccatttagtaaggatattttttaaaatcaagacaatcctgcttagttcagggtctgtttggaacatctagagctaataattaagctgtggatttccaaacactctcaactaaaaactccagctaattgtcaggtacctcacaactaagaattagtcattagctggctcaagctaaacccagttaacaatttgttagctggctaactattagttctagtggttctaaacggggccttgctgtatagctaatgactggcatagggaggtatcacaacccaaattatatctcaggagttagccagttaggtaccaaatattgtgctaaaatttcgatacatccatagttatactttggtggtacttccatagtagtgtaaaggctctgccaaagactcgggatcatctcttacctttcaggctggatctggataaatggttttctgaccatcaaccttctaaaccatttgctagatctatgcaccagaattttaatagtcatgtccttttgtgaaccagatgtttatcgtgacaacttctcaggctggttaagcatttgacgtcactgctgtgctaatgttatatagattgacctgaaattgctccctgctgtgcaccggacaggttgcatcacaaccaaggagctcggaactgtcatgcgatcactgggtcagaacccaaccgaggctgagctccaggacatgatcaacgaggtcgatgcggacggcaacggcaccatcgacttcccggagttcctcaacctcatggcccgcaagatgaaggacaccgactccgaggaggagctcaaggaggcgttcagggtgttcgacaaggaccagaacggcttcatctctgcggcggagctccgccacgtgatgaccaacctcggcgagaagctgaccgacgaggaggtcgatgagatgatccgcgaggccgacgtcgatggcgatggtcagatcaactacgaggagttcgtcaaggtcatgatggccaagtgagtaaagcctgcggtaacggtatagtaccccgcgggaattgaaggaggaaaccaaaccgtgcatcgcatattagaaaggcaatgcaggtcttgtttccttcgttttccccatgaagaaaccgtactagctgtagctgctgaacgtttgagtccccctgctgccacccttatctccatttgtgtcatcgaaactccgtgcttcccctgctgtgtgaatctgtacggctttgcgtgttctggacactgattgcagttggatccagtttgtagttctatttgttcatcgaatctgcccagactcctttggtaccattcaacaggctgctgctttctgtttaaaaaaaaaaaaaaaaaaaaaaaaaaaactcgagcccgg

SEQ ID NO: 40699 - DNA, 1460 bp, Zea mays
  unsure (1)..(1460): unsure at all n locations
  Clone ID: MRT4577_137119C.1
cgcgtacgcccacgcgtccgaattctttccggtaataaaaggaaaattttaagttcttgggtccctcgaggccggccgggaggtacaccaatcgcttcgtccccgcgtctcgccgcgtagcggcgtaggcgccacagaaactcgcacgccgctccccgccgtccggcccgagtcgccgtcgctgccgaatccaatccatggctccgcccgccgcacccaccgcgctgcaccaccgcacgcccctcctcctcccccgccgcaccgtcgccttgggtgccaccgccaccgcgcgcgccgccagggccgcttctctcgccgtcagggcccagccggacaccaccgccgcagccgtctccacctccgcgcctgagccgacgcccgagttcaagcctccgccggggttcaaggcgcccgagcccaagaggtacgaggtcaagtccggccaggtgggcagcgtcctcggcgcctcgctcgccatcccccttcgcctcggcaccggcgtcttcgtcctcgggtactcgccatctcttgtttctccatcagagataccatcagaccagtatgcactggaatttggagcttggaaggtgaaagaggaatcaaaaataggacagtgcaaacgaccagaaaagcctatcgagatatatgaatttgaaggttgtccattttgtcggaaggtcagagagatggtaacagtcttggacctagatgtattattttacccctgtcctcaaaaaggcccaacattccgacctaaagtcctcgaaatgggtggaaagaaacaattcccttacatggtggatccaaacacaggggtcgccatgtatgaatccgatgacatcataaaatatctagctgatacatatggcgatggaactgttccaattatgctatcacttggtctgttgacagcaattacagcagggcttgctactcttggtcgtattggaaagggaaattcctacattgcttcaaaagtcccaccgcagcccatagagatatgggcatatgagggatctcccttctgtaaattagtacgagagacgcttgtcgagttggaattgccacatctgctacacagctgcgcacgtggcagccccaaacgacaagaatttttcaagaaaaaggggcttttccaggcgccgtacatcgaagatcctaacacgggagtccagatgtttgaaagcgctgaaatcatagactacctgaaggcaacatatgccctgtacccaagctcgtagtgatgtatcagaaatggtcattgtaatgttgcgtgtagattcagttctttccggtaataaaaggaaaagaaatagtgggccacgcattctgtatgatgcacagccgattttgtctatgcaggtctaaactttgaagttacttcaaattcctgttttcctggttaatctagtgtttggttccaaaaaaaaaaaaaaaaaagcggccatcgtangttggac

SEQ ID NO: 40700 - DNA, 239 bp, Zea mays
  Clone ID: MRT4577_13711C.1
aaaaaaactaaataccataaaataaagctaaaaaaaaaaaaaactaaacaacaaggactagacataatcaaaaaaaagagtaaccaatactataacacccaaaatacaccaaactaaatagacttgaccctttgatcaacccaaccttcattctcctctactccaacttctaaaccacctataccaacacgtacaccaataactctgatctcctcatacttactccactgccaataaac

SEQ ID NO: 40701 - DNA, 1404 bp, Zea mays
  Clone ID: MRT4577_137120C.1
cctcgaggccggccgggccgggacacacaccatatcacaagcaagcgccaaccatcgagcagaaagaagatcgtcgagatcgagcataagccatggcggcctctgtttctgcctcttgccttattggcctgtcgtcgttggcggtggtgctggtggcgctggcgtcggcggcgtcggcgcagctgtcgtcgacgttctacgacaggtcatgccccaacgcgctgtccaccatcaggagcggcgtgaactccgcggtgaggcaggagcctcgcgtgggggcgtcgctgctcaggctccatttccacgactgctttgtccggggctgcgacgcgtcccttctgctgaacgacacgtcaggggagcagagccagggcccgaatctaactctgaacccgaggggcttcgttgtcgtgaacagcatcaaggcgcaggtggagtccgtgtgcccggggatcgtctcctgcgccgacatcctcgccgtggccgcccgcgacggagtcgtagcgctcggcgggccttcgtggacagttctgctagggcgaagggactctaccgcttcattcccagggcagacaagcgacctcccacctccgacgtctagcctccgacagcttttgtctgcgtataacaagaagaatctcaacccaaccgacatggttgcactctcaggagctcacacgatcggacaggcgcagtgctcgagcttcaacgaccacatctacaacgacaccaacatcaactccgccttcgcggcgtcgctcagggccaactgccccagggcaggcagcaccgcccttgcgccgctggacaccacgacgcccaacgcgttcgacaacgcctactacaccaacctgctgtcccagaaggggctcctgcactcggaccaggagctcttcaacagcggcagcaccgacagcacggtcaggagcttcgcgtccagcacgtcggccttcaacagcgccttcgccacggccatggtcaagatgggcaacctcagcccccagaccggaacccaggggcagatcaggcgcagctgctggaaggtcaactcgtaaactactagctacgtactacgcccaatgcaatgcgttatggcccacgcgtccggccaatcaataataaggcctcagctcgctctctagctgtacgtgtgtgtgtgactggtgttggtcgagtaagtgtacgtactatacatggatggagcagagagagagatatatatatcgatctggtggtggccaccttattattgcatgcatatgtgtactgtattagcacgacactattagacacatttattaatggtaccatgctatgcttgtaaacgtacccagccattgacgtagatatgacactatagtgtttaatcgtattgtgcttaacaccagccaagcataaaatatg

SEQ ID NO: 40702 - DNA, 458 bp, Zea mays
  unsure (1)..(458): unsure at all n locations
  Clone ID: MRT4577_137121C.1
ctaatcattagtcgaaggggtaatcaggtgtattatgggtgggcagtaccgttagactgnaaagagacccacctgcatgtgcatacaagcctgcagagtaagaacaacgagggggttctagtgaatcaaaaccccttgtctaacctgcggtgctgatgctgtggcggcagtaagaaagaatgtggaatgatacaacatgcgcttaaaaggaggtcacgggtctgtgtggttagtcttagcaaacaataattgttgtgtaatggttatgtacttggttgatgggtgcgaacttgtctatgacactcctggtccttgaccagctgcattactaatcactgttgttgtaatgctctgggtgaattgaagggagataaacttgcattcacagatgtaattgcgagagtgaatcttgttgttcaaggctttcgtatagaatgtcatgcttgaataatcagctt

SEQ ID NO: 40703 - DNA, 810 bp, Zea mays
  unsure (1)..(810): unsure at all n locations
  Clone ID: MRT4577_137122C.1
ggggcagcgtcctcggcgcctcgctcgccatcccccttcgcctcggcaccggcgtcttcgtcctcgggtactcgccatctcttgtttctccatcagagataccatcagaccagtatgcactggaatttggagcttggaaggtgaaagaggaatcaaaaataggacagtgcaaacgaccagaaaagcctatcgagatatatgaatttgaaggttgtccattttgtcggaaggtcagagagatggtaacagtcttggacctagatgtattattttacccctgtcctcaaaaaggcccaacgttccgacctaaagtcctcgaaatgggtggagagaaacaattcccttacatggcaattacagcagggcttgctactcttggtcgtattggaaagggaaattcctacattgcttcaaaagtcccaccgcagcccatagagatatgggcatgtgagggatctcccttctgtaaattagtacgagagacacttgccgagttggaattgccacatctgctacacanggtattttcggatccagaattatgaatatggagcacggccaggacgaagcctgaaccagacgaaggtccgagtggtagccgaagctgtgcngcagggaagcttcggcgcgatggcagaagggggaaccgacttaaagatgaaaagacttcgggnggcctcgacagatttccataagccgttaacaaatgtaatggcaatgggatgtaatttttacgtgggcctgcgtccccgcgtctataaatagatgaacagtactcccgtactggacacgctgacttggcatttgctt

SEQ ID NO: 40704 - DNA, 1046 bp, Zea mays
  Clone ID: MRT4577_137123C.1
cccacacacacatcctgtccctctctctctctccactccacctagctttgttcatcttgttctcccaaaagtcttctttctagctaggtcttcggtctcggacatgagcgggagaaactttggggacagcatggagttgagcagcagtgggagatcgtctggctcgagaaggggcaagagaggaggcggcggcggcggcggcaccgacaggcccaagcagccgcagcgagggctgggcgtggcgcagcttgagaagattaggttacagagcgaaatggtggagtacttccatcctctcggccagcaccccagcttgatccacagaacgggcagcctcagcttgatgccatacggagagagagacgtacggtacagtgagttccaagctcccatcataagatcaccgagcagcagtgctgtccatggcaccccacattacgcgcagcatcctaacaacatcacactgtctctcttcgaaccacaggaatccgcccgattgaagggacatcacgatcgaagtcagtcagcagattcaacaagcttgaactccgacgatccacaggacgtggaccttgagctcaagctatgatcctagctcaaatgtttcctcctttatttctcctctccttcgatgtgatgtggtagatttgttagtcttcatgggccttttcgcttgtggtgcagtaaaggtctgtttggtttctggataactgtcacactttgcctaacctttgacagaaaagttagataaagtatgacaagttagacagcgaaccaaatataaccttaagtttctgaattggtgccactagctagtcacaaactcacagtgcaaccaatgcaagaggatttgccgccttttctgtaatgatatgatgcctgcccgaagagagaaatagtaccgggctttttttttaatcgagacttgcatgctgttgtgcatgggcatgggatctggcgatcatatctagcacacttgtactgactgtactgtatgaagcatagatgtgctgactcttgcctgcaaaaactattctaccccccca

SEQ ID NO: 40705 - DNA, 360 bp, Zea mays
  Clone ID: MRT4577_137124C.1
tcgcccgcgtctcgccgcgtagcggctatgcgccacagaaactcgcacgccgggccccgccgtccggcccgagtcgccgtcgctgccgaatccaatccatggctccgcccgccgaacccaccgcgctgcaccaccgcacgcccctcctgctcccccgccgcaccgtagtcttgggtgccaccgccaccgcgcgcgccgtcagggccgcttctctcgacgtcagggcccagccggacaccaccgacgcagccgtctccacctccgcgcctgagccggcgcccgagttcaagcctgcgccggggttcaaggcgcccgagcccaagaggtacgatgtcaagtccggccaggtgggcagcgttc

SEQ ID NO: 40706 - DNA, 1447 bp, Zea mays
  Clone ID: MRT4577_137125C.1
ctcgaggccggccggaatcgcttcgtctccgcgtctcgcgcgccccgccgcataggcgccagtcctccacagaaattcccacacctccacgccgtacggccagagtcgcggtccccgtcgaatccattccatggctccacccgccgcccccaccgcaccgcaccaccgcactcctctctttctcccccgccgcgccgccgccaccgcgcgcgctgccagggccgcttccctcgccgtcagggcccagccgaacaccgccgccgcctccacctccgcccccgagccgccggagaagttcaagccgcctccagggttcaaggtgcccgagcccaagaggttcgagatcaagtccggccagcagagcagtgtcctcggcgctttgctcgccatccccctccgcctcggcaccggcgtcttcgtcctcgggtactcgccatcacttgtttctccatcagagataccatcggaccaatatgcgcttgaattcggagcttggaaggtgaaggaggaatcaaaaataggacagtgcaaacgaccggaaaagccgatcgagatatatgaatttgaaggttgtccattttgtcgaaaggttagagagatggtatcagtcttggacctagatgtactattttacccctgtcctcgaaaaggcccaacattccgacctaaagtccttgaaatgggtggaaagaaacagtttccttacatggtggatccaaacactggggtctccatgtatgaatcagatgacatcataaaatacctagctgacacatatgggtgatggaagtgttccaattatgctatcgcttggtctgttgacagcaattacagcagggcttgctactcttggtcgtattggaaagggaaattcctacattgcttcaaaagtcccaccgcagcccatagagatatgggcatgtgagggatctcccttctgtaaattagtacgagagacacttgtcgagttggaattgccacatctgctacacaggtatccaaaatactttaaaaccacaagtcactgaatggcatcagaattcagaacagcctgcaagctgttgctaaacttaacctagtagaattatcactttagttcagttcttctggactgagatatgtgctctgcaagagtgttagtaactagaagttactcctgcagctgcgcacgaggcagccccaaacgacaagaatttttcaagaaaaaggggcttttccaggcgccgtacatcgaagatcctaacacgggagtccagatgtttgaaagcgctgaaatcatagactacctgaaggcaacatatgccctgtacccaagctcgtagtgatgtatcagaaatggtcattgtaatgttgcgtgtagattcagttcttcccggtaataaaaggaaaagaaatagtgggccacgcattctgtatgatgcacagccgattttgtctatgcagatct

SEQ ID NO: 40707 - DNA, 501 bp, Zea mays
  Clone ID: MRT4577_137126C.1
tcgagtttttttttttttttttttttttttttttttttttttttttttgaggccttaaccagataaaccgccgaagacatgcctgtgaaaattcctaggattttataccaagttcgtagcaaagcatggagattcctaaaatgacccccccccttttttttaaactgctgaaaatggagaccagctacaaagaggtggaggcaataaactaaaatttacattcctccaagaaagacacacaagcttacccgggcgggacaagagacacattttaaaaagatgagggacagtttgaattcttcaaacccatgccggccacacaataaataaagcgggttcctgctccagggaggaacttggaggtttttgtgaaaagaaccatgacgggctcactattgggttcaacaaacatctccttgcatctgtttttacgccacaaaccttatcgatgaggagaaccggtatttcatattgccctgggccacagggacatacaggaca

SEQ ID NO: 40708 - DNA, 377 bp, Zea mays
  unsure (1)..(377): unsure at all n locations
  Clone ID: MRT4577_137127C.1
gggcagtgcagagctctcctgggtgcctaaacgacaagcaggctggtggcatagactcgcctggctgcttgcactgacacacgcccagtggggtagcctgcaacagacaaatacgatctagctagcacacacatgatctngaagcggagatcgactaggaccagaggctgagaccggggagagctcctcgctgccaaacgatggggctcaagaggccgccttgtgcacctgaggaggacgagatccggggcgcgcacatgtagatcttcggccacaaaaactaggggcgagctgccctatttagccgggctgatgcggtgctggcagagctcgcggctcaggaggagcactacctgtgcctggacatgaagcgcggg

SEQ ID NO: 40709 - DNA, 643 bp, Zea mays
  Clone ID: MRT4577_137128C.1
cctcgaggccggccgggatccaccatgcagagataggcgccttcttactcacctacctccgccgaatcgatgtttcgcatcgtatgtaattcccgccgacgatccacccgaacacaaacaccatgagggagcgaagttcgatccacatcgaactaacaagaatgcacctccaaaacacgcgctaggcagctgtactgcacttgagcatgggattcatgctgcacggccagatgccgggtgacaagaccattgcggggagtgaagatgatgctcttcaacacacttacatctatatgagtactgcgtgctcggaaaacacagagccccgagttgtacttgtccacctccaacccattggcagtcgatgaggtgcagtgactaggaccaaccgccagctcttccactcagcatgcagattcatacctgcgaaggcatgcatcgtcacccaacaactcttgccgtgggcactacaccactgttaaggacattgttgacctatgccttgatcgcatcacgaatacttgccgacaactgcactgccttccacagcttccgtccatgtcaacgctgttggcgtgataacaggatctgcactagcatccctcctcctatagagcctgtctgatgactaccgcaacaagtc

SEQ ID NO: 40710 - DNA, 699 bp, Zea mays
  Clone ID: MRT4577_137129C.1
cctcgagccggccgggagcatccgatccgatccgatccattaacactactcagcgcagctctgtgacacgagagatcaaatatatatggggcgcggcggtctgtcggcaaggagcgccaccgccgtcgtcgtcgacggtggggacaataaggagctgaagtcgtcgtggccggagacggtggggaagcacatggtggaggcgatcgccatcatcaagtcggagaggcaggacgtcatcctggagctccacaccgccgacgacccgcagccgccggactacaacgaccagcgcgtttgcctcttcctcgacgacagcctgatcgtcgtcaggacgcccgtcgtcggctagctggccgggccgccgtcggccgtcgtttccttcaacctatactagctacgggtacacagattaaaggacgatgtgtgtgtagggtttagttgttgtactgtgcgtgtgtgacgttgtgatgagatcgtgtgatcgatcataataagtatttaccgtacgtacgtacgtgatctgcatgcatgcacggcatgcgtgtgtacgagtagagtgtgtgcaagaataatgttgtacccgaccagctagccggccggtgtgtgttgattcagtcgtgtcatcgtgtgtcgtcgctatatatatatgctgcccattttgtgcccaaaaaaaaagaaaaaaaaaaaaaaaaagcggcc

SEQ ID NO: 40711 - DNA, 2306 bp, Zea mays
  Clone ID: MRT4577_13712C.1
gccggccgggccgggacacgccatagcccttcccgcaagcagccgagcaggctcctccccaaatccttccccgatgctgcggcgcaacagcgagtgcgaaatcgagtccgagctctgacgcgctcgcatggagctctggttctaggtgtgggctgcgctcctcgtatggatccagatgttctcgtggaaccgtaagcagtcctcctcctccggctcgccctcgccctcctcctcctccggccgccgccgcggcggggcggacgcctccatggactccagcagccgcggcggcggcgggagcgggagcgggagccgcggacggagcccgcggttggatcgccgcaacgcggtgaagcgcgtcgactacgaggcgggcgcgggcgcgggagcgtccgtgtcggtggccgcgtcgtggtcgtcctcgtcctccgcggatcagcagcgttcgccgggcccggggctccagccttcgcgctccctagacgttgcccccggagcggacctccggatcagcgggagcgtagagggggaggtcgacgaactctgccgcagcctggggctctcggggcccgaggatttcgccatccccgtcgcggcctgggaggcgcgcaagtcgcggtctaactccgacctcctcccgcgctcccaccccgacccgtccacacccgccgacgaaccctcgccaattgcgcgtgtggtctcggcgcctgatgttcagccgactcgcttcgtccctgcccccattcctgctactgttgcggcgcccgaggagtcacccaaggctgcccctgccgttgctgttgcggctcccgtcgggggtttgcccctgccttcgccaaggaggggaggcggggaggtagggatacggggtgcacggccgcctttactctccccgcctccgccaattggtgcactcgctcctccgccggtgaggaggtccttcgttgacgatgacatgactaggtccgcttgggacattgtgcagtcgtttgctcccagggaacagggaagtgaaccgggagagcgtttggacactcgttgcaattcggacacagaggaagagagtgaggctgaggatggggtggcagctgtggagggcgagctgaaagagttgaggataggagagaccttcgaggggctcactggaacttcttcattgtcaacgacaaatgatgatgatgcgtccagtacaaccacggaggccatgttcatcatctcaccgaatggcaagttcaagcgtaagattaagtcatggatgcgtggtgctcttctgggaagcggctcatttgggatggtgtacgaggggatcagtgatgagggtgcttttttcgctgtgaaggaagtatctttgcttgaccaaggaagcaacgcacaacaatctattgttgcacttgagcaggaaattgcactcctcggtcagtttgaacatgaaaatatagtccagtattatggaactgacaaggaagaatccaaactctatatttttattgagcttgtcacacaaggatctctttcatccctctatcaaaagtataaactacgagaatcacaagtctctgcatacacaaggcagattcttaacggattggtttacctgcatgagagaaatgtggtccacagagatatcaagtgtgccaatatattggtgcatgcaaatggatctgtaaagcttgcagattttggattggcaaaggagatgtcaaaaatcaatatgctaaggtcatgcaaaggaagtgtttactggatggcacctgaggttattaatcctaaaaagatgtatgggccttcagctgatatatggagccttggctgcaccgtgttggaaatgctaacccggcaaataccatttcctaatattgagtgggtcaaggctttctagatgattggaagaggggaacagcctactattccctgctacctgtcgaaggaggcacaagatttcattggccagtgtgtaagagttgatcctgagagccggccttctgcatcacaacttttggagcacccattcgttaacagaccactgcgggcttcatttgaatcttcatctcccccagccatctgattgtactattgatatagtggggtgtttctcgttgtgagaccaatgcgcaggtcacgtgttggctttcagagcagaagcaggacaggattcaggaacgaggtacagtccttgcattgatgcaagcagcgacaagggtcttccgcctccggtggaggaaactacgtcacgcggtgcggcggggcagtcttccggtgagagggtttctgtagaaagagctgcacgacttactgatccatggggc

SEQ ID NO: 40712 - DNA, 2146 bp, Zea mays
  Clone ID: MRT4577_137130C.1
atcacgcgcgagagccattgaagacaatgaagctcgggcattgatggctgcacaagccattatgtcatgtgaggatacgttggtgaatttacaggaccagaaaaacaaattgactgaagaggcggaggtggagctccgacgagccaatgaggcaattgaaaagctgaaaaccttcaagaacgaatgtggactgcctcatgtgcaaatggaatggcatgatcaccatgaaatagaactggtccatgcactgcccttcgaggattctgatgattctgcgctgaatgaaagcaggcttgacctccaggaaatatgtcaaagagtcaaagaaataattgaatcttaccctgagctatcagttgcggaattagcagataaagttgatcgacttgtggaaaaggtgatcagccttgaacttgccactacttcacagaatgctcagatcgatagaatgaagactgagatagatggccttcacgagcgcctgcatgctttggagcaagacaaggtggctttggttgttgattctagtaacttggctgacgggttgaggaaagctgaagaaatgctgcaagaagtacaacaaatttggaagtccgtacaaaatggtttcgagaacatttgtaaacaaatgactgaagccgcccatgaactaactgaattcgtcgaaacattacatgctcctgagcaagaaagcagtgacttcgtggattcatcgcgagactccaaacacgatacttctctggaagattactcaggactaacaagtctgtctgtgcaaaacgagccatccaaatctttacatggcactacaaatgaaactgataaacatgaagaaaccttagaagatcaagcccaaaaagagctagttccaaaagaatctgaagttgagggtaagattctattagaagactatgcatctgtacttcagagctacaaagatacagagcagaagctttcagaaattgagaagataaatcaagattaccatcttgaggcaatgtcagaactgaaggaacttaagagtgccaatgcaacaaaagatgaggagatccagtcgcttaggcgcatgctacgttctttgcggaaaaagatgagtgcttctattattgagagtatagagaaggcagaagaaacatccaagataagcagcagtcctactacagaagacaaagagattgccaagtcagaagaaacatccaagataagcgccactccaagtacagaagacaaagagattgctgagatagaggaatacattaagcaatggcaaattaatgactcactggcttcttcggttgcagaggagaaatttggggcagaaattgatagggtattaggggagaacttggacttctggttgagatttagcacatcatatcatcaaatacggaatttccaaatatgctttgacatgttgaaaactgagatgtacagattgactgatgaacaggaagacgggggaaattacggctttgctggtagttatcaggtagcaaagctggaatcagcagtactagaaaagaaattcagggatctaaatacagatcttcaagtttggattgaaaagaacgtgctattgaaaggagaggtagaaaacagattttcgtcactatgctgcatacaagaagatatatcaaagatcacaactctggataaatgtgatgaagttcacttcaacccttttcaagctgcaaaattccaaggagaggtgcttaatatgaaacaagagaataacaaagttgctaaggagctagaagctgggctggaccatgtaagaggccttcaagtggaggttggaagggtgctcttgaagctcagagagaatctcgaggtatctatagcaagaagccaccgagcccaacaaaacttccggaacctgtcaacaaaagctggagttccccttagaacttttctgtttggctcaaagacaaagagatcatcattcttttcgtgcatgagtcctggggtgcataagcaacacagtggttcaaaggttgggcgtagatgagtactgacaaattgttttttgacatttaatcataaagagatctcagtgtacatgacaattcatatgtgataattgcttttaggccttaaatgtaaaagatcctcatctcctaaaacaaatttggtttgtgatccactc

SEQ ID NO: 40713 - DNA, 407 bp, Zea mays
  unsure (1)..(407): unsure at all n locations
  Clone ID: MRT4577_137131C.1
gcgcctcatccacgccaggatgcacgcgcaggcgctcacgctcgccgtcctcgggggagccgcgctcgcgcaccactaccacggcaagagcaccaacgccgggaagaggcagcagcaggaggacctggactacggcttctactcgcagctgccgccggccaccgacgccgacggcaacgagaacgagcgcttgctctttgatttccatggcttattatcgatcagcctccgattcttctcctgcactactactacttgtaccatttcatctattgattgaatgaatggtcacgatgatgacgataattatgttttgtttgtttgcaaaaaaaaaacagtggatgtcatgtggcgggtctgtgctaaaanaaaaaaaaaaacacctaaagaaaaacacgaacacagag

SEQ ID NO: 40714 - DNA, 510 bp, Zea mays
  Clone ID: MRT4577_137132C.1
gaagacctcacattcagagaagccatcgcatatctccaatcccaagaccctcaatttgccgaatgcacaatagacaacaacatcgaagaagctgtccttgcagccaagaaactcgttgcagatcccgatccctctcttacgctcaattaaccgaagaagagatagcagtgttacacttgtacactcaacaaaccgagttttacgtcttccttaacagaagagcgagagacgaagtgagagcgaattttgccccctacctgcccgttatgaaattgttgctttctgctttgtacaaagtagaccgtcggaattctccactattgactccgttttttttttcagttacaaccagtacaaggaaccttctatcgcggtctgaaactcaaccaaagagacaaatatcgcagagaagcagaatatgtttggtgggcgaatacaagtgctgtaccttctcgcaaaacattggaaagcgataatttcttaggaaaaagaggtccgagaactattttc

SEQ ID NO: 40715 - DNA, 297 bp, Zea mays
  Clone ID: MRT4577_137133C.1
cacgcgtacgcacgcgcgtacggtgttatcaacaggaggttactgcactcaaccaactggctgcagggaactatggtgcttatttgcaacaacaactaccattcagtcagttaggtgctgcctaccctcaggagtgtggtccattcaaccaactggcaggattgaactctgctgcttatttacaacaggaacagctaccaccattcagccagctagctgatgcgagccctgttgactttttgacacaacatcagtcggtggcgttctaacctgacgctgggcctaacgctggcaccc

SEQ ID NO: 40716 - DNA, 682 bp, Zea mays
  unsure (1)..(682): unsure at all n locations
  Clone ID: MRT4577_137134C.1
tacagccggcggcgggcgccggcgcgggcgacgggcatgcgcctcatccacgccaggatgcacgcgcaggcgctcacgctcgccgtcctcgggggagccgcgctcgcgcaccactaccacggcaagagcaccaacgccgggaagaggcagcagcaggaggacctggactacggcttctactcgcagctgccgccggccaccgacgccgacggcaacgagaacgagaagaaagaaaaaccaataaattagtagcaataattggtgggtggtttggcatttggcaatgatgcgtgacgtggcgcctgcaggctttcttggtcctaatcctaatcctaatcctaatcccaatccatccagctaagacgtccacgcccgtggttttgtcctgttgatttgccaccggagacgacgatgcagcgcttgctctttgatttccatggcttattatcgatcagcctccgattcttctcctgcactactactacttgtaccatttcatctattgattgaatgaatggtcacgatgatgacgataattatgtttaaaaaaaaaaaaaaaaaaaaaaaaaaaaaaaaaaaaaaaaaaaaaaaaaaaaaannnnnnnnnnnnnnnnnnnnnnnnnnnnnnnnnnnnnnnnnnnnnnnnnnnnnnnnnnnnnnnnnnnnnnnnnnnnnnnnnnnn

SEQ ID NO: 40717 - DNA, 1148 bp, Zea mays
  Clone ID: MRT4577_137135C.1
tcaggccggccgggaattgggtggacaaccgaccgaacccacatcctgcttactgcccacaagaaagaagctagggaaacccgggggatcggaggactgaggagaggcagaaaacagaaggcccggctgcggctgcggctgcggctgcctttggtttcgtcgtcgtctccgcctgttttcccctctttccatggcaggctgatgctcttcaacacacacagtccactgtcgctcctcagttataagtagctagggcatctggctgctggaaaatcaagcacgcatccaccacacacacagctagctagcagatcgtttcgagtgaagatccaaagaggtagagagatggaaaggatgagttcgtcgctgcagtactgggtggaggagcacaagctctcaaccatcggagccgtgtgggcgacggcggtgggcgcgtcggtggcgtacagccggcggcgggcgccggcgcgggcgacgggcatgcgcctcatccacgccaggatgcacgcgcaggcgctcacgctcgccgtcctcgggggagccgcgctcgcgcaccactaccacggcaagagcaccaacgccgggaagaggcagcagcaggaggacctggactacggcttctactcgcagctgccgccggccaccgacgccgacggcaacgagaacgagcgctggagctggtagagcatgctgcatcgggacaagaacaagacagcagcgagaagaaagaaaaaacaataaattagtagcaataattggtgggtggtttggcatttggcaatgatgcgtgacgtggcgcctgcaggctttcttggtcctaatcctaatcctaatcctaatcccaatccatccagctaagacgtccacgcccgtggttttgtcctgttgatttgccaccggagacgacgatgcagcgcttgctctttgatttccatggcttattatcgatcagcctccgattcttctcctgcactactactacttgtaccatttcatctattgattgaatgaatggtcacgatgatgacgataattatgttttaaatgtttgcaaaaaaaaaacagtggatgtcatgtggcggttctgtgctgtgtgtgtgtgactactgccttgcgttattttaattattgttgcaccagcttgaggc

SEQ ID NO: 40718 - DNA, 277 bp, Zea mays
  Clone ID: MRT4577_137136C.1
tacgcctttatgtctctgctgagtgaagttctacggtttgtacttagatgttgtgtggttttagaatcagctgtattgtaagcaagtctgtctactttagaagactggaaatgaaagaaatctttgccaaattctttggagaatactggatttgcgtatgaattaatcagtatccagcacttctgttaaatcaggcgtcctcccagtctgctcttgtctatagcatggctttagagcctgcctccttgacatgctgtatatattctattgtatttgt

SEQ ID NO: 40719 - DNA, 210 bp, Zea mays
  Clone ID: MRT4577_137137C.1
cccacgcgtccgagcttttctatatcagtttcatgacacagtttgtaatccaggacataggcacgccaaccgtcgtggccttccacgtggaccaaaggaaactgaaatatctgcaagtgtgcctgatgctaagaatgcaaagagtggcgctgctagctattgggctcatgagagacaagtatgggttcatgagtcaagtcaggctcgtga

SEQ ID NO: 40720 - DNA, 565 bp, Zea mays
  Clone ID: MRT4577_137138C.1
gtcctagtaagcatccgtcactgatccgtacccagatccctagaaggcgctcatcaagaatcctgctgcacacatgcatgagtctgacgtaccggttccctcagcatgtacagaccactgcactcaggcccgatattcccgccttactgacacgcaccaatgaactgaccccacgtcacctgatttttatccacaacgacaaaaacctccagcttttgcatatcgtgcttacaatatattaacctgaacgattgaaaaacaaatacaaattttctgattacagcataacctttacagtcgtccagtggttctggcaaatggtgagaatttcagcatggacagacaataactgactgcttcagtttcgtcacttccactcttaaaggttctgatcataaggatgttagtgtaacttagaaggatctgtagcccacccaggtttcagatacacatactatacggctgtacgaaccatatgacttcagatcatacttctctttaaccaactaaaacttgccctgagtacacatgcaaagactcagctccagtacaggctactgccggc

SEQ ID NO: 40721 - DNA, 629 bp, Zea mays
  Clone ID: MRT4577_137139C.1
gagaatcaccttctcggccactactgaatcccttgtacccctcaccgccgcctgtgctgctaggaagcttccacccatccgctgctacaacgagatgtagcagaggagcggccgatatataggcgctccgcatccggtcggggacccaaaacacagactagatgccgccgatgctggacctcactgagaagatctaccacgtgctggatctataaggagccgacttcccacccaccctggaggttgccgagcaccgcgtcttccagctctctcatggtgatcgtcccatagttcaagtcccgcatctcggcgacatctcattcggcagaagcgctgcgactccgaccgcaggcgatccacttgctcgccgcgactctatcgccgccgcgagggagcttcttctcagagacacaaaccctaccggtatagcactatgtgcctaactcagaaatcatcggatgtgctgtcgaatcattcaatgacatatcatctgtaactggacatgctcccgcccgcctcgaagaaaacgaactctatgttgcatgaaatcaactacgaagtggtgcacaacatcaacatttacgtgcaatactatttcatggacttcaaacttgctaataacgaacatc

SEQ ID NO: 40722 - DNA, 892 bp, Zea mays
  Clone ID: MRT4577_13713C.1
cttcgtctttctgctcattatttccatgttctcagtgtcattgtcttatggttgtagttttcttgttcaaatttcagatgtcaaaaattaatatgctaaggtcatgcaaaggaagtgtttactggatggcacctgaggttattaatcctaaaaagatgtatgggccttcagctgatatatggagccttggctgcaccgtgttggaaatgctaacccggcaaataccatttcctaatgtcgagtggacaaatgctttcttcatgattggaagaggggaacagcctactattccctgctacctgtctaaggaggcacaagattttattggccagtgcgtaagagttgatcctgagagccggccttctgcgtcacaacttttggagcacccatttgttaacagaccactgcgggcttcatttgaatcttcatctcccccagccatctgattgtactattgatatagtggggtgtttctcgttgtgaggccaatgcgcaggtcacgtgttgatcgtcatgatttacgctactggttccagaatagaattatgtgggcgtgttagtttagtatttgtagtccatagggtttggtaggcagcattgctgtgtttttgtattctttgggtgttcttcatcaggcatagggttttcttcctggttactacgtagatttgtgtacaccttgtaggtaaaagggttgcaaacttgcaattgcctctggtgtagggttaggcagttagccgatgtttgtgaatattagacatcaccattctttacttaatggtttgttgaagcatcaaaaaaaaaaaaaaaaaaaaaaaaaaaaaaaggcccctaaaaaaaaatttaaaaaaaaaaaaaaaaaaaaaaaacaaaaaataaaaaaaaggggcgg

SEQ ID NO: 40723 - DNA, 213 bp, Zea mays
  Clone ID: MRT4577_137140C.1
aagacctcacgacacgacaccaagtgcaggtgttctagagggcaccaataaaggcccccaaggggggcaacctcggtggacttaagcacaaccaggcggctcaccatgtcgcccttgcctaatcgcaggcctaaagggagctgctgatttggcgcgatgagcgcctccccgaaaaccatggcctcgcagaagctttgcataaaagtggagcgc

SEQ ID NO: 40724 - DNA, 1260 bp, Zea mays
  Clone ID: MRT4577_137141C.1
gggtccggcgggcccctcgctccgccctcatcattggggccgcctcgaggccggccggggccctcgcccgtcgacccttttcccgcacaacagccgcgccgctctcccgtccaactcgaccacatacggtagctagcctagcttcttcgtcacagctcaccacggcgcagcaaccgcagcccacgaaggcgacgaaaagctgccgaaccaccagcagaggagagcgagggaccgcgcaaccgagccactccctagtccctccttctccctctctctctctctcttcgcctccggatctcgcatgcgcggtggccaccgccgcgcccgacggtggagggtgaggagttagcgaggggccctgaccctgagtgctggacggcggcgtgatggggggagcgcagctggtggggagatgggtggagtcgtacacggggatgtcgacggacaacatcaagggcctgctgctcgcgctctcctccagcctcttcatcggtgccagcttcatcgtgaagaagaaggggctcaagaaggccggcgcgtccggcgtccgagcaggcgttggtggctactcatacttgcttgagccactgtggtgggcaggaatggtaacaatgattgttggcgaaatcgctaactttgcagcttatgcatttgctcctgctatcttagtcactccacttggtgcacttagcataattatcagtgctgttcttgcccatataatgttgcgggagaaacttcatacatttggtatacttggctgtattctttgtgtggtcggttcgacaacaattgtgcttcatgcccctccagagcgtcaaattgagtctgtggcagaagtgtgggatcttgcgactgaaccagcattcctgtgctatgcagctgttgtgcttgcagcagcttttgtgctcatattccattttgtccctgagtatggtcagacacatatcatggtatatgttggcatatgttctcttgtgggatctttatcggtcatgagtgtcaaagctcttgggatagccttgaagctgacattttctgggatgaaccagctagtctatccacaaacatgggtgttctcatccgatgtaaccttatgcattgtaacacagatgaactatctgaacaaggccctcgacacattcaacactgcagttgtttcacccatatattacacaatgtgtacatccttgaccatcttggctagtgtaataatgttcaaggattgggatcggcaaaatccaacacaaattgtaacgg

SEQ ID NO: 40725 - DNA, 292 bp, Zea mays
  Clone ID: MRT4577_137142C.1
ctcgcagacatcttatcccctcccgatcgaggcccccgtttcctcctcctccggccaccgcacctagctgtcttaacttgccgttcgcagcctcacgcccatggctaggaagtgctctagctgtgggaacaacggccacaactcgaggacctgcagcgggcacggcgccgggggcgggggcgtgaggctgttcggggtgcagctacacgtggggtcctcgcccgtggccatgaagaagtgcttcagcatggagtgcctgtcgtcgtcggcgtccgccgcgccggcgtactac

SEQ ID NO: 40726 - DNA, 290 bp, Zea mays
  Clone ID: MRT4577_137143C.1
ccttttataatttccttcactacccacaaaaccggggcatttattaaaatacacgcggttttaaaacatcaacattcctttaattacatcaagcccatcggacccttaccaaaatcacacaaaccatttcaaactacataaaacaattcaaacttacacaattgacgctaaaaacacgctcaacactcattaagatcaaccggcccactatattaaccattcacactacccaacgttcttatatttaatagctaaacccctaaaccaagccccctcatccttaaaatttt

SEQ ID NO: 40727 - DNA, 303 bp, Zea mays
  unsure (1)..(303): unsure at all n locations
  Clone ID: MRT4577_137144C.1
cctcttcacaagcagctcaaagctctagttctagctagctagcanagggggggaaaatggctccgcttctcgctgctgccatgaaccacgctggagcccatcctggacttaggagccacctagtaggagccggcaatgagggtatctcacggcaccacctgccgccttcttctccccgcgcagccagcgaaggcgcaggcttagctttactacacgagctgcccgaggaggcagccagaatggagtccaaatgttgagcccctcggaaatcccaccgagggactggcctcccctctggctccg

SEQ ID NO: 40728 - DNA, 1175 bp, Zea mays
  Clone ID: MRT4577_137145C.1
cattgggtacctcgaggccggccgggcccctatgaccctatccccatctgtcgctccttcttcccagtgcgtggacgcacgccacctgtaccgacacacccagcgccctctgctccaccatcggcacacacactgacacaccctagctcgtctccaccaccgcgcacccagcgctgctagcccctgcgtcgcgtcttcagacatcctcggcaacggctctgcaggactctgtactctcaccgtggccgggtcaccatgactccatcagcatgcctcctccagctctctcccatgtccccccgagctcctccctcgtggccgtctggtgcgtcgtcgggacggacctccccactctgattgtcgtcaccgtctccagcagcgacgtccgccgcgcctataggcttttccccgctgtggtgctgctcgtccccatggcagggcgcacctgcttccccccacgccagtcgacctcgccgcggcttggcctccagagcccgcgttgtcgccccctccagctccggcatctgtagcagcgccctgacactcgcccctatgcaacaacgagctcgcccaggtcggacgaggatcccggcgaactcccctcgacaacagccgctgcctccctcgctgaggactccgagctgaccttgtcttggacctcgccatattcaatgccagtcctactcgccgtgcaccgtccccaaactattacacgtgtctcgccgtcaatccccagtgtctgtggtcgagctctccaacagctctcatatcgttgtttgcctcgatccgtcctcgtcgcggtaacagcaacctggcgcagaccgtctggtggtaatgtggatgatggaagcaagttcggcgcatcgctcgcaaggtgttcagtcgaaagcttcgatcggcgctggtcggtgttcttgcgagattcaagttcggtttagtgtggtaggacgatttgttagcttgttgaggtgtattagatgtttgtgaagttgcctcctcgcatatggcgatgtgattgtgttcgcgattgagaaatagacgtagcttatgtgtatgttaatgcttaggtcgagaagtatctggatggatacgtactcgcaaaatgtaacataaatggtaacagtaatggttcgcattcgattatcatcaataacaagtttgtatatgccggtatc

SEQ ID NO: 40729 - DNA, 206 bp, Zea mays
  Clone ID: MRT4577_137146C.1
tttacttcgcgtccgatgctgaaaagcagatgaaagtggagaagcaggtgacggtggaggacactgtggtggtcccgaaggtgcttcattagcactcttttattatgatggataaaccgatctttgagaatgaatctcactccaataattactggtcctatgggaagcatttccccgctgtagtgtcctgtatttcaatatgattt

SEQ ID NO: 40730 - DNA, 223 bp, Zea mays
  Clone ID: MRT4577_137147C.1
gtgcacgcgtcggcaacagagtcgaggtcgcgggaggttgacgcatagctaaagcgggtcaccgaggtccaagcgacagttgagcgaggcccagaggtaacaggaccccatgcaacggcaccccgggggacactggtagttcaagggcagcggttagggggcgcaactccagatctatcgcatctgcaaacaggggcagggacggtgcgtactgtaaaaggca

SEQ ID NO: 40731 - DNA, 301 bp, Zea mays
  unsure (1)..(301): unsure at all n locations
  Clone ID: MRT4577_137148C.1
agcagtggtaacaacgcagagtacgcgggagaagataagatagataaaactagtagatagctttatgttacaaaattaatagggtctagaattaatttgataatgcagcataaaatataaaacttagatttactgttagataatattcataacaacaaatttggattaacttaaaagatttaacacanaagaaaaaaaaaaaaaaaaaaaaagtactctgcgtgtgttaccactgcttaagggcgagttccggcgctctgtcggtcgctggtggtgggtccggcctcggttccgtgctcgg

SEQ ID NO: 40732 - DNA, 620 bp, Zea mays
  unsure (1)..(620): unsure at all n locations
  Clone ID: MRT4577_137149C.1
ggaccctcgaggccggccggtattctatccatcttgaatcacaatcactcccataaagaaaatttcttttccgtaattgaagttaatgaacaatacaaccagggaattgttttgcatccattgcatgtcatttttaggtaccaaagtaaacaagctctggacagattcagtttcagtttcagtgatcctgtttgcaacatccaagcatcctgtaatcacctgtatagcagttacacctgttcatgtacatgcttttaacaataaatcaacaacttacatgatagctttattgtagatgttgtttgtttattgttattatcttatcggaagtgccgtcaaggaagatgacgatggtggtagggatcgacgatagcgagcacaacttctacacgctgaagtgggcgcactgcagcacttcttcccgccgaccaagctgcaacactactgccttgttgtcgtcaccgccaagccctctgtcgcctccattgttcgccctgccaacctagggactgattctggactttcaacttaatgcttctctacctgttgtcatactgaagctactgctcctggaagagcatcaccaacatatccctgatggncctctctgcttcatgctc

SEQ ID NO: 40733 - DNA, 2453 bp, Zea mays
  Clone ID: MRT4577_13714C.1
cggtcggcacgaggctcgcaagcatgtaaactcctcccccaatccttccccgatgctgcggcgcaacagcgtgtgcgaaaccgagtccgaatcccgacgcgctccggctcccatggagcttagattttaggtgtgagctgctccccctgtatggatccagatgttctcgtggagccgtaagcagtcctcctccggctcgtcctccggccgccgccgcggcggggcggacgcctccatggactccagcagccgcggcggcccggggagcgggagccgcggacggagcccgcggttggatcgccgcaacgcagtgaagcgcatcgagtacgaggcgagcgcgggggcgtccgcgtcgtggtcgtcctcgtcctccgcggagcagcagcgctcgccggggctccggccctcgcgctccctggaccttgcccccggcgcggacctccgaatcagcgggagcgtggagggggaggtcgacgagctctgccgcagcctggggctctcggggcccgaggatctcgccgtccccgtcgcggtgtgggaggcgcgcgggtcgagggctaactccgaccaactgccgcgcgcgtggcgttaggcatccacacccgccgacggaatcttaccgattgcgcgggcggtctcggcgcccggtgctcagccgactcgctccttccctgcccccattcccgaggagtcactccactcttcgcctgcttccaccgccaccgagtcggcggaggagcctaccgttgcggcgcccgaggagtcacccaacgctgcccctgcctctgctgtcgtggctcccgtcgggggtttgcccctgccttcgccaaggaggggaggcggggaggtagggatacggggtgcacggccgcctttactctccccgcctccgccaattggtgcactagctcctcccagagttaggaggtccttcgttgacaatgacatgcctgaggccaagtgggacattgtgcagacgtttgctcccagggatcagggaagtgaactgggactgggaggaagtgtcgacagtcgttgcaattcggacaaagaggaagagaatgatgttgaagatgggtagccagaccaagaaagcgagctacaacaattgattgttgcacttgagcaggaaattgcactcgtcggtcagttatcgacgacaaataatgctgtatgatgcagtacaaccacggaggccatgttcatcatttcaccgaatggcaagttcaagcggaacattaagtcatggatgcgtggtgctcttctgggaagcggctcatttgggatggtgtacgaggggatcagtgatgagggtgcttttttcgctgtgaaggaagtatctttgcttgaccaaggaagcaacgcacaacaatctattgttgcacttgagcaggaaattgcactcctcagtcagtttgaacatgaaaatatagtccagtattatggaactgacaaggaagaatccaaactctatatttttattgagcttgtcacacaaggatctctttcatccctctatcaaaagtataaactacgagaatcacaagtctctgcatacacaaggcagattcttaatggattggtttatctccatgagagaaatgtggtccacagagatatcaaatgcgccaatatattggtccatgcaaatggatctgtaaagcttgcagattttggattggcaaaggagatgtcaaaaattaatatgctaaggtcatgcaaaggaagtgtttactggatggcacctgaggttattaatcctaaaaagatgtatgggccttcagctgatatatggagccttggctgcaccgtgttggaaatgctaacccggcaaataccatttcctaatgtcgagtggacaaatgctttcttcatgattggaagaggggaacagcctactattcccaactacctgtctaaggaggcacaagattttattggccagtgcgtaagagttgatcctgagagccggccttctgcgtcacaacttctggagcacccatttgttaacagaccactgcgagcttcatttgaatcttcgtctccaccagccatctgattctagtattgatataatggggtgtttctcgttgaggccaatgctcaggtcacgtactcacgtgttgatcttcatgatctacactactggttccagaatggaattacgtgggcttgtttaggatgtagtttagtagctgtagtccgtagggttggtgggcagcattgctctgtggttttgtattctttggggtgttcttcattgggcaaagggttttcttcctggttattacgtagatttgtgtaaacttgtaggtaaaagggctgcaattgcctctgggctctggtgtaggtttagccgatgtttgtgaatgtttgacatcgccattctttacgtaaatggttttgttgctcaaaaaagcatccggagcattgaatccccctggtgttacttt

SEQ ID NO: 40734 - DNA, 1548 bp, Zea mays
  Clone ID: MRT4577_137150C.1
aaggttctcagcacggcgcgcggcccgcctccccaccggtctcgctctcgcagtccctcgaccgctcgtcccggcagagcagtcgcagcacgatggtgaccaacgtggtggacctccggtcggacacggtcaccaagccgtccgacgccatgcgcgccgccatggccgcggccgacgtcgacgacgacgtcctgggcgctgaccccaccgcgcgccgcttcgaggcggagatggccgcgctcctgggcaaggaggcggcgctgttcgtgccctcgggcaccatggccaacctcgtctccgtcctcgcgcactgcgacgtccgcggcagcgaggtcatcctcggcgacgcctcccacatccacgtctacgagaacggcggcatctccaccctcggcggcgtgcaccccaggaccgtgcccaacaaccccgacggcaccatggacctcgccaggatcgtcggcgccatcaggaaccccgacggggcgctgctgtacccgaccaccaggctcatctgcctggagaacacgcatgccaattctggtgggaaatgcttgtctgtagagtacacggacaaggttggcgaaattgccgtgaaccacggcttgaagcttcacatcgatggagctcgtattttcaatgcctctgtggcactgggagttcctgtacatagacttgtaaaagctgccgactcagtttcggtatgcctatctaaagggttaggcgcacccatcggatcagttgttgttggttcagaggccttcatcgacaagagggcctcacgaaaattaaacagttcacggtggattcatcttcggtcgagaccaatatggtgttcttcgatatcgtggatccacacatttcaccgagcaagctatgccaagtcttggaacaacgcaatgttcttgcaatgccagcaagttcaaaaagtcgctatttcgcaagatcgtcgtggccctattgggaacggagatgctcttaatgaagtaggaggaccgaccaatccaactagcagcagcaggcggggagtggatgcgcctgctagaagagtgctagctccgcgcatacgctcgctcgacaaatgtgtgttgttaactattgtgtatagtgttataattactgtcctttattcctgatgtttgttttgtagttgaaactcacagtttttttcatttccatcactatttagtatgccgtgaccacgaaagattaaatgcctcttgcggtttctagatgcttttaattaagtaggagggccgcccaatccaattagcaccaccaggcggggagtggatgcgcctgctaaaaaagtgctagctccgggcatacgctcgctggacaaaagggggttgttaactattggggaaagggttataattactgtcctttattcctgatgtttgttttgtagttgaaactcacattgttttttcatttccatctcgattttgtatgccgtgaccccgaaagattaaatgttttcttgcggtttctaaaaaaagagctctccgctgacgaaaaagccccaacaaggacgaacgctatagacga

SEQ ID NO: 40735 - DNA, 999 bp, Zea mays
  Clone ID: MRT4577_137151C.1
gtggcccgaggctataacccggactcctcgccctcgtacctcgttgctggcgaagagcgtcatcaatggcgagtggaggttcactacacagccgccggatcttggagcatcattcgcggtcttggcgcgtctacgcaactgtatcctaagggcgtcgaagaggagagacggtacgccggtggcgacaaggtacgatagatttgaactggagtgtggaggtatcgtcggccagtgccatcagcgatgggtggaggtttccgtcgagtcgaggaaggagcgcttcgtgtaaagatgttgtttgtttattgttattatcttatcggaagtgccgtcaaggaagatgacgatggtggtagggatcgacgatagcgagcacaacttctacacgctgaagtgggcgcactgcagcacttcttcccgccgaccaagctgcaacactactgccttgttgtcgtcaccgccaagccctctgtcgcctccattgttcgccctgccaacctaggaaatcataagtggagattgaagttgatcaacttgacactcgaataaaagaatcaacaaatattgcaagtgctgaaagttgtgactgctcaagtccaattgctttatcacacaagttctggtggagatacttattctagaatcttcaaaagcatcaacgttagtgttcaagggactgattctggactttcaacttaatgcttctctacctgttgtcatactgaagctactgctcctggaagagcatcaccaacatatccctgatggccctctctgcttcatgctccaagcacttggatgttcaccttgaaatataattattaatagggactgtccaaatacttcagctaagcaaaatagcgacctccataaaaaagcaacctgtaactatctctgaaaattttgaaaaaaactgatggtaactgataagctgctgctagcaactaccgtcgcctaaaaaaaaaaaaaagcaaaaaaaaaaaaaaaaaatttgcggcc

SEQ ID NO: 40736 - DNA, 143 bp, Zea mays
  Clone ID: MRT4577_137152C.1
aataaggctgaaacgcaaacaaagagaaatttgttgggaacatacagtcccaatgacgctaaatcagctttcgcattataaaccggcaaaaataaattaaaactagcccattaggaaagaaccttggatcctccccaggacaa

SEQ ID NO: 40737 - DNA, 539 bp, Zea mays
  unsure (1)..(539): unsure at all n locations
  Clone ID: MRT4577_137153C.1
gccnnggccgggctgcngagactgacacccatacggacacacggactgccatgcaacccaccccagcgaacgactctcctggcacttgctctcgacttggccttgatcacgagactggaacctggtacatgggggctgactccgccctacagtgcactacactccaacaactgtaatacttcttgatccacatccacctgtccttccacatcttccttctgcattcctgcgcgagtcgacccattcttctgggctttcgatcgccttcttttcttgcagggcacagtgccagatacaacatcacgtgatgcaatgcgcacctataagctgcgtgagcagcatgccagcgctcatgatctgatgccccaggatgaacaaggatatgcaatcgctcgtggtgcactcaaattacatggtgagcgcttccaaactgctgtcaacgataatgatctgaaccctgtctggaatgaacgcttctacttccatggatcggatccttctaatcttcctgacatgccccatgcagcatatgtctacga

SEQ ID NO: 40738 - DNA, 494 bp, Zea mays
  Clone ID: MRT4577_137154C.1
aactatcagtccatctcaatctatattagttcttgaaggaatagtaaatggttctattgatggaaattggaattgagaatacatgtcttgacatatataagaacctgtttgttgtttgatgaactaggaaataactaaaaattatttggacagagacatcacaaatggatctgatcacaaatcacaaatgtgacaagcttgctaaggtgaaactgctaaagaagttgtatgactactatgccgcgggcacatgacatcaattgactcaaggagaaaagagaggcgtcatccaaaattctgagtttgttcgctctattagagcccagaggcggtactgggcgaggagctatgctggatggataaggtttaggagagcacaaccaaatgcagcccattacgatccttcccttctgtctgcgcgccttcactttcatctggcactgggagttcctgtacatagacttgtaaaagctgccgactcagtttcggtatgc

SEQ ID NO: 40739 - DNA, 980 bp, Zea mays
  unsure (1)..(980): unsure at all n locations
  Clone ID: MRT4577_137155C.1
gcgccgtgaggaggcagaaccgtgaccgcgcgcgccccgcctccccaccggtctcgcagtccctcggccgctcgtcccggcagagcagcctttaggccagacgaagctgtactgtccaaggatgcgacgaaacacccacacaccagtccatcgccccccgtcgtccgttccgtgggcttccgcaggtctatttcacccatccatcatcctaacaaaggactactctctctcgtcctcgtcccgcctcgcagtcgcagcacgatggtgaccaacgtggtggacctccggtcggacacggtcaccaagccgtccgacgccatgcgcgccgccatggccgcggccgacgtcgacgacgacgttctgggcgcggaccccaccgcgcgccgcttcgaggcggagatggccgcgctcctgggcaaggaggccgcgctgttcgtgccctcgggcaccatggccaacctcgtctccgtcctcgcgcactgcgacgtccgcggcagcgaggtcatcctcggcgacgcctcccacatccacgtctacgagaacggcggcatctccaccctcggcggcgtgcaccccaggaccgtgcccaacaaccccgacggcaccatggacctcgccaggatcgtcggcgccatcaggaaccccgacggggcgctgctgtacccgaccaccaggctcatctgcctggagaacacgcatgccaagtgagtcgcacgaattaaactaaattaaactgacgccaagtcaggccgcacgcacgtgtatatttgttaatgtgaatactcctcgtactactgtttctgcagttctggtgggaaatgcttgtctgtagagtacacggacaaggttggcgaaattgccgtngaacacggctttgagcttcacatcgatggagctcgtattttcatgcctctgtggcactgggaggtcctgtacatagactttgtaaagctgccgactcagtttcggtatgcctatct

SEQ ID NO: 40740 - DNA, 387 bp, Zea mays
  Clone ID: MRT4577_137156C.1
ccggccgggaacccacatgccgcagctgctcctagcacttcagcggccaatggctgaccggttcttgctcgagacagttctcataaatcatcgtgctcataaaagtcgcatggtgtgcaagccaggctaacgaatactgggccgtgtctactgcctaatagactctgggtttgtctagtgaaactaaggtatgccaagagcgctgctgggagaactatacttggaccggaagcattcgtatcaaaatattcaaatgccactgtctctaatagtggataaacaccgaagccctaccactgaacgactgccgttccatgcaccgcgatatgataccccaggggctatcatgctgtgagctagttacctccgcacgacgcatgagagagg

SEQ ID NO: 40741 - DNA, 216 bp, Zea mays
  unsure (1)..(216): unsure at all n locations
  Clone ID: MRT4577_137157C.1
cccacacgtccggcctcgccttcccttccccaccagcccgtctctctcttctctctgactgtctctctcntagccgcgtccacctcgcaacaacaagcaagcgccaccaaatggcgcctctaagagaccgcggaacttcttccccggcggggtccaacaacctggtggggtcgttccgcgagaagcttatccactttgtcccccacctggcccggc

SEQ ID NO: 40742 - DNA, 2067 bp, Zea mays
  Clone ID: MRT4577_137158C.1
aactatcagtccatctcaatctatattagttcttgaaggaatagtaaatggttctattgatggaaattggaattgagaatacatgtcttgacatatataagaacctgtttgttgtttgatgaactaggaaataactaaaaattatttggacagagacatcacaaatggatctgatcacaaatcacaaatgtgacaagcttgctaaggtgaaactgctaaagaagttgtatgactactatgccgcgggcacatgacatcaattgactcaaggagaaaagagaggcgtcatccaaaattctgagtttgttcgctctattagagcccagaggcggtactgggcgaggagctatgctggatggataaggtttaggagagcacaaccaaatgcagcccattacgatccttcccttctgtctgcgcgccttcactttcagcacaataatcaaaagtcatgtgaacacgtgcacagggtgcaatatgagcacaatgcaccacccttttggtaactgggctgatacattgggttggtggtggacctccggtcggacacggtcaccaagccgtccgacgccatgcgcgccgccatggccgcggccgacgtcgacgacgacgtcctgggcgctgaccccaccgcgcgccgcttcgaggcggagatggccgcgctcctgggcaaggaggcggcgctgttcgtgccctcgggcaccatggccaacctcgtctccgtcctcgcgcactgcgacgtccgcggcagcgaggtcatcctcggggacgcctcccacatccacgtctacgagaacggcggcatctccaccctcggcggcgtgcaccccaggaccgtgcccaacaaccccgacggcaccatggacctcgccaggatcgtcgacgccatcaggaaccccgacggggcgctgctgtacccgacgaccaggctcatctgcctggagaacacgcatgccaattctggtgggaaatgcttgtctgtagagtacacagacaaggttggcgaaattgccgtgaaccacggcttgaagcttcacatcgatggagctcgtattttcaatgcctctgtggcactgggagttcctgtacatagacttgtaaaagctgccgactcagtttcggtatgcctatctaaagggttaggcgcacccatcggatcagttgttgttggttcagaggccttcatcgacaaggctagaattcttaggaagaccctaggcggtgggatgagacaggttggagttctttgtgccgctgcttatgttgctgttcgtgacaccgtgggaaagcttgcggatgatcacaggaaggctaaagccttggcagagggcctcacgaaaattaaacagttcacggtggattcatcttcggtcgagaccaatatggtgttcttcgatatcgtggatccacacatttcaccgagcaagctatgccaagtcttggaacaacgcaatgttcttgcaatgccagcaagttcaaaaagtcgctgtttcgcaagatcgtcctggccctattgcgaacggagatgctcttaatgaagtaggaggaccgaccaatccaactagcagcagcaggcggggagtggatgcgcctgctagaagagtgctagctccgcgcatacgctcgctcgacaaatgtgtgttgttaactattgtgtatagtgttataattactgtcctttattcctgatgtttgttttgtagttgaaactcacattgttttttcatttccatctcgattttgtatgccgtgaccacgaaagattaaatgttttcttgcggtttctaaaaatatagctctcgacgtgtgtcgagaaagctgttgaagagctactgaagggcggtacaaagttggagcatttgacgaatggtactgccaaaaactcatattggcactagacgtcagcagggtgtcctgcttgtttgttatcaacgctagctgttaaaactcttctctattaatgaaatagggcacaccactcgtgtgcccgtttgatccaaaaaagaaaaagaagggcggccgctaaagaggacacaagaataagaacgcgcgcatgggaggaaagag

SEQ ID NO: 40743 - DNA, 1351 bp, Zea mays
  Clone ID: MRT4577_137159C.1
cattgggtacctcgaggccggccggggaaaccccacacaccagtccatttcacccatccatcatcctaacaaaggactactctctctctcgtcctcgtcccgcctcgcagtcgcagtcgcagcacgagcacgatggtgaccaacgtggtggacctccggtcggacacggtcaccaagccgtccgacgccatgcgcgccgccatggccgcggccgacgtggacgacgacgtcctgggcgcggaccccaccgcgcgccgcttcgaggcggagatggccgcgctcctgggcaaggaggcggcgctgttcgtgccctcgggcaccatggccaacctcgtctccgtcctcgcgcactgcgacgtccgcggcagcgaggtcatcctcggcgacgcctcccacatccacgtctacgagaacggcggcatctccaccctcggcggcgtgcaccccaggaccgtgcccaacaaccccgacggcaccatggacctcgccaggatcgtcggcgccatcaggaaccccgacggggcgctgctgtacccgaccaccaggctcatctgcctggagaacacgcatgccaattctggtgggaaatgcttgtctgtagagtacacggacaaggttggcgaaattgccgtgaaccacggcttgaagcttcacatcgatggagctcgtattttcaatgcctctgtggcactgggagttcctgtacatagacttgtaaaagctgccgactcagtttcggtatgcctatctaaagggttaggcgcacccatcggatcagttgttgttggttcagaggccttcatcgacaaggctagaattcttaggaagaccctaggcggtgggatgagacaggttggagttctttgtgccgctgcttatgttgctgttcgtgacaccgtgggaaagcttgcggatgatcacaggaaggctaaagccttggcagagggcctcacgaaaattaaacagttcacggtggattcatcttcagtcgagaccaatatggtgttcttcgatatcgtggatccacacatttcaccgagcaagctatgccaagtcttggaacagcgcaatgttcttgcaatgccagcaagttcaaaaagtgtcaggttcgtcatccattaccagatttcagacagcgatgttcaatatgcattgacgtgtgtcgagaaagctgttgaagagctactgaagggcggtacaaagttggagcatttgacgaatggtactgccaaaaactcatattggcactagacgtcagcagggtgtcctgcttgtttgttatcaacgctagctgttaaaactcttctctattaatgaaatagggcacaccactcgtgtgcccgtttgatcc

SEQ ID NO: 40744 - DNA, 460 bp, Zea mays
  Clone ID: MRT4577_13715C.1
ggagaagtaatattccattctaaactagaacatttcatggttacgacttacaccaatatacacacgaaccctaaagtgtctagtgtgttggaccatagaaggcccataacacaactagacctgagcatgggctacacgacctgacccacctgaaaaaacctagacccgacccgaccaatgcgacgagcggacacgtgccatattttttgacccgcaacaagtcacgagtcgggcacgagccatgatttttgacccaaaacccaacccaaaaaaacctgactcgatgtgtccatcaggaaggcatgggccaacccgaccgacccgacactatgcacgggtcaggcgcgggccaagccaaatgacccacgacctaaccttgactcgacctgaacccgacctgtcccgacgtttgaataggtctaaacccaaccgtaaacaaggctgtttaacccccccccta

SEQ ID NO: 40745 - DNA, 1040 bp, Zea mays
  Clone ID: MRT4577_137160C.1
ggctcgccggagacgcccgttccctcttccgggcgccgcctgcgcctctcgttctctatataaaacaccgccgccccgcgtccgcgaaggccgggaccgcgcgcgccccgcctccccaccggtctcgcagtccctcggccgctcgtcccggcagagcagtcgcagcacgatggtgaccaacgtggtggacctccggtcggacacggtcaccaagccgtccgacgccatgcgcgccgccatggccgcggccgacgtcgacgacgacgtcctgggcgctgaccccaccgcgcgccgcttcgaggcggagatggccgcgctcctgggcaaggaggcggcgctgttcgtgccctcgggcaccatggccaacctcgtctccgtcctcgcgcactgcgacgtccgcggcagcgaggtcatcctcggcgacgcctcccacatccacgtctacgagaacggcggcatctccaccctcggcggcgtgcaccccaggaccgtgcccaacaaccccgacggcaccatggacctcgccaggatcgtcggcgccatcaggaaccccgacggggcgctgctgtacccgaccaccaggctcatctgcctggagaacacgcatgccaattctggtgggaaatgcttgtctgtagagtacacggacaaggttggcgaaattgccgtggaccacggcttgaagcttcacatcgatggagctcgtattttcaatgcctctgtggcactgggagttcctgtacatagacttgtaaaagctgccgactcagtttcggtacgttctcaagtcgctgggttctgcggtcaattcgcaacaggcatgcgtatgaaatgaccgaccttcaggtagtaacatatgcgggcggtgattctactcatttctctgaaacattatgcgcaggtatgcctatctaaagggttaggcgcacccatcggatcagttgttgttggttcagaggccttcatcgacaaggctagaattcttaggaagaccctaggcggtgggatgaggcaggttggagttctttgtgccgctgctt

SEQ ID NO: 40746 - DNA, 232 bp, Zea mays
  Clone ID: MRT4577_137161C.1
ggcacatcgagatcaccatcgtgcacactggcacgtgcactagcttaagataaaccacagaccaccaagccgtgcacgcattatgcagtacggtcagcatggtctgcgcgaacaccgcgccactggacttgtacaccagtacgggcacccagtaggcggagttatcaaggcacccgaggacgaggcacgctcgagaacacacgaggatgggccactagggagcacggatgac

SEQ ID NO: 40747 - DNA, 625 bp, Zea mays
  Clone ID: MRT4577_137162C.1
atcaaaggagcagctctcaagaattctgccaattgttgatgctacctcttccgattctggcgcatttgataatgttcttgagcttcttgtccgaggtgggcgaagcctgccagaagctgtgatgatgatgatccctgaggcatggcagaatgatgtaaacatggatcctgagaagaaagctctctacgagtttctgtcagcacttatggagccttgggatggacctgctctaatatcgtttactgatggtcgttaccttggagctaccctggaccgtaatggtttgaggcctggtcggttttatgtgacgcacagtgggcgtgtgatcatgggtagtgaggtcggtgttgttgatgttcctcctgaagacgtgctgagaaaaggcaggctaaaccctggaatgatgttattggttgattttgagaatcacacctgtagtggatgatgaagctctgaaagcccaatattctaaagctcacccgtatggagaatggctcaagagccaaaaaatatacctcaaggatattgtagaatcagtaccagaaaccgatagagtcgctccaagcatttctagctcactttcacaaaagaatgagaacatagatcatgttggtatcagtgggtt

SEQ ID NO: 40748 - DNA, 322 bp, Zea mays
  Clone ID: MRT4577_137163C.1
cggacgcgtgggttcactacaaattcatttcagacaaaaaaaaaaaaaccggcgggggaacaaatgctgttggggggctaacaaaaccctggtgccctgcatcaataccctcaagcctcctatctttgttctatagcaacgagtccctgtttgattctcaatatgaggttcccgatcgtgctacactctatgtccaaacccttagctgcgaacctgccattggctatgatgagaaggctgtgaaagacttcctctttaaatctcttgatgtgccattagccaacctggacacaggcctcactacttatgaaccttccgagga

SEQ ID NO: 40749 - DNA, 682 bp, Zea mays
  unsure (1)..(682): unsure at all n locations
  Clone ID: MRT4577_137164C.1
ggggatttgganggtttgaggnanngctgcgnggaggcaccgagggggatgtcgtggnatnaaaccctcctggagggntactctggnatncgtttcgagatnctcgaggncatnannaagntggtnaanancggggtcaggccgtgcctaccgcttcggggnaccatcancgcgtggggggatctgggcccggtctcctacatcggtggnctcatcacgggccgncccaacgggnaggccgtcaccgncgacgggaggaaggtggacgccgncgaggggttgaagatcgnnggnatcgagggnggtttcttcaagctcaaccccaaggaggggntcggcatggncgangggagcgtnggtgggttccggactcgcgggcaccgtcatgtaacgaccgccaacgttctggacgtactctccgaggacctgtccgccgtcttctgcgaggtcatgaacggaaagcccgagaacaccgaccaccctcacccacaagtacaagaaccatccggggaccatcaaggccgggaggcatcatgaaaggacatccttagagagaactccctttcatgaaaggaaagacaagaaggtaaaagaagtgggaaccgctgctgaagccccaaagaaaggaaaggggacgagcacccgcacgttggccgcaggggtttcggccccccagaaagag

SEQ ID NO: 40750 - DNA, 222 bp, Zea mays
  Clone ID: MRT4577_137165C.1
ggaaatccctagggacctccatgcccactaatagaactgaactctcagcaggcccttctccaagtagccaaggtttccgcccccccaccccccaagacccccaaaagcaagggggggcgcacatcaatctttctctttctcagagtggggtcccataatcaaaagccgagctttaagaaggcctacaaaaaaaaaaacatgttcccactagagcaccgccct

SEQ ID NO: 40751 - DNA, 637 bp, Zea mays
  Clone ID: MRT4577_137166C.1
tttttttttttttttttttttttccgggttctttctgagttcaataattatcggttgtgtgaagtaatcttatcttatatacatcctatatacatgtggaatacatctgctacaccggaggctgtgggtcgttcgaaggcacttccttcgtaggcggaaccgtggccctacacagaggacacgtggagtgagagtgcagccacatgtcgatgcagcagacatggaacaggtgagtgcacgccggcagccgcctgacaacctctgccttcctgcacaaggctcaggcacaccgcacactgcgcccacccgcgcccgctgccgctgccgctgccctcgccacggccggagccgccgccaaccggcaggcccctacggaacacgaacgacggcagcgtggacaccgcggaggggctcagcccaccgtcgccgtcgtcggtggtgctcggcaggaagaacggccgggccgccacgtacacgacggttccccccgggccacggcggcggcggcggcagcacaggcattcgcagaggacgatgatgaggacggagacggcggtggcgcagaagccgatggcgaggagcacaagcgtgtcgtgcgtgctgtatccgcccttgtccgtggagtatggcatcgagt

SEQ ID NO: 40752 - DNA, 508 bp, Zea mays
  Clone ID: MRT4577_137167C.1
ttttttttttttttttttttttttttttttttttttttttttttttttttttttttttttttttttttttttttttttttttttttaaaaaaaaggggcctctccctttttttcaagacttgggttttggttgccgatcttgggatcccaaaaaattccggggggcaaaacaaatttgggggggccctgggcgggcccaaaaacaacaaaaaaacccccctgtttcgggaacccatgccccgcccgggttttaaaaccctaacccaaaggagttaaacttttaacccccccttggggaacaagggctctttttttatttcgggggagctttttttaaccggggcccaaaactttttaagggtcggggcccctaaattcaaggggccctttcttttttggggccccccgaaacttacaacccccattgggctgtggattttttcccctaaaaatttccagttaaccctttttggagagatgctttttcttcctccttcaaagtcaggcc

SEQ ID NO: 40753 - DNA, 262 bp, Zea mays
  Clone ID: MRT4577_137168C.1
aacgaccaacccgcagaacaacacacacaccaacaccagacaaaaaagcaccacatttaaacttaaaagcgcacacaggagaaaaaacaggaagagcgtgataccaaaaaccaaccccaaaagaacccggagaacagacagacaaaaatgagagcgaggagtaacccccaggcccgacagcgcaaaccggcacgaccaagagagaaacgcgcagccgcaaggaaacccacgaccacgcagaaaaacacgcgcccccaaaaac

SEQ ID NO: 40754 - DNA, 1033 bp, Zea mays
  Clone ID: MRT4577_137169C.1
attctctttcattatacacacaagactcacatattattaattccgcacaatacataataatgtgttgtagcattacacataataccaagtttaaggtttccacaaaatgtgcacgtccttagaccacatttcattgtttgatgtggttcaagcaaaagagctgcgcaagcctatgtcctaactgccctcacactcctaggtacacataagatcaagttcaaggcttttccacaatccatacgtacatagatcacaattcattgttcgatgtagttcaagcaaatgagccgcccaaatctacatactaatttccctcacactctagagaacttctcactggcgaaattgcgagcccaaattaacttgtggtcgaacggcaacttgttgaaggctctagcaatgtgagggtgcgccaccaaataattgaaatacagagatatgtgggtctgctcaaaacctggaaggtttagcaaattgtcaaaaagatcatctggtacatcagtgtcccatgtggcaaccttctcaatagcattggatagcttatccgcgacacttttgaatgcagcaatcaactcctcttcactgtcacgtttttttgccttcttgttgctcttgcttgcagaagatgttgcgacattatcatcacaagcgaactgccttttagtgaaagcacgtgccgtcacctcttcattttcagtttcatcatcttcacctagacctgcactggaatcctttgcaaacttacatgtggccatggtatttccaaatattgtttgcatctcatcaaagtgttcaaaaggcttgtttaaacaatcagcatcgcttttgtcatccttgcaacttgagcaaacaaatccgatttgaaaggaaaggctggaggaggcttgactccctttgagggcggatcgagattcgcaggggatggatggccggggcaccgagccccgcggctgggtagactcgccggcggcggacacgggatgaaggaatggatgtttggtttatcccactcccggccgaacccgggggtacc

SEQ ID NO: 40755 - DNA, 379 bp, Zea mays
  unsure (1)..(379): unsure at all n locations
  Clone ID: MRT4577_13716C.1
cttccccttaaaatccccggggggtggggtgcctccctngcngcgggggccgtgccgngtcgcgcgccctccctcccgggtgtgcccacgtggtggctccgcgccccggtcctgggtggccgcccgttctccttctctcttttttttttttttctttcggggangcttgggggggtggggcgctctcttctttgttgtcgggtccgggcgggcgggggggggggtcctcgctggcgcggggcggtggttgccnccgtggtgggnctgccttctgtttttgtgggtggagcctctgtgccgtcgcttctggcgctctctcccccttttggtgttgtcttttgtggggtgggtgctggttttcttgttctggtgggggtgg

SEQ ID NO: 40756 - DNA, 334 bp, Zea mays
  unsure (1)..(334): unsure at all n locations
  Clone ID: MRT4577_137170C.1
tccggaagagccaacgtgctcgatctccatctcgaccgtcgctctccgggaagcgctacgacgaagcatggcgtccgtcaccgcccgcgaacccggtcgcggacctgcgcccggcggcgtctctcgagtcggcgtcggcggcgccgccggtcgtccttggccactctagcggcgtcggcggggctgctgccgcggctgcgaggaggcccgnggggaggcggaggccaggtcgagtggtgcccgggncttccctcccgcgcactacgcggcggcagcatgccgggtgacggtggcttagagctcgctggaactggcaggaggacccgcaaggcgc

SEQ ID NO: 40757 - DNA, 824 bp, Zea mays
  Clone ID: MRT4577_137171C.1
ggccgcttttttttttttttttttggcaaattgtcaaaaaatatgttacaatagttttcaggttttaggttacaatagtttttattggacaaacagataaatagaaaataggttacaacatctgaagttaagaacagagcacacacacctggaaggtttatcaaactgtcaaaaagatcatctggcacatcagtgtcccctgtggcaaccttctcaatagcactggataaggtatccccgacacttttgaatgcagcaatcaacccctcatcttcactatcacgtttttttgccttcttcctggtcttgcttgtacaagatgttatggcattatcatcacaagtggacttccttttagtgaaagcacgtgccgtcacctcttcattttcagtttcatcatcttcacctagacctgcactggaatcctttgcaaacttacatgtggccatggtatttccaaatattgtttgcatctcatcaaagtgttcaaaaggcttgtttaaacaatcagcatcgcttttgtcatcatgcaatggtgcataggtaatctgtgcgctccttgcatttcgttttctttttctagacgcaataatcacggccatcattgacagtaagttatgtgcagcagcaacacaaactgcaaccttggtcctcttatccatcttgcaacttgagcaaacaaatccgatttgaaaggaaaggctggaggaggcttgactccctttgagggcggatcgagattcgcaggggatggatggccggggcaccgagccccgcggctgggtagactaaaccggcggcggacacgggatgaaggaggagtt

SEQ ID NO: 40758 - DNA, 380 bp, Zea mays
  Clone ID: MRT4577_137172C.1
gaaaattacaacaacctaactaataactggtatgtatattgggctctgtcatatgtatgtattgcataatagtatattattattgatctcttctcttctctcttttttttttgcttgatctagaacatcattggaaccgacgagcagcagtcttcggacagatccatgaggtcgccgacctgctcggcagcctcttcgaacagccacttctcgatgggagacagcggggacggctgcaggtgctgccggctgctgggcccgtcatcgtactcgccgtgcccgcccatcagcgccgcctgctgctgctgcggcggcggcggcatcatgtcgttgaagtaggccgctgaagctgcaggtggcgtgccagtgccggtgccggc

SEQ ID NO: 40759 - DNA, 1222 bp, Zea mays
  unsure (1)..(1222): unsure at all n locations
  Clone ID: MRT4577_137173C.1
gtggggtcctagcattacacaacaaaaaactggaattcaaccaaaaagcttatagccattgcccccatctcaggatatgttacaactaatattaagtccacaaaacacatattattaactccacacagcacacataataatgtgtcctagccttgcacataatatcaagttcaaggcttctacaaaatccacacgtacttagcccacaattcattgttcgatgtggttcaagcaaaagagccgtccaaatctacctactaattaccctcacactctagagaacttctcactggcgaaattgcgagcccaaattaacttgtggtcgaacggcaacttgttgaaggctctagcaatgtgagggtgcgccaccaaataattgaaatacagagatatgtgggtctgctcaaaacctggaaggtttagcaaattgtcaaaaagatcatctggtacatcagtgtcccatgtggcaaccttctcaatagcattggatagcttatccgcgacacttttgaatgcagcaatcaactcctcttcactgtcacgtttttttgccttcttgttgctcttgcttgcagaagatgttgcgacattatcatcacaagcgaactgccttttagtgaaagcacgtgccgtcacctcttcattttcagtttcatcatcttcacctagacctgcactggaatcctttgcaaacttacatgtggccatggtatttccaaatattgtttgcatctcatcaaagtgttcaaaaggcttgtttaaacaatcagcatcgcttttgtcatccttaacataaccattatagtgctcttcatccagagtaataacaaaattatcttcatcccagcctgtaccactcacatgcaatggtgcataggtaatctgtgcgctccttgcatttcgttttctttttctagacgcaataatcacggccatcattgacagtaagttatgtgcagcagcaacacaaactgcaaccttggtcctcttatccatcttgcaacttgagcaaacaaatccgatttgaaaggaaaggctggaggaggcttgactccctttgagggcggatcgagattcgcaggggatggatggccggggcaccgagccccgcggctgggtagactcgccggcggcggacacgggatgaaggaatggatgtttggtttactgcgaccactttttagtcatttaatttttcccggccgncgcctcggaggaatac

SEQ ID NO: 40760 - DNA, 1181 bp, Zea mays
  Clone ID: MRT4577_137174C.1
cacttccctcttcccgcccactcgccaagacaaacgcggcggcgatggccgtccaggcgcagcacctgttcgcaccagccttcctgccccacgacgtcggccacgccttgagggcgttggagggtgccgcggcagtcggtggctccgcgctcctggacgagctcggcctcggcgggtgcgcgccggcgccggcgccggcccccctcggggacgcagcgatcggcggcgcccagccgcgcagcgagctcacttgcaacgccgccggtgacaacagcgtgttcctcccgaggaagcgggcacgcgttgtgccggggttcctgctggacgacgtgcagaacaggtgcggcgcggcgtccaccagcggccgggcggcggcgtccagtggcgtcctgtcgcagctgtaccaccagggcgtggaggtcgacgcgctggtgcgggtcgagacggacaggatgcgcgcggcgctccaggaggctcggcggcgccacgcgcgcgcggtggtcgcggccgtgggtcgcgcggcgcggagctggaggagcggctccggcagctggccgccgagggccaggcgtggctgggcgtcgccaggagccacgaggccgtcgccgctggcctccgcgccacgctcgacaaggtgctccagcagtcccccgccgccggctgcggcggcggtggcggtggcggcgaggcggaggacgcgcagtcctgctgcttcgtggcatccccgtcggggccggtgtcgactggttcgtcgccgtcgtgcaaggcctgcggcggcggcgacgcgtgcgttctggtcctgccgtgccggcacctgtgcctgtgccgcgcgtgcgaggccggtgccgaggtgtgccccgtctgcggcgccgtgaagaacgcctcgctccaggtcctgctgtgacggcgaggaggcacaggcagcggaagggagtcactccagcttgcctcccgctgtgccccccggtaggtgagtcacgacaccggggtcaggcatgaaacttttgttggttagtagcagtagagagtagccccgttggagtagaatcatgtagaaatgcattttggctagtttattagacaacccagctggtttatatgtccaaatcccagacttggttcacaactggagagtatctcatgtgtaatacaaccacacgacatagttccggtttgctcat

SEQ ID NO: 40761 - DNA, 1099 bp, Zea mays
  Clone ID: MRT4577_137175C.1
aacccaccgagatccaaataatacaaacgtaacatgaaaagattttttttttttttttgagctaaaaacgatatcaatgttcataaatatatcccatgcaaaccaaacatacaaaataatagaaggtcaagttctatgctaagattcaccaaaataattggagcgtagaaaggatgaattaaaacaagataatgagggtgtaaaaaattctactgtcatggtgtaccttgtccatcatttgtgggtactggacgtatctgtcgtatactgctcaagagtggactatgtactgggggtgcattgttctaatgcttgctgtcaacggggaatggacttgcgaaggggtcaacggatactcgagcacctgaccttgggcggtggcagttgcctagtcgtcaactcatcgccaaaagtaaagactaaagctaaagcagtgggctggaggccgattatcagtggtagcgacgacctgggcgaagctcagtccattttcagaccatatgcattccatgtcattaagcataaaaacgatatcaatgttcataaatatatcccatgccagattatcccatgcaaaccaaacatacaaaataatagaaggtcaagttctatgctaagattcaccaaaataattggagcgcaaaaagggtgaattaaaacaagataactagggtgtaaaaaaaattctactatcatggtgtaccttgtccatcattccgaaaacatataaaactgattcaatgcatatccttcacactagaaactctaggacaagtcatggacgatttatttgatatcggcaattttaatatgcagacatcaaaatctagtttgccttctggatacttgggtagtagatcacaaaaacaaaaaagcatatacttactggaggtactgggcatatctgtcgtatattgctctagagtggactacgtactgggggtgcattgttctgaaaaggaccaattcaaatcatcgtaaaagcataaaaggaagaacaaaaacaatgtaggagaattggtctacgtgtttacaacgcggagcgtacacgagatctgataattgagcataataacacattaaaattagcaggaataag

SEQ ID NO: 40762 - DNA, 609 bp, Zea mays
  Clone ID: MRT4577_137176C.1
aaaagcgaagagtgtggaagcgtctcgttctcttttcttgcttgtttcccaagaaggagaaggagaagagcggcggcgtctgatctcgtcggcggcggcgatggcggcgattcggcgtctgatcccgtccttcaaccgggtgctggtggagaaggtggtgcagcccaagaagagcgccggcggcatcctcctcccggagacctccaagcagctgaactctggtaaggtcatagctgttggccctggcagccgtgacaaggaagggaagctgatccctgttgctctcaaggaaggtgaccatgtgctcctgcctgagtatggtggtcttgaagtcaagcttgctcctgagaaagagtacctcctctacagagacgatgacattctgggcaccctccacgagtgattcagatggtgcggaagtcatcagcttctttaatgcaggagaggatgttagagtttccatgttatcggataaacctgaagtagaactctcttttatggtgtgatgatagatttttacctcgaacatcatgaacttatatgattgttgccagactttctgtcgtgatgcagttcagtaaacttgcagctgaagtgctgccttaattt

SEQ ID NO: 40763 - DNA, 338 bp, Zea mays
  Clone ID: MRT4577_137177C.1
tttttccttttttgtttttgttttatttttttttattttttgaaaaatgttgtgtggttttttctcccccttttttttcctttcccccccccttaagccccccaagttacccccctttttcacggcatttccaccaaaattcccctactccggttccctgtaggggaaaataaagggggacctcaacgcttcaaaacaagaaacttggttcccaggggggggagaaaaaggttgcttactctcttttatgaaccggtttttctgttcccccccccagtttttttccccttgccaggccctgggggccctttccccttttgtttaaccaaccctcaaat

SEQ ID NO: 40764 - DNA, 324 bp, Zea mays
  Clone ID: MRT4577_137178C.1
gtttcgcctccttgttttactccaagtcctaagcgagcttgggggccgccatgatgcaacatccgccgccacattagcaacaggaacgggcaatggcgccccagccctagcaggaggactaccatgcggcgcaccctccgccgtcgtaccaggaggtctactaggctggcgctatgtgtggccatatgtgagggcaagcggcaccggaggcggcggcggcccccgctccggccggcgacgaggcgagggacctgtcgaggacccacctgaacggctacctggattactacatcgattataactacttttttaggtgtttctacg

SEQ ID NO: 40765 - DNA, 374 bp, Zea mays
  Clone ID: MRT4577_137179C.1
aacattccccgggggcagaaacgggggggaaaaaaaaccccgtccaaaaagggaccccccccccaaccccaggggaagacaagggggaacttgtttccccccccttggggaccatttccccccatttaaaaacttcccatgccccacccttggggaggctacaaaagatcaacttttccaaaaaacgcataaggctaaaatgattttgggggaacgtcactgggcccttccgggataaaccttccaccggtacccatccaaaaagggtccttggggggttcggggttcaagtaaaaaaaaatgcaaaggggtgggggggccttccaaacccaccaaggggaactttgctctgggacccgggggtcgacccggga

SEQ ID NO: 40766 - DNA, 393 bp, Zea mays
  Clone ID: MRT4577_13717C.1
gccaccctttcttattatcacttttttttttctttttttttctaaaaaccaagggggattctaaaatttcttgtctcggtagactcaccccctaacatattcaccttcttgatcctaaacatatttgtgcttgccgcattacaagcacaactgaatatcatttttacatttggacagtcctcatacaaacattcacattgtatctccacggaaaatggtgatgtactaggccaagctaatctaacattcgactcacttatcatcaattcctaccaaggtcttgataccatacttggtcatctattctattaaccactcgtaataacttttcatcaagggctttaactactacgacttccttattttatctgagatcctttttttttaaacttc

SEQ ID NO: 40767 - DNA, 400 bp, Zea mays
  Clone ID: MRT4577_137180C.1
gctattttaaaaatggctaagatgaactagccccttccaaaattattgaagagtatgttgccgagcagaacatcctagactcctttgctagaaagatcgcaatgaagatcaagtcaaccttaggtagagtaactcagcgacagtatggtccaaggaagacaatccgaagggatcatcaaggtgctcatgatcgtctcgtggaggactacttcgctgaagaaccattgtaccctgccagtatgtttcgtactagatttcgtatgaatagacccctgttcctacgcattgtggatgctcttggtaggtggtctcccttcttcaccttaaagtcagattgtgctcgtcgaatagggctctcaccattgcaaaagtgtactgcagcaatgcgtatgctagcata

SEQ ID NO: 40768 - DNA, 588 bp, Zea mays
  Clone ID: MRT4577_137181C.1
tgtcgctggacggtgcatcagtcccacatttttccttacaagatggcatcctccggtacaagaacagagtttgggtaggttctgatgttcctctccaccacaagctggtagcagcatttcatcaaagcccagttggtggccattcgggtgtgcccgttacttacaggaaaatcaaacaagttttcgcatggaagggaatgaagacctttgtgcaaaactgggtagcttcctgccttacatgccaacaagcaaagccagaccgatccaagtaccctggtcttcttcaacctctgcccataccaaagacagcttggcataccatttcaatggacttcattgagggattaccacgttctcagcgctatgattgcattttggtggtggtggatttgtttaccaaatatgcacattttgttaccttatcccaccccttctcagccctcacagttgctcagtccttcttcaaacacatatacaaattacatggtctgccatctgcgattgtgtcagatcgtgataaaatcttcacaagccatttttggaagcagcttttcaaactcgcaggagtcagtcttcgcatgagcagct

SEQ ID NO: 40769 - DNA, 275 bp, Zea mays
  Clone ID: MRT4577_137182C.1
tgaggtacaacggccggacggccggagccttcgctgatcctcggtaacggggatacgcggggtacgaagctacactgaatagctatctgtgctgtccaccaaccgagcggcgacacgacgccgtgagaacaccgctcaatgaggttgtgtgcgtcccggtagcgactgctgggccaagcgtggctgcagatcaagccacgagggctaaagccgtctactgctaccttatctaactggatcttattggtttcggtgccgtttgaaaaagctatctc

SEQ ID NO: 40770 - DNA, 271 bp, Zea mays
  Clone ID: MRT4577_137183C.1
accagtgccacttttcatgctttccctccagagcctactatgagctttcctttggtacctgggtgtaatccctgacttttagcatccttataatttgataaggccacgctttcccatgcttccctttccacaaactttaatgataggaactggaggctgggtgggtttcttttgcccttagccagttgaataggggaagggcagaatatagcataagaacagaaggtttaagtcacctgaaacttgtgcgggtttgctctgagctgtctac

SEQ ID NO: 40771 - DNA, 280 bp, Zea mays
  Clone ID: MRT4577_137184C.1
cccagcgtccgcccaaacgtagaacatactaggatgcacgctgcgtaaccggctgcgccattatggacttcggcttgagaacgagagctaagtgcataagaactggagccgcgcgagccgatgctcaaggctcatgaagtcgatcgtagaccaggtcatggattatgagcacaacgttggccatgctatgtagatatgatgaatgcgtcatgaccaatttgatgaagcataagattgagtatcaagatttatttggcacacagcttggcgccaaatcggg

SEQ ID NO: 40772 - DNA, 552 bp, Zea mays
  Clone ID: MRT4577_137185C.1
ctgttgtccattatggaaccatgcatttgtggaatttattgcttatattatccatttgtgtgcgagcttctaggacaactacatatagtcaatcaaaatggataacaccataaagtttacctctaaggcttctaaaagcatctaggcccctagttgatttctggtgattaatgacaatataatattatggtggttaacatagattttggagaaacaatgtaagcttggtcatgataatgaagaacaattaggtttatgtgatattattcccttactaatagaaatcaactatcttttcaaatgatgaacgagaagattaaagattaactagttataagtgtctatggagttgtcagtgtaacactctgggtgttttgcatactcatacattgcatatgcatcacgaaagcattatcatgagcatcatcaatcattcactacccatattagaatctagaactatctctattcattgtgaagtgaactcttgtttgaaccaataagatgcctatgttccatggttgatatctaggttgataatggttgatatct

SEQ ID NO: 40773 - DNA, 582 bp, Zea mays
  Clone ID: MRT4577_137186C.1
gggtacacctcgggtccggccgggacctctgcgtgcacgccggcgagctctggtccgctagcgtaacttcctccgcgcatgccgccatagcctttatgaagccaccgaacccccccccccccccccttaaatggtctccattgacgtccatgcattggatgcacgaagccatagctgcgacaagcagagggcagccgctaccgtggctacctaacttgcacaccacttggagaccaggggggcaaccggggcggtttgccgagcgccctggttaagcgcgcgtgggctccttggacgaacaacaccactgggctcgcccgctttcattgccagtgattggagggagccaacaatccgcgccacgccgaggccgggttgggtcacgtctttatctactgctccaccgttcggcgtggcgctgagacgctggtccatggcccccgttcgatgtacatccacggccctgaattagatgagcgaaaatgagtggtgaactgatgtccgagggcgtacaactcagatgagctaacacggacccgttaagcgaggagggactaggatacatacataaagggtggcctt

SEQ ID NO: 40774 - DNA, 607 bp, Zea mays
  unsure (1)..(607): unsure at all n locations
  Clone ID: MRT4577_137187C.1
tagacaaccgnnaagtgaatagttttcgaggatatgtctccacccatgctctgcnntgctactattaagggtttagggcccnngctgcgggccggnactcggnacagnaaaaacgnnagccctcgggcttttctaggctcggagcagcccgtttggcgatctctagactagaggtagcaccaatcgaagaaaaactgtgtcagagaatgagactgcttgttgtattgcataggagatggtcacatatatatagggagactcaagggaaaccctaaccataatgggctatggtggcacctacacatacatataggaacacacactctaacaaaaacttgtcctacaccgattgagatggtttagacatgttaaatggagacctctagaggccggtgcgtagagacttgaaaggatggaatatacccaatggcttagccttgaataggagctaacagaaaatagttatccacgtacctgaaccttgaattttgtggcttctattgggattcaacactagcctaccccgattttcttgggactaaaagactttgttgttgttgtagcactgggaaaatttcctcttcgctgtgccatgcgcttccgcttc

SEQ ID NO: 40775 - DNA, 352 bp, Zea mays
  Clone ID: MRT4577_137188C.1
ggggagggtttttgttttgaacaccaaccccaaaaaatggatgcggcatttttctttttaacaaaaaaaggggagaaaacctacattgacggtaaccaatgagctgatgaaaaaaaaaattcggggggcgtgaacataaaaaagaaaattggggcccccattggggaatgtccagccccaagggaacatttgggtatgacccccccaggggggtaaaccccaccagaccacctgggctttaaattggcacccaaaaaaaaccctccacggttcccggggggaaaaccgccccttatttttgggctgagcacataggggcctttacctccgggcaaaaaaaaaaaatttttgg

SEQ ID NO: 40776 - DNA, 166 bp, Zea mays
  unsure (1)..(166): unsure at all n locations
  Clone ID: MRT4577_137189C.1
cgaaacctaaaccctagcaatccggaatgggaaagtccgttccgatcctgatagaatcctcgaggatttgggggttttcttttttttttgggggtagnttttgggttgcggaatccaaaggccgcaggcggaaagcacgcggggggacaactttttcccccgggtc

SEQ ID NO: 40777 - DNA, 295 bp, Zea mays
  Clone ID: MRT4577_13718C.1
ctcgttcagtggcaagagtttgctggccagaatcctgactgtcttgagcatctggctgccagctcaggcacaggctcttctgactttgagcagctggaacagatcctgtaatgtattccccaggtgaagtatatatgcctggatgtggcaaatggctactctgaacactttgttgaatttgtaaaagatgtacggaagcgcttcccccagcacaccatcatggcagggaatgtggtaacaggagagatggtagaagagctcatcctttctggggctgacatcatcaaatgtggga

SEQ ID NO: 40778 - DNA, 549 bp, Zea mays
  Clone ID: MRT4577_137190C.1
aacacacagctacgatacaatacatggcggcgacgacgacggcgagcatgatggcgcgggtggatcggctggacctgctgctgggctacctggaggagatgcaccgcaatggcaacggcaacggcaacgctagtcctcctagtgctacaaccgcatcatcaccctccacccttgccgccggcggagtccatgtcatcagcagtgacgacgacgtcgacgtcgactcctccaccggccccagcacgccgacctggcgccggccgcggcccgccaaggaggtgctggaggaggcgcaggccaaaggaagcctcatcgaccgcatagcctctctggaacaccgtgtgctcaagatggaagaggacatggaggtcacaccagcgaacacggagaaggctagccaccagccgagagcgacgatgatgatgagcaagaacgacgatccaagcagcaggaagaagaagaagaagaaggggctcaagagcttggtcaagtcctgcctgcgtcatcagaggcaacctcaaaccttttaggcgtttcgctgctgcagct

SEQ ID NO: 40779 - DNA, 1604 bp, Zea mays
  Clone ID: MRT4577_137191C.1
acaatggtctaaagaaagaaaaaacaccctgtcctcaccagttcaacgcctcttctccgttcaccggcgtgtgctctgcctctctctctctctcgtgcagcgaccgccgacgcgcttcgccagaccttcgccggcgacgagcactcaccagggcttgaaaatgtcaacaagcactttgaaagaacccaatgtttctcaatcaaaagacgtggagaatggaaaagacaattctgtgaaatcctgcatcagcaagcctgtgttgaatggcaacaaatgtgccaacaaggaacaaaatgttctgtcttgttgccctggcgctgtgacaaatggaaacgaggctggaaatgcagacgtggagtacattgattctgagaatctagtagatctaccagatgttgatgcaactctatgtaccttagttaaaaggttggattcaaaggactgggttatgacatgtgaagctctcaacaatgttcgtcagttggcgatgtatcacaaggaaagattgcaggagctgctggagcctctagttcctcttatcgtgaaatctgtgaagaacccaagaagtgctgtatgcaaaacagcactgatgacttgtgctgacatctttaaggcctatggtgacctactggttgagtctattgatccactgctagtgcagctgtttctaaaggcttcacaagataagcgttttgtctgtgaagctgctgaggcagctcttacatcgatgacaagttggatctccccattactactgttaccaagaatgcagccctacctcaagaacaggaatccgcgggttcgagcaaaagcatcagtgtgtttcagcaagagtgtaccttgcttagatatgcagggagtcagagaatatggaatggataagctcgtccagattgcagcaacccaactcagtgaccagcttccggaatcgagggaggctgctcgcaacctggcactggaactacaggtattatatgagaagtctcaggcctccacctctgacgaaaatgagggcgaaccttctgtctcgcaagatgctgagtcatgggaggccttctgtcagtccaagctttctgccttaagcgcccaagccatccttcgcgtgacctctactactccaaaagagggtgtcgcctctacttcaaatgctacaaaagagggtgtcacggcggccccaaaagaaggtttggatgtggattgctagcatgagccacacaagcccacaatgagtttgtagatgcgatcagagcgcgattgtccacccccttcggtttttttgatgtacatgcttatggctggtccttggttacatccagttgggaatcggttgattattggttcgggaattcaggtgtgaccgcggtgttaatattggttgggacatatatctgctatagttgattgtataatcattttgttccactgcttggtatttgtttcgccaggtgaatgtagaatttgacccacggtcagtgttatatacagtcctctttctgccacatctggtgcaggttatgttatttttgaagaagatgtcattggcattcgtgcgccacccttatgttgtactccctctccgttttaaatcataagtcgttttgcct

SEQ ID NO: 40780 - DNA, 1066 bp, Zea mays
  Clone ID: MRT4577_137192C.1
ggagaaggttctgaaagataaggagcatgtccctaaacttgttactgttttgaattacgaggaacccctctagagcttttattcccaggcctatgcttgagagaatatcagatctgtgcaaaagtgtaggacaacataccgatctgtgtttccatcataggacaacgtctggcatgctgctcggtttcatattagttgaatttcctacaatgaggtatttctgtaggtcaactgagattccatgggcagtattaccttatcattattacaacagtctgttggtcgctgtggaaaaagaatggccgagctagcagtcgatacatcatcaacacacagctacgatacaatacatggcggcgacgacggcgagcatgatggcgcgggtggatcggctggacctgctgctgggctacctggaggagatgcaccgcaacggcaacggcaacgctagtccccctagtgctacaaccgcatcatcaccctccacccttgccgccggcggagtccatctcatcagcagtgacgacgacgtcgacgtcgactcctccgccggccccagcacgccgacctggcgccggccgcggcccgccaaggaggtgctggaggaggcgcaggccaaaggaagcctcatcgaccgcatagcctctctggaacaccgtgtgctcaaggttatattactgttcattcagtcatcggtcgtcgtcgtcccacctacctactatatagctaccttgcttttgctgctgcagatggaagaggacatggaggtcacaccagcgaacacggagaaggctagccaccagccgagagcgacgatgatgatgagcaagaacgacgatccaagcagcagcaggaagaagaagaaggggctcaagagcttggtcaagtcctgcctgcgtcatcagaggcaacctcaaaccttttaggcgtttcgctgctgcagctgcggctgagctacgtgtacgtgtgtgtatataggctagcagtgtgaacttgtttgtatgcatgagtttataaggccaatcaagtacgtatgatgaacaaattggcaaacggagatcgatcg

SEQ ID NO: 40781 - DNA, 339 bp, Zea mays
  Clone ID: MRT4577_137193C.1
ccttttgttttttgtttttttttatttctttttgggtttttaaattatttttaattttttttttttgcacccaaccaccccttgatgaccaattcccttttgggttctggcaaccaaccaaaaaaaaacccccccccaaattcacaaaacaaaaaccccttaaaactccccaataaccctcatcaaaaaaattagccgctcggctccttatttttgacccaaaaccccacaaaaaaaaaagaatgaaagggggcccaattgggtggcaaaacaaccccaattaaacgccccaaaacatctcccctttagccgaaatccaaagtttcttacccccacctc

SEQ ID NO: 40782 - DNA, 409 bp, Zea mays
  unsure (1)..(409): unsure at all n locations
  Clone ID: MRT4577_137194C.1
gagcccaagaagtgctgtatgcaaaacagcactgatgacttgtgctgacatctttaaggtctatggtgacgtactggttgagtctattgatgcactggtgagtatcgctattcatttaaaatttcttgtattagctaaaaggtctttgaaaacatctttctgtcaactgctgcattcacagctagtgcagctgtttctaaaggcttcacaagataagcgttttgtctgtgaagctgctgaggcagctcttacatcgatgacaagttggatctccccattactactgttaccaagaatgcagccctacctcaagaacaggaatccgcgggttcgagcaaaagcatcagtgtgtttgagcaagagtgtaccttgcttagatgtgcanggaatcagagaatatggaatggat

SEQ ID NO: 40783 - DNA, 516 bp, Zea mays
  Clone ID: MRT4577_137195C.1
tcgaggccggccgggatacctttctcggccttttggctaagatcaagtgtagtatctgttcttatcagtttaatatctgatatgtgggccatgtgctcacttcgatattaaatttatttttttgtgggggagggtccactactaatggcttgccattaggggccctcacgcgtcgtccagctattgcactgctggccggacgtggcgcaccccaaccaagacaaattgcaatttctctgtttgggaactcttcggtgccatgaggctggtctcggcgaattaaagcaactggagtggttctggttctgttagatatattatgtgggttatgagctattgtcatgtgtagtagatgagcatgtgggcttgaggagatataaatataggtcatgtgtagtagatgagcatgtgggcttgaggagatataaatataggctgagtcatctgtaaaagtcatcaaacaacagaatacaaaatatcaattcacccaaaaaaaaaaaaaaaaaacccgcggcc

SEQ ID NO: 40784 - DNA, 113 bp, Zea mays
  Clone ID: MRT4577_137196C.1
gtcctctcctgagcaacgagcagtggtgaacgcgggatccaccgcctcatccacccggatgcggcgacgaagattaattgaataactacgataagatgggtcgtggtattagc

SEQ ID NO: 40785 - DNA, 361 bp, Zea mays
  Clone ID: MRT4577_137197C.1
ggaagctcatgttaaagataaggtacttactgatctgaaagccataatctgtgctcatgacgcatcatattctgaagatattgaaggatgcatccgtaattcactcttgtggctgcttcatgaattacaaattcatccatgcacttacaagtgccgtcaagatgctgttgcagatttgctccagttgtatgcatatatatagtgctttttccgagtcagggattaccatacagtaacatctccatcagttcatatcactccgcttgacttacgccccacatatgcctaatatactgtgaacattcgtttcatgagtactgcatgacatactcataaaattactgcttagcccatcatatct

SEQ ID NO: 40786 - DNA, 122 bp, Zea mays
  Clone ID: MRT4577_137198C.1
gcctcctttacgctcacggtcgtgcctttcaagatctttgtcccgttggacctctatatgctctctatccttcctcttatgagcagaggcacttccagacctctgagtcatattagctgccc

SEQ ID NO: 40787 - DNA, 450 bp, Zea mays
  Clone ID: MRT4577_137199C.1
gggaaaggagggttctcttggattggcgggcacactcaatccatggcaaaaataaaaaccttccattgaacccccggaaacaaggggcctactacaacatgttacagcacgatcgataccagcagcaacagggtaacccttttttttaacaaaaacggggcagggttgacaacaatatgtcaaagcgggttcaacacgtcaccgccgccagggggcttaacaaactccgggggggggaggaagctgccatggcaaacccacactatcctcacgtcctcgccctttttggacctggacaggaagccgccaatcctcctggggttaggcccctttaccttggacgacaccatggggatgtcctccatcatgagcttcctgagggcgccggtactggtcgtccgggtggtcagggacccaagcgtccgcaggcaagtctgggggtggggttgc

SEQ ID NO: 40788 - DNA, 142 bp, Zea mays
  unsure (1)..(142): unsure at all n locations
  Clone ID: MRT4577_13719C.1
ggtcgacccagcgttcggnttctttgtggttcgtctatttcagggcgtgggggggctgttgaggcgtttgtaccccttggaacactcttaacagtagagtgaagttgtgagctgatatttccttggcagacaagaaaagaaa

SEQ ID NO: 40789 - DNA, 1100 bp, Zea mays
  Clone ID: MRT4577_1371C.1
cccacgcgtccgggcggagctaggaactgtctacagatatgagctatccggtagtctgcacgggttgttccgtgtaagagggttcacacaggatgatgcccacatattttgtctggaggaccagataaaagatgaaatcagaggtgttcttgatctaactgagcaaatacttggacaatttggttttcggtattatgagataaacctttcaaccagaccagaaaaatctgttggcactgatgacatatgggaaaaagcaacaattgctttgaagaatgcattagatgataagggttgggaatacaaggttgatgaaggtggaggtgctttttatggtccaaaaatcgatctaaaaattgaggatgctcttggaaggaaatggcaatgttccactgtgcaggtggatttcaatttgcctgaacggtttgacattacctatgtcgattcaaactctgagaaaaagcgacccatcatgattcatagagctatccttgggtctttggagcgcttctttggtgtcctgattgaacactatgctggtgattttccactttggcttgccccaacccagacacgtattctacctgtgacagacaatgagttgcaatactgtaacgaggtggcctccgaactgaaatcaagagggctacgtgttgaagtctgtcatggagagcgcctaccaaagctaataaggaatgctgaaacacaaaaggtgccactcatggcagttgttggtcctaaagaagttcaagccaggaccctgactatcaggtccaggcacaacggggagatcggcacgatgcccgtcgatgaattcatcaccaggcttcaacttgctgtcgcaaacaaatcatcactatagatccgttggtccgccaaatttcagtccagaatgtagaacattattagaacctcagtagtagcagttgttccatcaatttttgtgcatagctcatagtcatcatcagccatcacaggtcacaacatacctatgttaaaaaaaatcaaataccatctctctcttaccacaccaaaaaaaaacatgctactcttactctgtccatttggctgaaaggggtgtgcttttagttaaaaaccaa

SEQ ID NO: 40790 - DNA, 477 bp, Zea mays
  Clone ID: MRT4577_137200C.1
atctcaaaataaagaacacacaatattttcttatctgatcattaagtatttcagaatatacactcctacacaactcacaatcgctcgtatggaatctgcgtatagaatcctgcatacgcacaacacttattcagctaactattgcaatgaggacggacatgaatcgggaagataaaatactcagagatgcgagtactcttacgggatcaccgagtatcagtccgctgcaaggtgcagtcctctcgtgtaaactcctcggcgaagatgccagaggatgacactgacgctacggagatcgttgaggtgtatgtcaacgacgttgaccttgatgccattgcaaagacacactgcgtggtccaagtccaccagaccctccagaaacgggcagcatcgctctttctgtcgaacgcctaccttgatgagctctagcacgccgtagctcaccttgaggttgatcgctctgatccttgatggccc

SEQ ID NO: 40791 - DNA, 508 bp, Zea mays
  Clone ID: MRT4577_137201C.1
atgcacctaatatcgcgtgagcatggtgactgcaccttccttccaatctgtgatggtctcattttgtaagtttgtaatgctgactgtgagaaaccagtgacaaggtaaattatcttaccgtctctaaggagggggggggggtgcaataaggagaaaaacacaacactattatgagaaataatgaggggaatgccaaataccgactttttgtgattgcttagagctaccctaggggtttgttacatgagttaatctacccaggataaccaatgcgcgaaacgagtccctttaaatataaaaggacccacaaccgactagaatgagaagcaggatccagaaaaaagcctcaaaaaaaaagagcaggtccacaaaggtgccttcccctacctatggggacctttaaccaaacccgaatcagatgcttagattgcggacgattgaggtaaatgcgagtgatagttgtgggaaggcgaactccaagagtgagaatgggttttaagggactaca

SEQ ID NO: 40792 - DNA, 543 bp, Zea mays
  Clone ID: MRT4577_137202C.1
acaactgccggctgtgtaagtcgctgcgcgagggcaccgcgctggacgccggcggcaacgagtccctgtactccgagatcgaactgtacgaatcgtcaacgctgctcgacgagcggcagaaggcggcgctgcgctatgtcgacgccctggtctggacgtcgtcgcggattccggccgaggtggccgccgacgtgcgggcgcacttctccgacgccgaggccaccgagatcacgctcgacgtcatgcgcaacgccatcaacaagatcgccgtggcgctgggcggcgacgcaccccgggtcgccgaaggcaccgagcggtatctgctgggagctgacggtcagccggtgttctcctgaggcagtgcctctagaccgctgaccgctttcgcggtgcacgccggggcgcggggaggtgcgcggcgacgagttcgctgatgtgctgggagaccaagtccagcggggtcgtcgactgcgcggcgcgtgccatcaccacagcgccttccatcgcggcgacaatggtggttgacagcgattgcgcaacttg

SEQ ID NO: 40793 - DNA, 441 bp, Zea mays
  Clone ID: MRT4577_137203C.1
tttctcgactttcgagcgcgcctacgcgagggccggtgcacccgcactctccgcgatcccgccgccggacgccctcatacttcttcgtcactgccttcgctcctctttaaacaatcactacgagcacagccttgtaatccgggaggcggtcaaagatctctggggtacctctctgcaagcggagagccctccatagcagcagagccagccagctgtacgtgctccacctgctgcctgaggcgctccagctgttcacaaaccacctgctctaaagcctcgtcccacatactgataatgccgctggggttacctgccaaaccaactactaccacacggtcgatggacagcaacaccgtatacttccttactgaccgtccttcaaccaaggtccaggctggtcctgggggcgccttcttccctgggattcctgctatggtggca

SEQ ID NO: 40794 - DNA, 412 bp, Zea mays
  unsure (1)..(412): unsure at all n locations
  Clone ID: MRT4577_137204C.1
agccttccggaaaattttcccaaaccctaacctcccgacggggatggcaaaccttccagtttttttgaaaatgaccgacggcggcgccccgcagggccgtatcgtgatggagctgtacgccaacgaggtgcccaagaccgtggagaacttgcgagcgctgtgcacggactagaagggcgtgggcaagtccgggaagccgttccactacaagggctccatcttccaccgcgtcatccccgagttcatgtgccagggctgatactacaccctcgagaacagcaccggcggacagtccatgtacggcgagaagtttcgcgacgagaagttcgngcgcaagcactccgaccccggagtgctctggatggccaacgccgggcccaacatcaacggctaccaggtattcatctgcacc

SEQ ID NO: 40795 - DNA, 229 bp, Zea mays
  Clone ID: MRT4577_137205C.1
cctttctttttggggaagcttgatcaacaacgcgcgacttatatacgacaatatagaaagcccacaagacacatcctctggcagcagcaaaaacaggggaaatggggacatttggccagaaggcctttaggtgttcccacagaagccaaaagcaccggctacctagggcagtcccaaaaagtcaacccccggtacgggcacagagccatcacctggtggatttgacgcg

SEQ ID NO: 40796 - DNA, 914 bp, Zea mays
  Clone ID: MRT4577_137206C.1
tctaggtcgcgagcggccccctttttttttttttttttttttttttttttttttttttttttttttttttttttgattggaaaagagaaaatatatagatctcttttgggttcattcatctcgcacgacggagatgatacgagtagatgacaccgaaaaaacaggtccacatacaggtagagagattttgcaacagaagaaacacgcggagaccgacacaacccagccaggcacgacgacgccagaatcacgccccctgcatcatcatgcgcgagaagtcgtggaagcagacgaagccgtcgccatcgccgtcgacgcggccgatcatgcggcggcagtcctcgacggagcaggcggcgtcgccgagcgcggcgagcacggcgcggagctcctccgcggagatcctgccgtcgccgtccgcgtcgaacaccgcgaacgcgtcgcggagctcggcctcgtcctccgcctccgcggacgcggcctgctcgggcgcgagcccggcggcctccgcctcggccagcaccgcggccagctcgtcctcgctgcggaccacccggcgcagcgccacctccaggtcctcccgcgtcacggcggcggctactaccgccggaggcttcgggttgggggcggacggctgggattggaggacggtgcgtggcgtcgtcgtgacggctgacggcgatgcgcactcgtcggacgaggacgacgacgcggtggagacgaaggaagaggagccgccggtctttgaccccttcctcttcttgccggaggaggaggaagacgagccgaagaaaggcatgctcagcttcatggcgtatgtaccttgcagtgcagtgcaggcgagcgattcgaggatcgatggactggtgaccgaggttgggagggaaggagaggaagatgaggggtccggccgg

SEQ ID NO: 40797 - DNA, 739 bp, Zea mays
  Clone ID: MRT4577_137207C.1
acgacgccagaatcacgccccctgcatcatcatgcgcgagaagtcgtggaagcagacgaagccgtcgccatcgccgtcgacgcggccgatcatgcggcggcagtcctcgacggagcaggcggcgtcgccgagcgcggcgagcacggcgcggagctcctccgcggagatcctgccgtcgccgtccgcgtcgaacaccgcgaacgcgtcgcggagctcggcctcgtcctccgcctccgcggacgcggcctgctcgggcgcgagcccggcggcctccgcctcggccagcaccgcggccagctcgtcctcgctgcggaccacccggcgcagcgccacctccaggtcctcccgcgtcacggcggcggcgacggcggcggctactaccgccggcggcttcgggttgggggcggacggcgggggtgggaggacggtgcgcggcgtcgtcgtgacggctgacggcgacgcgcactcgtcggatgaggacgacgacgcggtggagacgaaggaagaggagccgccggtctttgaccccttcctcttcttgccggtcgtctcctgctgcttcttgccggaggaggaggaggaagacgagccgaagaaaggcatgctcagcttcatggcgtaccgcgtacgtaccttgcagtgcagtgcaggcgagcgattcgaggatcgatggactggtgaccgaggttgggagggaaggagaggaagatcccgcccaacctcgagggttgccccggcc

SEQ ID NO: 40798 - DNA, 288 bp, Zea mays
  Clone ID: MRT4577_137208C.1
tgtcaagtagagaagagtaggatttgaagagggtgcttctaatactggcagatttgaatctgttaagatacaatctggtcagatcatgagctaagtggacaggtatgcttataggctactagcaccgtcataacagtggaagtcattattgtgcataatttgattctgtcttttaaaaaaaatgtaagagcattatatgaagtagttctaacctctcctgatataataatgtgtactttctcacatagcaccaagcccacatgtgggcattagatggattacttctct

SEQ ID NO: 40799 - DNA, 320 bp, Zea mays
  Clone ID: MRT4577_137209C.1
tcccggtcgacccaccgtcgaaaaaaaaaaaacacaaaacaacacaattatttgtcacaactgatacaattcacggagcgatttaaaaaatactgttaaaaactctacatgcaccactttcatgctttctacgacccctttattaccctcacctgccatcttttaacaatgcagtgactggcaaaatcctggtatcaccctatttaaacgcttctctcaacaatctcttttccacaccttacgttatcgcaactttgcccatccccatttccttaccctccaaaccctctaccttaatggccaaattacccccccctata

SEQ ID NO: 40800 - DNA, 735 bp, Zea mays
  Clone ID: MRT4577_13720C.1
tcgtcatcgccttccgcccctcgcgccgccccttcgacgccgtcgtgcaggtctcgctctccgccgcctccggcgccagcttccactgcctctcctcctccttccgccgcatcggcctccgccgcctgctctacctcgacaagctgcgcaccaacagcgaccgcgtccggctcaactacaccgcccgcctcgccttctcattccgcctcctcgcctccctcgtcgcgccctgcttcgccgccgaggccgcctacaaggcctggtggtacgccacctccgccgaccgcctccccttcttcgccaacgacgtcctcagcgacgtcctcgcctgctccctcgagatggcctcctggatgtaccgcagcgccatctacctcctcacctgcgtcctcttccgcctcatctgccacctccagggcctccgcctcgaggacttcgccggctccctgctcgtcgaggtggaggaaggcaggatgggggtggagcgcgtcctcagggagcacctcgacatccgcaagcagctcaaggtcatcagccaccgcttccgcaggttcatcgtcgccgcgctgctcatcggcaccgccagccagttcgcctccgtgctcctcaccacccgccacgactccatcgacgacctcctccacaccggcgagctcgcgctatgttcagttgtgctcatgtccgggctcatcataatcctgagcagcgccgccaagatcactcaccaggcgcagg

SEQ ID NO: 40801 - DNA, 423 bp, Zea mays
  unsure (1)..(423): unsure at all n locations
  Clone ID: MRT4577_137210C.1
ggggggggggggggacaaaaaccgncgaagcccggcgcngagnnnccaaacgccgcccgcgggnacgagaccgncncngcggcggnagccccaagaaacccnggnaaggcggnnggngcaaatctgcctgcgggaacagcaccggggggggggggggttttttctccttttgaggangangangaccnngancgggggggggaggaaacngacgccgccacgaggcagccgangagcgngccgccgcngccaaggccccnncnaaaaagaaagaaagaggaaaanccnccgnccnnanggangncaaaccangggacgaggagacnganangaagaagcnggaggaggcngnccgcagngncccagaggagggncngacnnggggagcancaaagcnngngccngnngganacggcancaaga

SEQ ID NO: 40802 - DNA, 179 bp, Zea mays
  Clone ID: MRT4577_137211C.1
atccagatcaacacagcggcagtgctttaagtttatcggcaaacagaacagcatgaggatggtcattgctctcgttgagtgcctggctctgtcaactgccaccgcctcttcaatgcacctgcaccaaccatgcgcggtgctacaagacttgtaccgagctggcaccggccttactacaa

SEQ ID NO: 40803 - DNA, 931 bp, Zea mays
  Clone ID: MRT4577_137212C.1
ccgggcccccttctcgagttttttttttttttttttttttttttttttttttttttttttttttttttttttttttttttttttttttttttggggggaaaaaaggagattgtaattgacaacatgttcctgtcaaaaatacgatgacaaggttgtggtacagacaaattctgaaaattatactatggccaagtgctgtgaaaaaagagagacgaattctgagagccaagggctgtgataaaaactgtgtgaattgcagatagtgtctccatgcaaatgtgtgctgagataatccatttaaccatcaaaactgatgtgtgctgagataatccatttaaccatcaaaactactaaatgagggctccagtctcagtaggaagcccaggcggctgcttcagggaatgagagacctggaggagcaggagctgatgcaccaccctgatcaatgataccgaagtgtgctaggaccttcgtgaggaggacccctgcgacgtacgacagtccggagctgctgaatccaatggacaggtagtagaggagggttgtgaggtatgtcctatgcctcttaacatgtgccttcccgattgcgagcagcgcaatgcacaggagagatgcagcagcgaccaccagcactttgttctctctgttgtcgctcgtcctgaatgacagtccgtagatgactggtggcagcagcccgaagaggatgtatgacagtatggctatcaccatgtgcaactggtacttggatcgccttcccagctctagccagtaatgccccacttgctcactgctttcagctatatctcctgtgtttcgtagatcagcaatattgtggtaaagtacaggaagaccaccaataaggtttgctatgcccaggatgaatatatccaaagtcttggcaccacttgctgcagctgctgatacaactgaa

SEQ ID NO: 40804 - DNA, 405 bp, Zea mays
  Clone ID: MRT4577_137213C.1
ttaaaacacaccagatcaattaaaaatggcagacgaatcagctaagacatttaccttgagggtacgaaaatttatgactaatcgcttactcaatcgtaaacagatggtcattgatgtatatcatccaggccgtcctacaatcccaaaaaaagatttaagtcaagttttggcaaagaagtttaaaactactcatgatgttgtgttttgctttggattgaaaacacatttcggtggtggtaagactactggatttgctcttgtttacgataccttagactttgcaaagaaattcgaacctttgcatcgtttgtgcaaagctggtttggctacaaagaccacttcttcacgaaaacaacgcaaggaacgtaagaaccgtatgaagaaagtacgtggtaccgctaaaac

SEQ ID NO: 40805 - DNA, 301 bp, Zea mays
  Clone ID: MRT4577_137214C.1
ttgtccttttacgcgacctccaccaatagggggcaacttttaacttatccctggttccggagcacatcatcaacctgcgcaagacatgttataaggtagcggttgtgtctattttcctgttatccattgagaacccacatgacatcatcctccattctctccttccctacatccagcgtgctttcctcaagatcgcgcagtacactggcgcccatgccatcgctgggaggcacacacttggaaccttcaccaatcagttccagacgtcttttagtgagtctagtctgctcatgcatactga

SEQ ID NO: 40806 - DNA, 389 bp, Zea mays
  Clone ID: MRT4577_137215C.1
cctgcaggtaccgtccgtatttattcccgggtcgacgagctcactagtcggcggccgccctttttttttttttttttttttttttttttttttttttttttttttttttttttattttttttttttttttttttattcttttttttttttttctataaccacacgcgcttcttgttgttcggggaaaacggaaaacgccccccaacaccggatcaggtgttaaaaaaaaaaaggcacatggcgcgacccctgacaaaaacaagaaccctatgcccgcctccagaagcaaccacaggagcacgcccaccgggacaaacgggcccagaaaattgcgccgaaggaaagtttacaccacgttcagcctgaaccctttaagccccgaacacccg

SEQ ID NO: 40807 - DNA, 124 bp, Zea mays
  unsure (1)..(124): unsure at all n locations
  Clone ID: MRT4577_137216C.1
tccgtccgcatgacgcattatgtctttatctacctccagtagctcatnaagtaaccccgatccgactnaccatgagggtagggtgctctggttgccctcatgctctcgtggcttctcgctgcga

SEQ ID NO: 40808 - DNA, 615 bp, Zea mays
  unsure (1)..(615): unsure at all n locations
  Clone ID: MRT4577_137217C.1
ggnagacttcgagctgtacgggttgaaggcgatcaagaaggtgttcaagagcgggatcaacgcggagccggtgatccagtgcagcaaggggcccttcgacaagtacatgctgtaccagctctacttctgcgcgaacggcaacgggacgttcatcgactgccccgcgccggccaagtacacctgctccaattccgtcctcttccacccctacaagaagtggatgctcaagcagcagctcaacgacgagtccgccgacttctacgattcagccgaccctttcgtgctgcctggcctcgccatggacaactgatctctgatgcgatcgtcgatccctctgcattttcgtgagtttgcgtttcgtcgtcgccggagccaccgcccgccgacgatccatcatccatgatctacctcgtctttaatttcgtcagtttttgcgtgcgttcagtgacgtgcgtatggaataataatgttttctgccttgatcctcactcgctcgatctgggcaatgcacggtgatgcccagcgaataagtgtggcggctttgtttattcgaccttttttccccctgtatattaaggaaataaaccttgagagctacccggtggcctttccaat

SEQ ID NO: 40809 - DNA, 385 bp, Zea mays
  Clone ID: MRT4577_137218C.1
aaaaaaaaaacatgggaatttttgttttaaaaaaaaaaaaagaaagctaaggcagccaaaaggtcccggccccggaaaaaaatccattttttatgggcccctaaaaacaaaaaagcccacccccctttgggggagggaggggaaacccattcccttataaaaaaaacagggaaaccccccccccaacgggggggggacccgggagcaaacttcgatttacccccccaccgggggattttggaaaaggagaccccgggccaaaaaattacgcaagcgggggagttaaaagaaagagcccctttttagaaaaatataccccccccccactaaattttaggggggggggggaaaaacttgaaaatgtggcggggttccataaggcaaa

SEQ ID NO: 40810 - DNA, 1314 bp, Zea mays
  Clone ID: MRT4577_137219C.1
cctcgaggccgggccgggaagaaccatatactaggtaagagggacaaagaaaattgtgctcatggaggcctcctcaagattggagcttcaacaagcgcacactgagctttggaacctcacctttagctaccttaagtccatggcacttgagtgtgttgttcaactaaacatacccaatgttattcacaactttggtggcaatgccactctacccagtattctctctgccatccaagttcctgaacataggaagccctaccttccacgcctcatgaggtttcttgtcgtatcaggtatcctttcatttgattctcccaccttaggggaggagggtacttaccacctcaccccattatcacgccttcttgtggatgacacccacattaatggctatgggagcctcggtccatttgtgctctcccaaaccacaaagtaccatgtctcatcggccacgtacttgtctgagtggttcaagggtgaagatggtgcggggcctatggctgcagagatgccattcaagatggctcatggcacaggcccatggggtgcccttgggcatgatcaacaattcaatagggtctttaatgctgggttgggatctaatagtcgacttgtgctagactttgttgtggccgaatatggtgatgtgtttgatggcgtaagctcactgcttgatgttggaggaggggatggtagcacagcgaggacaattagaaaagctttcccacatatcaagtgctcggtgttggatctcccaaatgttatcattgacatacaaccaggtgatggcatggttgactatattgcgggtgatatgtttagctcaatcccaccaactgatgctattatgctcaagtatgtgctgcatgactggaacgatgatgattgtgtcaagatcctacaacaatgcaaaaaggctatatgttcctgcaaaccagccggaggaaaagttttaatcatagatgtagtcgttggatctccattgaaagagatgttcgaagcgcaagtcacatctgatttgttgatgatggtgatagctgggggtaaggagcgtgataagaaagagtggcacaagatattcgtggagtccggattcaaggactacaagataagtccagttctggggtacctctcaatcatcgagctctactcgtagaaaattaaaaaaagtgttattagctggtgagaaacatgtctcgaacaagagggcgctgtgatccatttgccttggtggctttttgccaaataataagtgtccagctgtatggtcatatattcgagaaaataagagcatctccaaggtcattcacgcat

SEQ ID NO: 40811 - DNA, 401 bp, Zea mays
  Clone ID: MRT4577_13721C.1
cggacgcgtgggcggacgcgtgggttggcagctgcaataagatgctagagggactctgcagttcatgagaggttcgcaaggcgaacaacctgctgacggcaatgatggacaaaggacttcttcctgataaggatacatacttgagccttattaatggatatggtaaggttggtgatgcccaatgtattgtcaacatctaccatgagatggaacacaaaaggcttgatcccggtgttgaggtttttactgccttgatcaagggtctttgccggtgtgggaatctgaaggaagctgagaaactctttgcggcgatgaagaagaaaacgttggcttcgactagtgacttggatgatatgcttatcaagcgatactgtgagaagcgcaatgcttagaaggcactt

SEQ ID NO: 40812 - DNA, 426 bp, Zea mays
  Clone ID: MRT4577_137220C.1
gggggcgaccataaaggaccaagcacaccatgtaactcacataaaaaaaaaccatgcggaacatagcaaagtggacgacgaacaaaaccacctacaccctcgaggggagttcgacatctagcccgcgcaaccagacccagagatcttccagaccccgacagacccatcggcgtacccagtgcaaagggggctcccatcggagctccagctcaagctcgggcagaacaagaacaggcccctggagaactggatgacaggcctgagggcctgcacgaccggcttcgacacaaggggccagaccgtaacaaaaccccgggtcacagccaagagccagcaccgggtgggccagaaacaaagggagcggaatgaaggaaaccccgaaaccaagcgaggaacaggccgcctaccccctcagcgcaaaagccc

SEQ ID NO: 40813 - DNA, 133 bp, Zea mays
  Clone ID: MRT4577_137221C.1
gtaaacaaaaagttggtacccctggagaaacgaggggactgaaacaaaaattttaaaccatttaaccacatctttggccccgcattatccaagatcccgtgtgaaacaacgggctgccttggcccatgggaaa

SEQ ID NO: 40814 - DNA, 436 bp, Zea mays
  Clone ID: MRT4577_137222C.1
tttttttttttttttttttttttttttttttttttttttgtgttgttttttttttttttttcaaaaaaagcccgtccccttatttaaaaaaactttatttaattcggataaaacccggcccccttcattaaattccctaaaaaccaaaactttttttacaaaacaacccaaaaacatttttttttccccaaaaaaaaccaatttcttaaacttactttaaaaaaaaccttttttaactctgcccactttccaaaaaaaaacccggcccttaattttggctccttaacccccccaaaaacttttccaaaagcgccccactttttgtcaaaaaaacaaaaacaactgtccctctcctatacaatcggccaaacctaaaaatactcccccttaaactattttaaaaattgccttcttttcacaccgatcttttttcttt

SEQ ID NO: 40815 - DNA, 1234 bp, Zea mays
  Clone ID: MRT4577_137223C.1
gcgggattccctcacaaaattccctcgccctctacgcagatatgtaactccctatatccgaatcaagcgagcgggatccccttcagttaccagcctccccctttctcaatcgcagccaatctccctttcctctctccctccgctatacccggcaaccagatcgaccaaaaccgccgtcggcaatcgccgtccctgaagcacacagtgacgtcctccgaagcctcctggtgcccgttcctgaagcgacatgcgcgatcgacgattgctcagatcgcgatccgtttccgggcttcgaggaatcgatggtcaagcttcggcaaccaagagatcaaactcttctagttctacgaggctgaagaccctgagcatctgtttggtgaagggatggcactcatggcgggaaacatgttcacatcctatgaagcaaatgaagatccaaataatgcagtaacatttagtgatggtaaccaagaaaaggtattttttggccatgcagtgcttgccaagcaagaaagcaagttgggtcaaatcatccaaccaagaacatcatgacgacgtcaaggccattagagctcctacacatggatatttggtctggtggcctacttaagcattaatggtaaaaagtatggtctcattattgtatatgattatacacgcttcacttgggtatttttcttgcaggataaaagtgaaacccaatgaactctcaagaaattcttgaaaagggcttaaaattagttcaatttgagaatctagaaaataaggagcgacaatggaaatgaattaaaaaatacacaagtgatggactatcttgaagaaggaatcaagcatggatttccgactctatattcaccacaacaaaatggtgcgatagaaaggaagaatcaaacactaattgttgtggcaaggccatacttgataagtacaagacttcagatcgatttggggtggaagcagtcaacactacttgtcgtgccataaatcgactctaccttcatcgacttctcaagaagactccatatgagctcctaaccggtaacaattcaaatatttcatagtttagagtctttggaagcaaatgcttttctcggtgtttagcaccagcaacacactatgagatatactacataatgattttgcggtcgacgaagtcgacgatagctcgatggttcgtgcgtagcatgttgggactcaatgatatatacaggttcgggctactgagatgcgtaat

SEQ ID NO: 40816 - DNA, 163 bp, Zea mays
  Clone ID: MRT4577_137224C.1
ccttgcttcgactgctgatcgagtctttagttatactcagcaatgcctatcggttagcgttctacagtgttgaatgcagacacgtcaaacgggcttttagttcgaagagcgtgatggaacttagttgacgttgcaatcccttgaagacggtgctctatgttgg

SEQ ID NO: 40817 - DNA, 1007 bp, Zea mays
  Clone ID: MRT4577_137225C.1
aattcggcacgaggcctttccgtccactcctttggtctcaaatcctcaatcatgcccggaattttgtaccagctcgtcgtcgccgccgccatctgcgccctctccagcggcagcatcgcggtcgcctcaggtttgaatgcgaccgactcgttcctcgtctgcctcgtcggcgcgggcgtcccgccgcgcctccttcagaccccggcgtccccgtcgtactccgcgacgctgctctcctccgtacgcaacctccgctacgtcacgtcggacattcagcggccggtcgccatcgtggccgccaccgagccagcccacgcgcaggcggccgtacgctgcggccgccgccacggcgtccgcgtccgcgcccgaagcggcgggcacgactacgagggcctatcctacgcctccctcgacccccgcgagcgcttcgccgtgctcgacctcgccgctttccgtgacgtccgcgtcgactccgcgcgcgccgaggcgtgggctggatcgggggccacgctcggcgaggtctactatgccgtcgccgccgccagccgcgtgctcgcgttccccgcggggatctgccccactgtcggcgtaggaggacacctcagcggcggcggcttcggcacgctgatgcgcaggtacggcctcgccgcggacaacgtcattgacgccgtcctcgttgacgccgacgggaggttgctgaaccggaccaccatgggggaggatctgttctgggccatccgcggtggcggcggggagagcttcggtgtcatactgtcttggaagctccgcctcgtgcgcgtgccggagacagtcaccgtgttcaccgtgcgccggtcaataaaccagtccgcctcccaactcatcaccaaatggcaggcaatcgcgccggcgctgcccagtgacctcatcctccgaggcgccgtccggaagcagcacgcgcgttttggagcactgttcctcggccgctgcagcccgcctccttgaggacatgaaagctcacttcccgg

SEQ ID NO: 40818 - DNA, 420 bp, Zea mays
  Clone ID: MRT4577_137226C.1
gtgggtcctttcgtataataacaagcccagcgagggaggcaaaacacccaacaaacaaagcgggtggggagaaagggggaaaaaacaaagagggggttcagacagggggggggcccacaaaaaggggggaaaggggggaggaaaaggggggaaacaaggggggaaaaaacgaaggggggggggcacggggggcccgaaaaaaaaaagggggggggggggaaaagggggaaagaaggcggaccagcgaaaaccggcacaaaatgctggaaaaaagggaggggccaaactgaggaaaagggcccaagggggaaaagggggaaccgaaagaacacccccgggacaaaaaggggggccccaccccaaacgacaccctccagaaaaacaccatgtgggcacagaactccacagaggggggggggg

SEQ ID NO: 40819 - DNA, 1462 bp, Zea mays
  Clone ID: MRT4577_137227C.1
gtgggtcctcactcctccccctctctctctatcatcacccttcttccgccggaaggaaaagagaaaaacacacactctctttccgagctctctcgctgtctctcacccagccgccaccatgtcaggcctctacaaccagggcttctcccctgcaagaaccctctccccccagattaggagcaaccccgacgctgatagccagtacttggccgagcttctcgccgagcaccagaagttggggccattcatgcaggtgctgccgatatgcagccggctgctcaaccaagaaatcatgcgggtgtcaagcatggttcatgaccatggatttagtgatcttgacagacgccggtttagaagtcctagccctatgtcttcaccgattgtccggcctaatctacatggaaatggttttggtccttggaatgggatgcaccaagagagattgggctttcctcctcctggaacaagtatggactggcaaggagcaccaccgagccctggctcttatattgtcaagaagatcatgcgcttggaagttcccgtcgactcttaccctaatgtactgccttccaaaacatgtgcaatttatccttcagtattaaatgatattttagttctatttttttttctgtagttcaactttgtgggacgcattctagggccaaggggtaattctctaaagcgagttgaatcatcaactggctgccgtgtttttattagagggaagggttccgtcaaagatacagaaaaggaggacaaacttaaaggaaaacctgggtatgaacatctgaacgagccactgcatatattaatcgaggctgagttaccagcgaacattgttgatacaagactgagacaggcacaagaagtcatggaggaattgctaaagccagtggacgagtcacaagatttgtacaagaggcaacagctgagggagttggctatgctaaactctactctgagagaagacagtcctcaccctggaagtgtctcccctttcagcaacggcggcatgaagcgcgcaaaaccaagccagtagagaaaggtttcaggctctcctccaccctcctccactccagtcgttcttggtgcagcaccagcaaggtgtgcctgcccttgaacctgcgctgcttcgtgtcgtgggtgcttgtgtaagaaaaaaaaggtatatgcattttgctgctgctggacggacaggtggtcgagacgaggaggaaatcgctggtcgttgaactgtctccatcttcggtggatccggccattttgctgctgtaaggtgatgggcattcgttctattcgttactgactgttgaccagattatgatgccgtggtttcaggggagactagctatgcctatggccctgataattagtgtgagctggttcgtttaggtgtttaattagtttgtattattattattcgcgttacgttgtggagtagtagcaaacgtcacagctggtg

SEQ ID NO: 40820 - DNA, 327 bp, Zea mays
  Clone ID: MRT4577_137228C.1
gagatttcttaagaggaggaataaaaagacactgctattgttatctatgggggcactactgagcatacatggatggcaactaccttacttgagaacacgagcattgagaacatgctgatcctatacgggctatataagcaagccacggttggagatgggaataccgatcgtccggccatatttctaccaaaaggactgggccaagtgggatgcctagtaggctgttgatggcaaatggaaagtttaggcgttaattgactacatcattaagtaaaagtatttttatgaggatgttttcgttttttaaatgttttttatttttttttt

SEQ ID NO: 40821 - DNA, 4627 bp, Zea mays
  Clone ID: MRT4577_137229C.1
gcgggacccggcccgtgcccccatatcctcctccgcaccttacgcttacatgatccaggggaagcttaccccgcctaaaaaccttccctcagcctctcccactgctggtcgcctccctctctcagtctctcatacgcagccgcacgcctctacttagagatcaggcgcctaaactgggtcgaaaccacggacagcacgaacacgcgcacccgggcgacgaccctctccgctgacgagctcttcgtggagcgacggcgtcgggtgcgcggacgacgatgaggagacgctgtcgtttgaggatagcgtctccggctccgacgctgagtcccacgaggctgcagtagcggaagagagcgactcttcagaggatgaagtgggcggccaagaaaatatccgtgggatgacgtgctctcctgagctgtacaaggaggaaatgcacattgggtatgacggcggcgtgaatgagatccagagatgtgtctcttagagcggcattgtagctcaccacaacaacgaagattatgccaagatattgagattgatcagtggtgtgtataaggtccaggaggctcggatgcacgaccatggctgtatgattacctacatattgttcaaagtggaacttcggcggattcccagtttggctgaagtatgtacagggcaacaggttcatgacagacaacgaaccttatcagacggccatgcagggtttcactgagaagattgtgggtatgttgaagatcgaaaaactctgtacatccttaaacggccaagtgccactcgctctgggtgggtacgagtatgggcccggaggcagggagtgtggcgccgcagtgctggcgtatatcaactgggcagcacagatggcagtcgggttgggtactcgtgtgccgtgggtgatgtgcaaggaggagggtgcacccggtcctctgcccggtgccggctcccccttctgctgcggcgccttgtcgcccgccaagccaagccagtagagggcagcttctggcgctccgcctgcccgggtctcggcctcggcgcggcccctccgccgtggcgcggttgcttgtctagcaaaaaaaaggtatatgcattttgctactgctggaattcggctcgatctgtacctagacaggatagtttgggtaaaacctggctcagtcttcggaggagacgccaaggtgccggtggccaatgaacggcctttggtttttctggttacccaccgctgaccagtttttgtaacaggcaataggggggagtctacctatctcgatgtagttgttcatcttttgtgagcctgactacatttttatgtaatatggtaagattattttctacaaggagcgttaaagcctctgaccatggtgaattgagcgtcttggtgattacataaatgttgtttttaacatggacagagttggtgttctgtcaattaacctgcagaagtctgaagatggagcctcatcaatgacgttgaagagggatgatgcgcaggtaagaattctatggcaactgctccattgctcaccacaactggttttgcaactttagacaagatgttggcagggacagcgttgattagttgtgattcatcagctgtgttgacatatgcccatctgaaacctaccaacaagggggcggtcagcttgtgccagtgaggatcgaggaatcaagtattgcggtgcaggtaatcttcgatggggtgctaccaagttctgactaactgagtgttgattgccgaagaatcagattcaatggcaatgctaagcttcgaggtggtccggagaagattgtactgctgagtgttgcctgtggattgccgaatgttggagtgcattatgagacgtggaacgctggtgttggtggtcctgttgtgcttcatgggctggctgaaggttcacgaaagctcacttggcagacttggtcctatcaggttggcctgaaaggcgaaccgatggccctgggctccatagagggctcaagctcagttgaatggatgcgagggtcaatgatcgctgaatacaagcagcactgggcaaggtgtacgccttacttcaacactcccatcggggacgacccgtaggctgctgggaggacccgctccagttccggcccgagcgcttcatgcccggcggcgccggcgccggcatggaccccaaggggcagcacatgcagctcatgccgtttggaaagaatgcagtaacggggaaatcttgagggctctcaagtgtcaatcaggctgtggtcagcccacaccacgttggtatcatgtgccaaagtgctggctgcagcccgccagaaacctgctggttgtcttcgaggaacttggtggggattcatcgaagatcgccctagtgaagaggtcagtctcaagtgtatgtgctgatgtatctgaggatcacccaaacatcaagaactggcagatcgaaagctacggcgagcgcgagtaccacagggccaaagtgcacttaagatgtgcgcgtgggcagtccatttccgcaatcaaattcgcaagctttgggacacctacgggaacctgtggagatttccagcaaggagattgccactcagctaactctcacacagtcctagagaagaaatgcattggactccaaagatgcgtcgtcgccatctcccccgagagctttggaggagacccctgcccgagcgtgacgaaaagggtggcggtccaggcagtatgttctcccgtcgcgtagccttacttctccaagcaatggatttggaaggcggtcgacaaaaaaaaaataaaaaatggtcgaaaccagtgcagggtgagtggaactgtaagtatcgtcgactttgattattagatgtggctggcttgagaggttagcagcattcgttgtcggattccagattaggatttgtagtctgctgcatctccatgaattgttcaaagcggccggctggataatgttgtagctggtccaggaatgcagctgtagagagagagagagagagagagagagagaggagtggaggcagaagagtgactgattatgcattcttttgctgtggtgttagtagctgtgtacccgtgacacatgtcgtctttcttggaacggagaaagatgcaggtgaagtgtgcattgtgcccttttgttctactgctactgctagtggtaaggcaggagccttgcaattgtcgggggagaattgtctgtaagactgtaactgatgagaacagtgccttctttttctgaaggaaaataacgagtggctcatgttaacaacatactagtagtatgggtgcggtggccgtggggaattggtgaagggaaacaagaagcctgagccctgaggaattgatcaccacgctgatttgtatgtatatataaagaaacgtgtggcaccttaagctgggggcattcatgcaagtgctgccgatatgcagccggctgctcaaccaagaaatcatgcgggtgtcaagcatggttcatgaccatggatttagtgatcttgacagacgccggtttagaagtcctagccctatgtcttcaccgattgtccggcctaatctacatggaaatggttttggtccttggaatgggatgcaccaagagagattgggctttcctcctcctggaacaagtatggactggcaaggagcaccaccgagccctggctcttatattgtcaagaagatcatgcgcttggaagttcccgtcgactcttaccctaatttcaactttgtgggacgcattctagggccaaggggtaattctctaaagcgagttgaatcatcaactggctgccgtgtttttattagagggaagggttccgtcaaagatacagaaaaggaggacaaacttaaaggaaaacctgggtatgaacatctgaacgagccactgcatatattaatcgaggctgagttaccagcgaacattgttgatacaagactgagacaggcacaagaagtcatggaggaattgctaaagccagtggacgagtcacaagatttgtacaagaggcaacagctgagggagttggctatgctaaactctactctgagagaagacagtcctcaccctggaagtgtctcccctttcagcaacggcggcatgaagcgcgcaaaaccaagccagtagagaaaggtttcaggctctcctccaccctcctccactccagtcgttcttggtgcagcaccagcaaggtgtgcctgcccttgaacctgcgctgcttcgtgtcgtgggtgcttgtgtaagaaaaaaaaggtatatgcattttgctgctgctggacggacaggtggtcgagacgaggaggaaatcgctggtcgttgaactgtctccatcttcggtggatccggccattttgctgctgtaaggtgatgggcattcgttctattcgttactgactgttgaccagattatgatgccgtggtttcaggggagactagctatgcctatggccctgataattagtgtgagctggttcgtttaggtgtttaattagtttgtattattattattcgcgttacgttgtggagtagtagcaaacgtcacagctggtgatgcactccgctctgacagtttgatgaggacagctttgaataaaccatgtgaattcagaatgttactaaaacggtgggacgtagggcccctaggg

SEQ ID NO: 40822 - DNA, 505 bp, Zea mays
  unsure (1)..(505): unsure at all n locations
  Clone ID: MRT4577_13722C.1
tgcagaggggnagtacgtggcgggacaagcatgggttcatgggtgggcgtcgtggtgagcacatttctgggcacccggctggcggacccggcgccacagacggccgcatcgaggcccggttcgggttcgggttggggggcaaggcgaagcctgctccgtacaagtggctaacacatcaacctgctactgaccggccgctgtggttccccggcgccgtggcgcccgactacctggacggctcgctggtcagcgactacgggttcgacccgtacggtctcgggaagcccgaggagtgcctgtagaccgagttggactcgctggaccacaacctgaccaaggatgaggccggggcgatcatcggcacccggtccgagtcctgccgaaggcaagagcactcccgtgtgcagccctacagggagtgggtccctcctccagcgtttccgcggagtgcgagctcatccacgggccgcttagtccatgctcgccaccctggtggccctcttcg

SEQ ID NO: 40823 - DNA, 2148 bp, Zea mays
  Clone ID: MRT4577_137230C.1
caaaaaaaaaaactctctttctctctctttcccagccctctctctccctctccacccggccgccaccatgtcaggcctctacagccagggcttctcccctgcaagaaccctctccccccagattaggagcaaccccgacgctgacagccagtacttggccgagcttctcgcggagcatcagaagctggggcccttcatgcaggtgctgccgatatgcagccggctgctcaatcaagaaatcatgcgggtatcaagcatggttcatgaccatggatttagtgatcttgacaggcgccggtttagaagtcctagccctatgtcctcaccaattgtccggcctaatctacatggcaatggatttggtccttggaatgggatgcaccaagaggtaggtgtaattctttaatcgctgaaatatgctttcttttttaaaacatgtttttatcccttcagtaaccttcctttgttatgtgatattttaattgtttttggatttccaattcttctaacattctgatgacaaggataaaatcatgaaggctatcatgctctataaaatgtaataagaagaaactaagccttggggaagaccttcccagggtgttgcactggaccatgtatttcactgtgtagtggtgaagttttttttaaccgatccccaaaaatctgctcccacagggagttgacctgggcctgctgggtgctactaagacactacaaccactaagctgcaggaggatttataatgttctgtaatgaagatacttaagtcctagagggtatgtctatgccatatatagtaacgtgtacctttaatataacagagattgggctttcctcctcctggaacaagtatggactggcaaggagcaccaccaagccctggctcttatattgtcaagaagatcgttcgcttggaagttcccgtcgactcttaccctaatttcaactttgtggggcgcattctagggccaaggggtaattctctaaagcgagttgaagcatcaactggctgccgtgtttttattagagggaagggttccatcaaagacacagaaaaggaggagaagcttaaaggaaaacctggctatgaacatctgaatgagccactgcatatattgatcgaggctgaattaccagcgaatatcgttgacacaagactgagacaggcacaagaagtcatggaagaattgctaaagccagtggacgagtcacaagatttctacaagaggcaacagctgagggaactggctatgctgaactcaaccctgagagaagacagtcctcatcctggaagcgtatcccccttcagtaacggcagcatgaagcgcgcgaagccaagccagtagagggaagcttctggctctcctccaacccttgagtcgtccacggcgcggcaccgacaaggtggtgcccttggaactcgcgctgtccgtgtctgtctcgtgggtgcttgtgtaagagaaggtatgcatctgctgcttgacaggatagtctgggtaccaggtgcgtcgtcgtctcaaggagacgaggagagatcggtggccgatgaactgcctttgatcttggtgggtggatccggccgtgctgttgttgtaactgcttgtaagggtgatggacattattcgttttattcgttgttggctgttaaccctgagtagattatggtgctgaggagatagtggtttcagtgggagactagttaaaccctgatagtagtgtgagctgttcgtttaggtgtttaattagcttgtactattctcgaatatttgtcgtccgctagttcattttttgaactaagccgcgacaaataaaaaagaactcatggatagtattattattcgcgttacattgtgtggagttgcaacactagagatgatgacacaccccgctctatgatagtttgatgacgacagctttggatgaaccatgtggatctatctattagaatgttagtgaatcgattgggcgttgacatgatgcgcacatgatccatctgtgtacatatgtatgtgtaaattaaatctgggtcttggatctttcgttcaataatcaatggctagcatattttatcgtccgctagttcattttttgaactaagccgcggcaaataaaaaagaacccagggacagtattattattcgcgtt

SEQ ID NO: 40824 - DNA, 299 bp, Zea mays
  Clone ID: MRT4577_137231C.1
gctgggggtcatattctttttttttaaccattttgcaacaaaatccagcatgaaaaacggccccaaacaaagtggaaacaaaaatgatcctaccaaatccaaacggacaggggaccagaaaaaaaaacggggcctaaaccgccaaaacaaccttcccaagcagggacagctctgcccctatgcatagctgcaccaacggaccccttcagaggcccagggcggtaccaactcttggccaggcaacatcccgcacaaagccttactgtttaccggaggccagcctaaaaagcaatgaacac

SEQ ID NO: 40825 - DNA, 464 bp, Zea mays
  unsure (1)..(464): unsure at all n locations
  Clone ID: MRT4577_137232C.1
atcctttnagaaacggcacgcccttggggtgggttgttttttttttttttttttttttttttttttggggctgcccaactggccgaacttttttgttactcgtttattcatatatggaagggattatttgatcaaaaacaaaaaaggttgaaacgcacgggactgaacatttttagagggggggggttccaagaccacgtttttggcgggcacgaagcgtttaaacccgaaagaacgcattgtgcgttaggtgaacttcgaaagactgcacactttcagctattttcggggtgcgctaactgttaactcttaatgaaantgaattagttataagattgatgaaaaataaatgtatgaactggactaactgaataatttgaattaaatgacaaaaattttaaaattttgggagagttatgaatatggaaaaagggggaggggaaaaggtaaagtaaatttatctc

SEQ ID NO: 40826 - DNA, 312 bp, Zea mays
  Clone ID: MRT4577_137233C.1
cggacgcgtggcggacgcgtgggcgccacaaccgatcgccaagtcgcccgtatttgaagctctggcacatgatctcccctacctcgatctcgtaaaatgccgcattcttgcaactgcatagcagccgccccacgccgagctcgccgtcgtgcaaggagtccgtgttgtgctcgccactgttcctacccaagtcaccgacgtcgtcgaacctcgccagcgcttcactaaagtcacctcaccgaagcgccaagcagcatgccatcgccatcaccccagctgactgcgatccatttttgagcttcgaggaatcga

SEQ ID NO: 40827 - DNA, 506 bp, Zea mays
  Clone ID: MRT4577_137234C.1
atagcataacatgagtaggagtagtatacaaacattgcatgcccttcgattgccgcacttgtctatttaaccagctgggcagccccacacggccgccggtgggcggtgggcgagggacacgtacacagcatccacatttgttttggaccccagacggtccagaccagaccgggtagcgcgagcagataaaacccttttcctaactcctgacagctaggcgaccaccagccccggcccccggctgctcctgggcccagacaaatcgaaacatcacacacgcatgcgcaccgtgacatgacacggaccaccagcgtgttagtgacagcaccagctgggaacggacaccaccgcgccgagttggtgtgcgattctcctggcctggccggctcgccagggtagctagctggagtccggggtccgggcgctgcccatcgatgaacgaaacgatcggtctccccactacgtttcccatgcattgaccagccgcccgcgcgtcgtcggtggtg

SEQ ID NO: 40828 - DNA, 214 bp, Zea mays
  Clone ID: MRT4577_137235C.1
ttttaactaacaactatcttacttagtgacagtttatcctctaattaaaacgtactctccccctttcccctcacttttatataactttcatcacaatctttcaacaaaaaaaatttacacatttcataaaccacacacatcaacatttcacaaatggatcatcaatcaaatcattacaaattagtcctctatctaccctatttacatcacaaaa

SEQ ID NO: 40829 - DNA, 274 bp, Zea mays
  Clone ID: MRT4577_137236C.1
aggccggccgggccgggaatcctcacctactgtgttggcgccggcggctccgcctcagccgcaggcgcgacgaggccgcctcaatcgacctcacgtatcaataatgagctgcagaccatgatgcaccagaaccggcccatcccctactgaatacgaatgcgctctgacaataccatcaccgacaacgccaactacatgcactgcccccgatagcacgctcggcttctcgtcgtcgtctattcgcgcgcgtgctgcgacaaaatgctagaggcta

SEQ ID NO: 40830 - DNA, 1894 bp, Zea mays
  Clone ID: MRT4577_137237C.1
gtacgacagttgagacttctaagtttaaacaagcgcctcccaggtctggtgttagcagtgtgcttccttcaccttcttctgaattgattagcaaatggggtgtatatggaaacatatgcagaattgataagccttgtgtggtagatgagatccatcttcgaagatttgatggcatgttggaacatgagggggctcataggtgtgtttttgctagtatcactgtgaaagcaccggttcgagaggtatggaatgttctcacagcatatgagaatttgcctgaattcgtaccaaacctggctatcagtaggattgttcttcgtgataataacaaggttcggataatgcaggagggttgcaaaggcctgctttatatggtccttcacgcccgtgttgttatggatcttcgcgaaaaacatgagcaagagatcagctttgaacaagtcgagggtgatttttacacatttaaagggaaatggcgcttagaacaacttggggatcagcacaccctgttgaagtacatggttgaaactaagatgcatagggacacctttctctctgaatctatccttgaagaggtcatatatgaagatcttccatcaaacttgtgtgcaatccgtgattatattgaaaaggctggagccaagagtagcaattccacaggtcattctaatgtgcccacagatccagatccagatgttgatcatgatgaaagcaggcaatctgagcaaacgtgtgtgtcttgctcatccagtaccatgaagcagagaccaaaagtcccaggattgcaaaaggacatcgaggtcctaaaatcagagcttgataatttcattgcagagtatggtcagtatggtttcatgcctaagagaaagcatctccggtctcatggaagagtggatattgagaaggctataacaagaatgggtgggttccggaagattgccagcataatgaacctttctctttcttacaaaaatcgaaaaccaagaggctattgggataatctggagaacttgcaagaagagatcagccggttccagaaaatttgggggttggatccttcttatatgcccagtagaaaatcttttgagagggcaggtcgttatgacattgctcgggcattggaaaaatggggtggggtgcaggaggtttcacgccttctttctcttgaactaagatatcctagaagacaagcagacccggacgatgagagacagtctgaatccccgtctgggatgatgaagaagcacggagtgaaacctgatgaaggcaatgtttccccaaatgcgcagaaatggctcctgaagctgaaggacttggatgtcaattgggtggaatactaggtttagctttggaaaaagatatggtatctcatcattaactcagctctttcctttcttcggaggtgttctggatgcattccgacaaagacgccgcagattgtgtacagaacagcgcggtgcacgggccaaccccattctgaaggcgagctaccagcaggcaacatgttttcttgccagtaatcacgactcttggctactactgcgtatctagaactgctgacaatgctactcagcttcttttgcggtcaaaccgatccatgggtttgacaaagtcaggccataaaatgcagaaaagggtgtcgatttcgtgcgcctgttcaaagctgttttgagtcagccacgcctttgaaaaatctgaggtggtcatcgctgggttaagccgtgttcacaggttggtcgcctactttgttattactggtgatgtaagttgacctggtccttttgagagagaaggttacccgtctagtaatagtttcagtcggcacgtttgcattacattggtctcgatcaggaggcacagctacatactttacgtctttacctattgctgcttc

SEQ ID NO: 40831 - DNA, 749 bp, Zea mays
  unsure (1)..(749): unsure at all n locations
  Clone ID: MRT4577_137238C.1
ccggccgggacatagacaaggtgttctttatatttcagtttctctctcttttcgttcttttgtcgtgatacccgactcatctgcctcacttcaccaaccaaccactccacaaccatcatggctcttcctctcaccggtaaacttgccattgtcactggtgcctctcgaggtatcggtctggccattacaaaagccctcgctgctcgcggcgcaaacctcgtcctcgcctacacatccgccaactctgccgcctcaacagccgacattgcttctgaactagcctccaagcactctatcaaggctgttcctatccaggccgatcttggtactgtcgagggtcctgcttctctcattaagcaggccgccgatgctttccacccattgcgcatcgatattctcgtcaacaacgctggtgttgctctcaacgacaaggttcccgatatcaagcccggtgacttcacaacaagctacaacgtcaatgtcttgggtcctctacttctagtccaggccgcagtgccttaccttccaacagaccgttcgggcagaatcatcaatctcagcagtgtgagcgccagcttggagtttcgtgggccagagtgtttacggtggcacaaaggccgctcttgaggccatgacacgcacttgggctcgcgagttgagcgagagagctactgtcaacgncatcaaccctggccccgtccgctcagagatgtactcgcgcaactcggacgagttcaagcgtctcatca

SEQ ID NO: 40832 - DNA, 583 bp, Zea mays
  Clone ID: MRT4577_137239C.1
ggggttctacctctccatcccgccggcgccacctgcagaatatctcggacgcgatagcgcctatccatcccgccgccgccataatcgcccccaacctcgctgaacgagaaccgcaatcccgtcactccgatatgatcccgcgccttcgctctgattgctgcgcgcctcggctccgatttttgcgcgcctgcccctaatacggcgcctccgctctgatccctacgccgaggtctgcggatcatccgttgatggaaggctcgctgagctcccgcgccttgactctgctcgatgtgctcccgtgcctcggctgccctaataacgcgcgccattccaacgctcgagatccgctctgctcgctgtgcttccgcgcctccgctctgctcgctgtgcttcccatcctcgactgacctaatcacacgcgcattgttatgctgcgaacgctcacatacccgccatatgtgccacagagagcgatccagggagctgtacttccagttgtgttgatttggaggtgctgtaagagcacgtggtgatagtgctttcagtggagacctgctacaggaagtaaggtccttcagaacgg

SEQ ID NO: 40833 - DNA, 228 bp, Zea mays
  Clone ID: MRT4577_13723C.1
gaggaaaaaacggttgaatttggcctaaggcgaaacttggctttgggttggggataacactttccaggggacgtgggccccctacctacatttttagggggtggattttgaatacaataaccggggccaatcttcgcaaacccaagggtcataatgcgactggttttttttaaagggaaggggaacaaaatgaccggcctttggccaattttgttaagggggaatcac

SEQ ID NO: 40834 - DNA, 122 bp, Zea mays
  unsure (1)..(122): unsure at all n locations
  Clone ID: MRT4577_137240C.1
acctcctcacgcggccttttatcagcaccaganagactcgacagangctttttacaaacggaggacgcgacccaaacccctctcccatatcatttgatgtccgtgaccacacccgccctaca

SEQ ID NO: 40835 - DNA, 608 bp, Zea mays
  Clone ID: MRT4577_137241C.1
cactcggcttgacactcttcgccaaagctacaaccgcaccacacgctcaatcgaattaagctctcccagtatccggttccctcctctcagatgagagtcagtccctctcctctcccgcgtgcttctaagactcgcatgaaaaaaccaatcaacatgaatacatgaacgaacccaagaggcctccgattgcctgtcctctgcattgatggaggcagctcagcaacggatctacatccgacaactaccaccttctaaggctggtctcctgcaatgcaaaggctatggtggacaagagaaagaacctgtgctgtaggtccatgaaaaatcacctgactagtgtacatataaaaacatcttcttttgagtgcgcacataatagatctctattcacaacctccagcctgctcaatgactccgcattcatctggtgatgtcactacaaatgcaagcacataggtgaatctacgaatcacactttagctggaactagagatgtatacatgatgtgaatctccgtccatagtgtttatcacgcctgcttctgactcttacatggctgacatgcttaacctacttcctcgagacactttctagactcaccagattat

SEQ ID NO: 40836 - DNA, 379 bp, Zea mays
  Clone ID: MRT4577_137242C.1
ccgggccgacccacacgtccacccacgcttccgcggacacgtgggcagttccgtgggttaactcttcaggggagaatcctttagttcttccataccgattggtaatgggcctatggtagaccaactagaacgttatggtccatcccttgtaacccttacaaaaccggtgcttgcacttaggacagcttggttctgcaacaggtgtatattcgactcttgttacgtatttggtccgtgttccacaggttttattgggtttcattcgacacctacgtgatgacaatgggcctatggaagcatagcgcaaacagatgtctctgaaggccccacacggtgtctgttactgattattccatccgactgccttgccgtgttcaga

SEQ ID NO: 40837 - DNA, 419 bp, Zea mays
  Clone ID: MRT4577_137244C.1
acttcttctctagagaaaccggccgaacattctcgagaataattaaaaaaaaaaactggccctcctgcctgtgcctgcttcgtgtgactgatgatatcctgatgtcctcctgacctaaccatcacctgtcgtaaaggaactgaacggccacgcccagctcctcttgatcaacactgccggcggtgctgacccacatgatgtgcccatcttgtctcgcctcattgaagagaaagttgccaccatggactacatgacccacggcctaagggttcctgcaatgcaggccaccggcgacatcaatgtccacgacatgaataacaccgtctgcgagactgctcgtgctgaagaaagagctactagcttcatgtaagatctcgccgatgggcagtgtatccaccattgcctccctgactgctgct

SEQ ID NO: 40838 - DNA, 321 bp, Zea mays
  Clone ID: MRT4577_137245C.1
cccggcccgacccacgcgtgcgattctgttttagtctgcatgagtcgcgtggatggagccatgagcactgacaccttgcgctcttacaaggagaaaatctcttacgccagtctttgaagttatctgaccgggagccaaaactggatcctgatgataccaccggcttgaaccacccagtgtctacagaagcattgaatacaagagtgtggatttttcttatactgtcctccctgacattcttgtcttgagtaattttaatcttaaagggagtggtgggcagacacttgccgtgagtcgcggtctcaggatcaggaataagca

SEQ ID NO: 40839 - DNA, 1096 bp, Zea mays
  unsure (1)..(1096): unsure at all n locations
  Clone ID: MRT4577_137246C.1
cgtcaccggtgggatcggcgccgacgtgtggtgcgcacccggcatacccttcgcggcggaggcgtcctccgtgaactgcgtggtggcgcgccaccagatgttgnnnnnnnnnnnnnnnnnnnnnnnnnnnnnnnnnncccacagagagaggccgtgcttgtcccggagggtgaccgtgcaggagcagatatcctcgtccttcatggacnnnnnnnnnnnnnnnnnnngcgatgtcgccttattcggcgccgatctcnnnnnnnnnnnnncatgtcaggggacccgcggctcacggtagagcgccggaggactcgaggaagagataaggatgtttcagacaagagtgttactgggaggaatgaacatgtatgaccgctaccaggattggcgccttgacgttgataacatgacatacgaggagttgctcgagcttggagacaaaattggatatgtcaacacagggttacgtgacgacgagattactcgcaaccttcggaaggtcaagcacccatccttcagttccttacggttcgcaacagaaatggaaagaaaatgcagcatttgccaagaagaatttgaaacaaatgaagagatgggaaggctagactgtggccatagctaccatgtgtactgcatcaagcagtggctctcgcagaagaacatttgcccagtttgcaagactgccgtcagcaagaattgaaatccaaactccagtcacgctgtctgtagatctcggtgaaaacagcaaattctgttgtcctgtacagtccgttatatatattattattgtatgaacacaatccatttgtttcatcttgcagaaagaaaatgccatgttttggtcatgtttagggctgacaaaaaaaaaaaaaaaaaaaaaaaaaaaaaaaaaaaaaaaaaaaaaaaaaaaaaaaataaaaaaactaacaaatcaaggttacccctacctgcaacaacgccccataacaaaagaaaaatagaagaaaactaaatgaaatacgacgaataaaaataaacactgaaaagtaacatgataaaataattggggcgctggtttaaaaagataaaatttacaaccacccagctttgaacttat

SEQ ID NO: 40840 - DNA, 342 bp, Zea mays
  Clone ID: MRT4577_137247C.1
agagctatttcgtcgcaagcacccggggctgagcttggaattcggctcggggcactgttcaaaggcactatgttagctgttgggttcaaaagctgtttgggggtgatggaaagaacctgggtgcttgaactcaggtttcaacgcaagatgggcatgctataatcatgcgagtatgtttggttgcaagacgaaggctgcattgtaaaatacgggttctcgctttcctttaacacaggaggaacttgacttggttgaaaaatacttggttatattaaatccattactaggatcattcggtgatctatatcaaagggtcaatacacttgcatcggcgagcaagat

SEQ ID NO: 40841 - DNA, 407 bp, Zea mays
  unsure (1)..(407): unsure at all n locations
  Clone ID: MRT4577_137248C.1
ttttgtgatgacacagcccccggggccggagcgggattgactggtctgtcttctacctccaccagccttgaccgctgccttggggtgctcgtcatcgtcctctctgagatggggctgctcgacgaggctttgtacgtgttccggcgcttaaggacgctaccggcgcttccggcgtgcaacgcggtcctggatgggctcgtgaaagcacgcaggcctgggtgcgcctggtagctgttcgaccaaatgcttaacgggnggtttggtgcccagatgaggtcacgctcaatactcttatcaatgcatggccggatccaggggcactgaggtcaaggctcaacaggtgggggagcagatggtgttacagtcacatcgacgcatgtgtggccacatatactacgatgatatgt

SEQ ID NO: 40842 - DNA, 1708 bp, Zea mays
  unsure (1)..(1708): unsure at all n locations
  Clone ID: MRT4577_137249C.1
ccgcgccatgtcaggccctcgctcggcgccgatcgagcgccggcgggcgatccgccgcggaccgctgcatcccggcagtgcgccggaggactcctggaagaggtaaggatgtttcggacaagagtggtactgggagaagtgaacatgtatgaccgctaccaggattggcgcctgcacgtcggcgtccgcgcatacggcgtgttgctcgggggtggagacaaaattggatatcttaacataggcgttacgcggccaaggtcggcgccggaaacgtgggagggacaaagggcacaagcgtgaggggcgcaggggtggaggcagagttaccggtgggatcggcgacgacgtgtggtgcgcacccggcaaaccatgagcggcgaagggtatactgcgtgaactgcgaggtggcgcgctaccagatggtgtggaggtgcggccgcggcgccgagggggacaggtcccacagagaaaggccgtgcttgtcccggagggtgaccgtgcaggagcagatatcctcgtcattcatggactcgccgccgccgccgcacctcgatgcccccttattcggcgccgatctcatcccctccggccgcctccgccggatgcgcgggtggcgccactcccccggaggactcgaggaagagataaggatgtttcagacaagagtgttactgggaggaatgaacatgtatgatcgctaccaggattggcgccttgacgttgataacatgacatacgaggagttgctcgagcttggagacaaaattggatatgtcaacacagggttacgtgacgacgagattactcgcaaccttaggaaggtcaagcacccatccttcagttccttacggttcgcaacagaaatggaaagaaaatgcagcatttgccaagaagaatttgaaacaaatgaagagatgggaaggctagactgtggccatagctaccatgtgtactgcatcaagcagtggctctcgcagaagaacatttgccgagctctacccgaaccacagaggccgtgcatgtcccggaggcgaccgtgcaggagcagatatcctcgcccttcatggactcgccgccgccgcacctcgacgcccccttcttcggggccgatctgatcccctccggccgcctccgtcggatgcgcgggtaccgtactcccccggaggcctcgaggaagagataatgatgttttagacaagagttttactgggaggaatgaacatgtacgatcgctaccaggattggcgccttgatgtagataacatgacatacgaggagttggtcgagcttggagacagaattggatacgtcaacacagggctacgtgaggacgagattgctcgcagccttaggaaggccaagcacccatccttcggttccttgcgattcgcagcagaagtggaaaggaatgcactatttgccaagaagaattcagtcaaatgaagagatgggaangctagtctgtggccatagctaccatgtgttgtgcatcaagcatgggctctctcanaagaacactgcccggtttgccaaactgccgtcaccagaaattgaaatgcaaactccaaggcacgctggtctgcatncctaagggggaaatccatgtgnaaattggccaattaggttgtcnggtanagnccgtcatttttatttaggggggttgggggtnaattttttcncgtttggaagatacgcataatctaaaacg

SEQ ID NO: 40843 - DNA, 675 bp, Zea mays
  Clone ID: MRT4577_13724C.1
caggccggccgggaagtgcgtccttttcttcgctcacattcatcccgcgtgctctctctctctctctctctcgggccgtggcgtcgagtgggcgaccgccgccacccccgtgccgtgcgctctctctctctctctcgtgtcgacgggtgggtgggcgaccgtaggccgccgccgccgcctaggccaggtgcccaggtcgaccttcaacagcgacgagcatccaccagacgcaatcaagtatggcttcaatggcaatcattaggagaaggaagtatttcttggatcatgttaacacacctaccatttcatcgtctgctttctttacattccaacatggaagactcggtttggaggttgagccaagaacagaacagcgatttctcgagcatagttctggggattccaaatgcgagaaggagcaacacaatatgaatttgataaaaaaggatctactaggtcttggtaatgggttttggcaacgtccatcttatgtgatttctctttctcatggtggatttggaaggaatgaatttagattgcctctgagcctgggagctagatctttgctgcagtcggtccgcacagcatcaactgcaacagcaaggcagcctaagatggatacagatgatgaacagagcgaggaccacaagcaaaaaaaaaaaaaaaaaagcggcc

SEQ ID NO: 40844 - DNA, 210 bp, Zea mays
  unsure (1)..(210): unsure at all n locations
  Clone ID: MRT4577_137250C.1
atctgcactcccacgcgctcctctctcgccgtcgccaaccatcgccgcctcgcgtccggacccgccgttcctccgaggaaatggnntgactggaaccctcgttttcaccannaatgactttganagagaggtggagggccctgaagttccgcggnactgcgctgggatctggtgtnggggggcgcgggggggggggggcgcggggggggg

SEQ ID NO: 40845 - DNA, 502 bp, Zea mays
  Clone ID: MRT4577_137251C.1
attcggctcgaggaaagtgtgaaactttatggccaatcttcaaagtttctcatcagaggagtcggtatgtatatgacctttattaccgaagggaagaaatatctaaagagctctatgaattctgcttggaccagggctatgcagatcgcagtctgattgccaaatggaaaaagtcgggatacgaacgtttatgctgcttgcgctgcatacagccaagagaccacaactatggaacaacatgtgtatgccgtgttcccaaacacttgcgtgaagagaaagtggtcgaatgcgttcactgcggctgtcaaggatgcgcgagtggcgattaaattcaacatagctttattcgctatctctgactgtttgttacaatcttgtcacttgttaaatctggattatgtattattccataaaggctaaaaaccctgactaaaaatctccttgctcttacttatcaactctgggtggtattgcaaataaaaagaacgttccggtttggtat

SEQ ID NO: 40846 - DNA, 183 bp, Zea mays
  Clone ID: MRT4577_137252C.1
cccacgcgtccgataaaaagcagacaaatataaaaaatccaaactaacaaacacaaaacatacggcgaaaagaaaaaaactatagaggggaaaaggggccacctctctaaccgttcctttactacgtacgcgtccgtgcaaccccttacctttcccatcttgatccccaaattaaatcaaccc

SEQ ID NO: 40847 - DNA, 914 bp, Zea mays
  Clone ID: MRT4577_137253C.1
tccaatccagcctccaattgacctcattgctagcctcgggatcggccgggagcacctaattccatcccatccggatgggcgatggcgatgctgcatcggggacggggaggaggtgccccaagcacccgtcggagccgcccttcaccggcttctgctccgcctgcctcctcgacaggctccacgctaccaacctaattggtgtggttgtggcctccccttcccggccgcctcgtccgccttcgcttcccttccaccaggacctggaggaggaggaggagttcctgcctccctgttcccgttccaaagggacagcaggagaaccgccagcggttggggggaggaccacgctccttcgtctcttccagctagaggaccaaggagacgagcgtgagcaggacaccggcaccggcaccggcaccggcaccgacgccgccacctccaccagtggcggcgacgcccaagatccgccgtttcatctccagcgcaagcgctcccttcgccactcctgcagcgaatggatcgcctgctgcgacgccgccgccgccaaccattcctcctgcctaccctcccgtcagtctctcgatgcctcttcttccaccacctccgccgccgcagctgctggtgtgacgctggcgcctgctaatccacactcaaacaacgccgctgcttctgcgggaagcaattgcgctgccatggtcgagaggaggacgggagcctgaggtggaaccaactctggctaatcaagggcgtcctcgccaagcccggagggcatctgcttaacagatctttctccgagtcctctaggtcaaaatacgccctccaccccgggggcgccgccattgcaagatcctcttcgtcccagtcgcaaggtgtccgcctcaacggcagccactccgtgtcttcagctgggaatg

SEQ ID NO: 40848 - DNA, 577 bp, Zea mays
  Clone ID: MRT4577_137254C.1
ccggccgggatacttcttggcacatcattctctcgacacatttcatcatgcagttgacttccatcatcagcttctgggcgctagctctcttcagcctcgtccttgccgcagagcctgtaccgcgaggtcagctcacgcaggtcaacagctatggcaacaacccaaccggcaccaagatgtccttgtacgtccccaagaacttaaaggccaaccctgctgtcgtcgttgctcttcactactgcggtggtacctcccaggcttactaccagggtaccaagtgggcttccaatgctgagaagtacggattcattgttatctatcctcagactccttattccggtggctgctgggatgtctcctccaagatgacattgacccacgagggtggtggctgcagtacctctatcgccaacatggccaagtatgtcctcaaccagtacaacggtgatgccaagaaggtgtttgtcactggtgaatcttccggtgccatgatgaccaacgtcatgctggctactttacccgacgtcttcgccgctggaagcgcctacgctggtgttcccggccggttgcttcgtca

SEQ ID NO: 40849 - DNA, 373 bp, Zea mays
  unsure (1)..(373): unsure at all n locations
  Clone ID: MRT4577_137255C.1
gttgaattgtcctcaaaatacgtgtccacttaggtttcgggagggtatctggngtgatgatggtggggcaaaccgatcatgatggagaagccatataatgcttacccatgatgttgcaatagacacagctgcaccacttgcgaatgattcatctacagctggttatatagataccatgaatctttacagagcttattgatcaatgagatcttgacgcaggttctgcggtggtctagattataattactgctatggccgcagcaatggaagcagcaaatcaaggtatgatcggcaatacccaccttactgaacgtgttatagtttttacctctaggaaagaaactgaagagatggagaaaagaattacctgtct

SEQ ID NO: 40850 - DNA, 376 bp, Zea mays
  Clone ID: MRT4577_137256C.1
ataaggtcaatagcagagacacaggtcagcagtggaacatgcggtttcaacagttacagcaaggtggatgtcataaacaaccagactacctgcgtgtgcgtcccacagtacacatttaaaggtggaagtaaaggctgcacgcctgacttccagcaaccaagttgtgacttggatgaagcaggtgccacgaagcagtttcagttagtaacaatgagcaatgtggattggcctcaatgtgactatgaacagcatgacaacatacctaacaaccagtgccagcagctctgcctgacggattgtttatgtgctgtcgctgtgtttcgtgatagtgacaatacatgttggaagaagaaagtgccttttacaaataatattg

SEQ ID NO: 40851 - DNA, 370 bp, Zea mays
  Clone ID: MRT4577_137257C.1
ggggagaacaaggtcccaaaaaaaaaaattgggggggggttttaacccaaaaacacatgttttgttcaaaagggagccctttaaatcaaaaactttttgctttttgggcccgggggacccggggaaaggaattattcctggaaaaacccgtgggccccattattttcaggttggggccttttagcaaggagggactttttgaattccttcaggggggcccagggccacccccctgggaagggaagggattcccccaaggagttggtggaaccttccccggttttaccaacacccccacctttgccaaagggggatggggggaacccccccgtttccgtaatcaaatttgggcctttgacaattttttttt

SEQ ID NO: 40852 - DNA, 829 bp, Zea mays
  Clone ID: MRT4577_137258C.1
attgggacctcgagccggccgggagtgaccgcaccgcaccacctgccctgccctgcccctcctctgcagcagctcttgttcttcacgtgctcgtcctcacgacgaacccgcacgggggttagctctggctctcctgctatagatatgagatgcaggaggcggccaaggctcggcatggggtggcttcgctccgtgctctccccgctcaggaagctctggtgccgcgtcaacgcggtgcagcgcaagaagagagggatctacatcctgtacgacgacgtcaagtcgtgccaatgcgaggacgtgcacgtgctgtgggcgatcctcgttgagtcccacggcctgccgacgccgacgccgacgccgcctctgctgagcctgaagcgatgaggggcggcgggtgctccgccgctgcaccccctgaataagcgaacggtccatggatatacctcgacatggctatgtcgctgagaggtgaattcaagtagtagcgattctgaattctgatgtacatagggatcaaccgatgtgtgttgtgtcgccggtgtgctgctctgctgccggcctggattggtgcctctgttggaggctgccgagacgagagtggtcgtgcagctgcggaggaatgcagctgccgcgcgtgtcgctttgttgacgagtgtggtgatgagcttcttggagttggagcgcacccctcgttcgtttgacttctacagtttacgtacgtgtaagactgcatctggatgcggtccttcagcccatctctattggagtttggaagggaatagcaggaacagaaattgaatcctcacaaaaaaaaaaaaaaggctag

SEQ ID NO: 40853 - DNA, 233 bp, Zea mays
  Clone ID: MRT4577_137259C.1
ggagccgatgactagctacctatctcgctagtttactcatttagcggcaattagtaacggaatgtcacccatcaacatgcatggcagtgtgagcaatgacctgaacgaaccattgaaatggatcggaataatatatgaagctaacagatgattggaaaataaggtcaacaacaaatccaagagcagcaacataatacactacaacataatccacaataacaacaacatcaacc

SEQ ID NO: 40854 - DNA, 284 bp, Zea mays
  Clone ID: MRT4577_13725C.1
gaaacgaaacccttcccacctaaaaaaaaagggttcctggccaggagcctgatttttaaaattacatatgtgcccaacgtaggggtcagtgcatcccatgagggcgtacatacttttttggggaacatacacatcaaaggactggataattacttttgcccaaggtaggcgtcagggccccccatgaggggttacataaattttgtggttacttccccacttaacatgagggggaaattttgcagagtttttttttcttacccaaaatcaggaaccggaaattt

SEQ ID NO: 40855 - DNA, 958 bp, Zea mays
  unsure (1)..(958): unsure at all n locations
  Clone ID: MRT4577_137260C.1
ggtcagtgaccgcaccgcaccacctgccctgccctgcccctcctctgcagcagctcttgttcttcacgtgctcgtcttcacgacgaacccgcacgggttagctctggctctcctgctatagatatgagatgcaagaggcggccaaggctcggcatggggtggcttcgctccgtgctctccccgctcaggaagctctggtgccgcgtcaacgcggtgcagcgcaagagtacgtccgttgcccagtcagtcacaaccacgcgctctgctcccctcttccgtttctctggcttctgatccttcttgtcgctgctcctgcgcagagagagggatctacatcctgtacgacgacgtcaagtcgtgccaatgcgaggacgtgcacgtgctgtgggcgatcctcgttgagtcccacggcctgccgacgccgacgccgacgccgcctctgctgagcctgagcgatgagaggggggcgncgggntgctccgccgctgcaccccctgaataagcgaacggtccatggatatacctcgacatggctatgtcgctgagaggtgaattcaagtagtagcgattctgaattctgatgtacatagggatcaaccgatgtgtgttgtgtcgccggtgtgctgctctgctcccgggcctggattgttgcctctaannggtggggggacatggggcggcgggtgctccgccgctgcaccccctgaataagcgaacggtccatggatatacctcgacatggctatgtcgctgagaggtgaattcaagtagtagcgattctgaattctgatgtacataggngatcaaccgatgtgtgttgtgtcgccggtgtgctgctctgctgccggcctggattggtgcctctgttggaggctgccgagacgagagtggtcgtgcagctgcggaaggatgcacctgccgagcgtgtcgctttgtttgaccagtgtggtgatgagct

SEQ ID NO: 40856 - DNA, 282 bp, Zea mays
  Clone ID: MRT4577_137261C.1
accactcgtacgtcactcgttcgtcactcgtacggtcgatacgctgaggtggagcacaagaaggctgtcgagatgacctgaggaagccactaggagtactatttcggaagggagcggatggcattggctctgctccagctattgctggtcggtcttcatctactcctgcgccgcgcagtcgccgtactcgtcgaaggctctttcgttcatctccttggggccggggggctctgtcacgccaccgacaacggtcggtctctacgccataggcgtgtgcacagc

SEQ ID NO: 40857 - DNA, 374 bp, Zea mays
  Clone ID: MRT4577_137262C.1
tcgctcagccgacgccgccgcctaaggagaagagggtcctgccgccatctttccacgatttcgggcgagattattcattctaaccctagtacaaagatcttggtgcaaaaaatcatggataatacatccgttaagaaaggtttatgttcacatcttcttatgtaccatttacacaataaaaatgcccctcatgttgacaataaagcacattttgatttacttagctccaacgtatcatcttgtagcgagccacattataaaaagaagccctcctacatgaatgcatttgatattattatcttattaactggcttggaacactctggtttatttgtagaatcttacaacaagtgagatttccaattttcattttc

SEQ ID NO: 40858 - DNA, 459 bp, Zea mays
  Clone ID: MRT4577_137263C.1
ctgaaccacaccagtaaaagcatcgtgttcttgtcgcaggcggcagagagagaaattgagaagagagggatgggcgaggaactccaccacgccaccgcaaccactcgctgcgccgtcgccatagggcttcacgtgcgggctcgctcgagacagtggatccagcgcgggattccgttggaattcggtcggttcatcgcggagcatcgaaggagagggcatcgtcgcaattcaccccgtgccatggccaaagacctccgcgccattattcctggcgcgaagacacgtgtcatctgaaaggcaagttggtacctggaatctcaagtcccaggcaagttgtgcccttgaccacttcttacccaataatgttctttgatgtcacatgttcatgcataggtttaattttgatggaacccaataagttactctagattgtttatcccattaccttgtttacccctg

SEQ ID NO: 40859 - DNA, 309 bp, Zea mays
  Clone ID: MRT4577_137264C.1
acgcggacgcgtgggcggacgcgtgggtagttcctaccttcgccccccccccctcactccccctgcgtcgattcattctgcggtcagcttgacccagttcaatatcgccggcgagggaagcaacatcagaagctccggcgagaacccccaccttcggctatcgcctggggataaaatggggtcagtaggggcggtgacctatggggagcaaaagggatcccatatggagagatgaatcaatcaatttattctttcgccgtagtccctgctaaagcccccactactaaccctaagatcaaactggctttt

SEQ ID NO: 40860 - DNA, 3096 bp, Zea mays
  Clone ID: MRT4577_137265C.1
gatattattgcccgtgccaatgcgggccgagggtttccactgtgctccttctcgccgactccgccatgaccgcctcgccctacccgacgacgccgtggctgcggccaccgcctcctatggcatttctgagtctcctcctcctccttggctgcctctccccgtcgatctcactggcgggtgcggaggcggcgggggttctgagacaagtggttggtggggacgacggcgggacattcttcgagccgttcaacgtgacctacgaccaccgcgcgcttatccttggcgggaagcgcaggatgctcgtctctgcggggctccactacccgcgtgccacgcccgagatgtggccgagtttgattgcaaagtgcaaggagggcggcgtggatgtaattgagacatatgtgttttggaatgggcatgagccggccaaaggccagtattacttcgaaggaagatttgatattgtcaggtttgctaagctggttgcagctgaaggtctatttctttttctgcgaatcggcccatatgcttgtgctgaatggaatttcggtggtttcccagtttggttgcgcgatgtccctgggatagaattccgcactgacaatgaaccctacaaggctgaaatgcagatttttgtgacaaaaattgtagatatcatgaaagaggagaagctttattcttggcaaggtggtcccattatactgcagcagattgaaaatgaatacggtaacattcaaggccattatggtcaagcagggaagagatacatgctatgggcagctcagatggcacttgcacttgatactggtgttccttgggtaatgtgtaggcaaacagatgctccagaacaaattctcaatacttgcaatgccttttactgtgatgggttcaaaccaaattcctacaacaagccaacaatatggactgaggattgggatggatggtatgccgactggggcgaatcattgccacataggcctgctcaagacagtgcttttgctgttgctcgtttttatcaacgtggtggaagcttacaaaattattacatgtattttggtggaaccaattttgagcggacagctggtggtccacttcagataactagctatgattatgatgcaccaattgacgaatacggtatcttaagacaacctaagtgggggcatttgaaagacctacatgcagctattaaactttgtgaatcagctcttactgcagtagatggttcacctcattatgtaaaattagggcccatgcaggaggcacatgtgtattccagtgaaaatgtccacacaaatggaagcatttcaggaaattcacagttttgctcagcttttcttgccaacattgatgaacataaatatgcttcagtctggatttttggaaaatcttatagtctaccaccatggtctgtgagcatactaccagactgtgaaactgtggcttttaatacagccagggttggtacacaaacatcgtttttcaatgtcgaatctgggtcccccagctattcaagtaggcataaacctagaattctatcccttattggtgtcccctatctctcaactacttggtggacttttaaagaacctgttggcatttggggtgaaggcatctttactgctcaggggatattagagcacttaaacgtgacaaaagacatctctgactacctttcatatactaccagggtgaacatttctgaagaggatgttttatattggaattccaaaggttttcttccatcactaaccatagatcaaatccgcgatgtagcacgtgtatttgtaaatgggaagcttgcaggtagtaaagttggtcattgggtctcactgaatcaaccgcttcaattagttcaaggacttaatgagttgacattgttatcggagattgttggcttgcagaactatggtgctttcttggagaaggatggtgctggatttagaggtcaagtaaaactcactggcttgtcgaatggggatatcgaccttactaattctctttggacatatcagattggtttgaaaggtgagttttcaaggatctattctcctgagtatcaaggatctgctgagtggagtagcatgcagaatgatgacacagtttcacccttcacatggttcaagactatgtttgatgctccagaaggtaatggccctgttgccattgatcttgggagcatgggaaagggccaggcttgggtgaatgggcatctcattgggcgctattggtcactagttgcgccagagtccgggtgtccatcgtcatgcaactacgcaggaacatacagtgatagcaagtgccgatcgaactgtggaatcgctacacaaagctggtaccacataccacgcgaatggttgcaagagtcaggcaatctattggtactcttcgaggaaacagggggagacccatctcagatatcgctggaggttcattacaccaagacaatctgctcaaaaatatctgagacttactatcctcccctttctgcctggtcacgtgccgccaacggtcgcccctcagtaaatacggtagcaccagagcttcgcttgcagtgcgatgacgggcatgtgatctcgaagattacatttgcgagttacgggacccctacaggaggttgccagaacttctctgtagggaattgccatgcatcgactactctagacttggtggtagaggcctgcgaaggcaagaacagatgcgcgatcagtgttaccaacgaagtattcggagatccatgccgcaaagtcgtcaaggatttggcagttgaagccgagtgctccccgccatcggttaaccaagaacctcgatacgatatatgatcacggtactgtattgtggtgctcaggtcttggaaggctatggtggacgttgccgcagctttgcagggccgtgcacaatggtcctgcatcgttgtctcctatacctctgcacccatattatatgtaaacagtgacctacatgtaaatctaaagaagaggagggattgaaaagaaatgagatggaaaaggaataaagttgcttttattacaaatggtcattcctgtgaaaaaaaaaaaaaaagcctgaaaggccattcctttggacttcggtccc

SEQ ID NO: 40861 - DNA, 320 bp, Zea mays
  Clone ID: MRT4577_137266C.1
cgcgctgttcgtgtgggcggacgcgtgggcggacgcgtgggcttacccgtgggccgacgccgtcaacctgtccacgggccacaactggatgctgatgggcagcccccctagcaaggacttacggctccgcctgcaccacgtcgaccaggtgccaagcccttgtcagctggtcgggcccaagcctatcacccacgaccatgaaccgggcccggcacccgtccaggacaggaccggccagaatacgggccggtggcggcagtgccggaaagcgcaagaaggccaccgcgagcggtatgcccaagcgctctctctccgtctac

SEQ ID NO: 40862 - DNA, 282 bp, Zea mays
  Clone ID: MRT4577_137267C.1
aaagcacacatttttaagattatacatcaaacatgctcatcaaatgccaaatttcccattcacaggggtgacaaccttacattcccaaaaccttaaaaatcaatagatgaatcaatcaatgttcatgttaaagtacaccatagttctaataccactcaattatgatcaactaatctcttatataatactaaattactttaccaacaccataaccataaatatcgatccaattaatatattatagatcaaattgcttattaaccctccacaaatatcaatgat

SEQ ID NO: 40863 - DNA, 319 bp, Zea mays
  Clone ID: MRT4577_137268C.1
gggacaaacattgaaattttttggtttaaggcaaaagtccccttaaggccctgttgggccttaagaacaggtttggaaatttttgtttggggagatacaaacaaaagctcgggtttttaatttactccttggaattatccgttggattcccggacccacctttaagggggagattcttttacctccttttggagaagggcagggcttttccacttccagggacccccaccttaccttttggggcgaccggtgacttgaaaaggcctttttttttgcgaccggagaaaaaccccgcctttttgggttttcctttgggtta

SEQ ID NO: 40864 - DNA, 318 bp, Zea mays
  unsure (1)..(318): unsure at all n locations
  Clone ID: MRT4577_137269C.1
ccannacaagcaacaagcgacattgatcccaaagctgtccatgatctaaacaacacaactaacagcatggagaagctgaggaaaatccaaggaagagcaaaatcattccttcttcttggaagggggctggccttggcaatctcaacaatcgtccccgcttcggccgccctaataacctcggccgccctaatggccacaacaacaccaacctcggcggcaataatggccgtggcaccttcctccttaacaatagcctcaagaaccacaacttcaacaaacggaacacccccaacctctttcccaaagaaaaccccccca

SEQ ID NO: 40865 - DNA, 333 bp, Zea mays
  Clone ID: MRT4577_13726C.1
cccacgcgtccgcccacgcgttcggagaggagaaccagcagcctgcaataagagccagccagagaaactaataaaactctcgccgccgccatccgagcgaacaagccaaccgaccccgtccccaaggcaatccgccgtcgacgtaccaccaccaccgcaggagcgagatggagatgaagaggatcctctttgccgtcctcgacgtaatcggcgtctcggacaccgcagtgctggcctccaccgatgccgcccgcgcggtcgcgccaactgcctcagagtcgcccgtacaggctcccgctggctatggcgctggcgctgccgttggtgccgtcg

SEQ ID NO: 40866 - DNA, 219 bp, Zea mays
  Clone ID: MRT4577_137270C.1
tttgtttatggggcggaaacatgggagcaacagcgcttgttacagacgaggggccttgcccatgcaagtgcgcagctgtcacttgggatcaggcaactgaggtaggatgcatgcgccatacccacatttgcccagactctaggccggtgatcctgctaacgaactggccaagcacgggctctcctcttgatgccacatggctgccatgcattgtgagcg

SEQ ID NO: 40867 - DNA, 255 bp, Zea mays
  Clone ID: MRT4577_137271C.1
atgtctccggagaggagaccagttgagattaggccagctacagcagctgatatggccgcggtttgtgatatcgttaaccattacattgagacgtctacagtgaactttaggacagagccacaaacaccacaagagtggattgatgatctagagaggttgcaagatagatacccttggttggttgctgaggttgagggtgttgtggctggtattgcttacgctgggccctggaaggctaggaacgcttacgattgg

SEQ ID NO: 40868 - DNA, 469 bp, Zea mays
  Clone ID: MRT4577_137272C.1
ggttatttcttccttcttcggttcctcagcttgcgcaagatccgtctgggttgtccgccctccattagactacccaaggtgcggcgcatccaccaggtggaagatatctgcttgccctcattgctacagccatttctgtggcctatgcatcagcatcacgagctctggactatggcaaagagatggagagaaacttggatttttcagaggcttccagtgacattggatcgttcgcaggctctaatgattccccttgcaagctcgtgcagtctgttgctggtgttctacttgttctcgtctgtttcacatctcgtgacagcttttactgctgtggcctcagcattggcactgttcttttgcctgtctccacacatcacctatctcaaggcacgattcaatctaatggacccattcatgtccagatgttggtcgaagtcctttacacgggtgcaagggttgctggtgctct

SEQ ID NO: 40869 - DNA, 136 bp, Zea mays
  Clone ID: MRT4577_137273C.1
gacagataaagtatcctacacctctatttactatagccatttttccctctggcggcggtcttaaattttatcaaccatcacctacaccgtaaaaccattatccgagcctaatctgaagagcggtcatacgaaacct

SEQ ID NO: 40870 - DNA, 813 bp, Zea mays
  unsure (1)..(813): unsure at all n locations
  Clone ID: MRT4577_137274C.1
cattgggacctcgagccggcagccgcccacaccccatccggccagccaggcggaaacgaccgtaagagggaagccgcagccggccgctgactccgatcccacctctagtcaaccccaggcagaccgatcctcttcgtctgaccacgacggccatctcgcacgcctacttccactcaaccacataagtcttttctgccaggcctaacctttcccctgcgccgcctctactggttttgcacagtgccgtgacgtgggaagacgtggagatccaacgaaaattagatttatttcttccttctccggtgaggaactcaaaacttcccttctaggttcctcagcttgcgtaagatccgtctgggttgtccgccctccattggactacccaaggtgcggcgcatccaccaggtggaagatatctgcgtaagtcaaaacatagaataagagtggactgctattagttttccataggatggaatccttgtggaagctgacctacttgctcgacccggcatcagttgccctcattgccacagccatttctgtggcctatgcatcagcatcacgagctctggactatggcaaggagatggagagaaacttggatttttcagaggcttccattacattggattgttcgcaggctctaatgattccccttgcaagctcgtgcagtctgttgctgatgttctacttgttctcgtctgtttcacatctcgtgacagcttttactgctgtggnctcagcattggcactggtcttttgcctgtctcacacatcacctatcttaggcacgattcatctaatggacccatt

SEQ ID NO: 40871 - DNA, 227 bp, Zea mays
  unsure (1)..(227): unsure at all n locations
  Clone ID: MRT4577_137275C.1
cggttctcggaattcccggctcgtacccacgcgtctcgcaccaacgtcaaattgcacccaagaaatccatcngagaggctcgtcgacaggggcaattaatggtcgtcgtcgtctagcagcagctcacccggcgtcttattctcgcagacgccgttctggtcttcgtgctctcgggtgtcagagccagcgcccggacctcctgcgtgccccggtgggccataccgcac

SEQ ID NO: 40872 - DNA, 581 bp, Zea mays
  Clone ID: MRT4577_137276C.1
actctcgcacgcctacttcactcaacccataagtctttttcggcacgaggaacctttcccctgccccgcctctactggttttgcacagtgccgtgacgtgggaagacgtggagatccaacgaaaattagatttatttcttccttcttcggttcctcagcttgcgtaagatccgtctgggttgtccgccctccattggactacccaaggtgcggcgcatccaccaggtggaagatatctgcgtaagtcaaaacatagaataagagtggactgctattagttttccataggatggaatccttgtggaagctgacctacttgctcgacccggcatcaattgccctcattgctacagccatttctgtggcctatgcatcagcatcacgagctctggactatggcaaagagatggagagaaacttggatttttcagaggcttccattacattggatcgttcgcaggctctaatgattccccttgcaagctcgtgcagtctgttgctgatgttctacttgttctcgtctgtttcacatctcgtgacagcttttactgctgtggcctcagcattggcactggtctttt

SEQ ID NO: 40873 - DNA, 555 bp, Zea mays
  Clone ID: MRT4577_137277C.1
atggatgtcgcggaccgtccgaccctcgagtctggaccgtccgccctacaccagaacacctccaacgatgcaccaatacctatggaggaagatgacctgctgggagaagacttggtcaactacgaagctatgctagaatactcagtatggacatggaggggcggccgtagatttaatgcttactcattgtacaaaaaattaggaaagcaagacgacgaacttgtcaagaccaacatgatgctcagtggtgttgggactgatagttcgatcaaagccaagggagtcacgtccgttgagttaaccatcgggaccaagacccttgctgctgcattcttcattgctgatgtagaaggaaattacattctaatcttaggcagagattggattcatgctaatcaatatataccttctactttacatcaaatgttgctacaatgggtaagcgatgatgtagaccaagtgcatgctgatgcatcggcctgcatcgccatggctgatgcccctgtactttggacctatgagaccgctacatgtctcacaggggttgacttatga

SEQ ID NO: 40874 - DNA, 1781 bp, Zea mays
  Clone ID: MRT4577_137278C.1
gtcaaccccaggcagaccgatcctcctcgtctgaccacgacggccatctcgcacgcctacttccactcaaccacataagtcttttctgccaggcggccaggcctaacctctcccctgcgccgcctctactggttttgcacagtgccgtgacgtggagatccagctaaaattagatttatttcttccttcttcggtgaggaactcaaaaccacccttctaggtccaacaggttcctcagcttgcgcaagatccgtctgggttgtccgccctccattggactacccaaggtgcggcgcgtccaccagtggcaggtggaagatatctgcgtaagtcaaaacatagaataagagtggactgctattagttttccataggatggaatccttgtggaagctgacctacttgctcgacccggcatcaattgccctcattgctacagccatttctgtggcctatgcatcagcatcacgagctctggactatggcaaagagatggagagaaacttggatttttcagaggcttccattacattggatcgttcgcaggctctaatgattccccttgcaagctcgtgcagtctgttgctgatgttctacttgttctcgtctgtttcacatctcgtgacagcttttactgctgtggcctcagcattggcactgttcttttgcctgtctccacacatcacctatctcaaggcacgattcaatctaatggacccattcatgtccagatgttgttcgaagtcatttacacggttgcaaggtttgctgatgctcttctgcatagccacagtcttagcttggttggtttcagggcattggatgctaaataacctactggggatttccatatgtatagcgtttgtcagccatgtgaggcttcccaacataaagatctgtgcactgcttcttgcctgcttgtttgtgtatgatattttctgggtgttcttctcagaaaggttctttggagcaaatgtcatggtttctgttgccactcagaaggcatctaatcctgttcacacagtagcaaataagctcagcctgcctgggttgcaattgattacaaagaagctggagcttccagtcaagcttgtatttcctaggaatttgttgggtgggattgttccaggaagcaatcctggtgattacatgatgcttggccttggagacatggccattccagggatgcttctagctctggtactcttttttgataaccggaagttaaaggatgtgaacgttgttccatcagacgtgtctcccctgagacggcggaattatgtgtggtatgctctaacagggtatggtattggtttggtagctgcactagctgccgggatcttgtctcagtctccccaaccagccttactgtacctggtgccgtcaacactggggcctgtcatgtacttgtcatggttacggaatgagctgtgggagctatgggaagggtctggaactattctgaacgagaaagctcgtttgttggaggtctgagatccaagtggacaataagaaggatctgagctcaccgggattgaatcttaattagttattaaacattacttgagctcatactgaaagggagtatttataagctgagtgttctattcatgcatgtgagctactttctccgttctcgaatatttgttgcccactagttcatttttaaactagactgcgacaaataaaaaagaacggagagagtactaagcagttgccctcgcgaatcatgtaactgtttgtaatagaaaggttcagttcagtgcatttcagcttttttt

SEQ ID NO: 40875 - DNA, 1789 bp, Zea mays
  Clone ID: MRT4577_137279C.1
gccggccgggccgggaaagcaattgcagacgcacgcttatcatcaagtccagcaaggaaacaaacatagagcgccatggacgacgcgcagtcccgctcccatgaactagcgacaggatggcctcttctcccctagctgctggtggtgccactcctcctcctcctcctctcccctctcctctgcctgctgtcgtccgggcggaggaggaggagagagcaaggagcagcagaacgaaggcgtgctcccccggggcccccgaagcagctgccggtgctaggcaacctgctccaggtaggcagccggccgcaccgctacttccaggcggtcgcgcggcggtacggccccatcgtggaggtgcagctcgggcgcgtgcgcacggtcgtcgtctcctcgccggatgctgccaaggaggtcctccggaccaacgacctgcactgctgcagtcgccccaactcaccaggtccccggatgcttagctacgacttcctggacgtggccttcagcccctacagcgactactggcgcgagatgcggaagctcttcatcctggaactcctcagcatgcggcgcgtgcagtccttcgcctacgcccgggctgccgaggtcgaccgcctcgtctcctccctcgccagctcccctccgggtgccgccgtcgacctcagcgagaagctgtacgcgctctccgacggcgtcgtgggcacggtggcgttcgggaagatgtacgggtcagcgcagttcgagcggagcagctttcagcgggtgatggacgagacgctgcgggtgcttgggagcttcacgttcgaggacttcttcccggcgtccaggctcgcgcggttcgccgacgtcctcaccggagccgccggccggaggagccgcatattccgccagatcgatcgtttcttcgattcggttatcgataagcacctcgagccggagaggctgcaggccggcgtgcaggaagacatggtcgacgcgctcgtgaagatgtggagggaggagcaggcggatggttatgaggctcctcatggattaacgcgtgatcatatcaagggaatcctcatgaacacatttgcaggtggcatcgacacctgtgctgtaacaatgatctggatcatggccgagctcatgaggaaccctagggtcatgcagaaagcgcaagccgaggtccgcaccttggtgggaaacaaaccaagggtggacgaagaagacgtcaagagcctcagctacctgaagatggtggtgaaagagaacttcaggatccacccaccggggaccttgttgattccacgggagaccatgaggagctgcgtcattggcggctacgacgtgctgccaggcacaaggattttcgtgaacgtttgggcaatgggaagggatgctagcatctgggatcgcccggaggagttcagtcccgagaggttcgagggaagtcatgtcgactttagaggctccagttttgagctcctcccgttcggctcagggcgaaggtcatgccctgccatcgccatgggtgtcgccaatgtggagcttgtcttggccaacctgttacattgctttgattgggagctccctgatgggatggtggaggaggacatcgatatggaagaaacagggcagcttgcttttaggaagatggtgcctctttgtcttgtgcctattaagagagtataaatgtataattgcactggaaggatgatagactatatgtgcattctcttgacatatattcagttcaaataaactacttcctcctcgtttaaataaacaacaaaactcgtgcaaaaaaaaa

SEQ ID NO: 40876 - DNA, 290 bp, Zea mays
  Clone ID: MRT4577_13727C.1
acttttcttcccagtttgctccgattttgattccatggtaatcgcagcctgttcctctcgtcgtctcgtccctacctttcctctgattgcgtgggatctcaactcaatctctccttatatagttatatgtagctgttgagttcgttccggttttgtttgacgatagttgagtagacccctggcaatccacccttgcacggttcttttaggttttttgttcgtcatttgcagctgccattctgcctagattgtttaagcgaacctcctccggggctctctttgttgaagtt

SEQ ID NO: 40877 - DNA, 1890 bp, Zea mays
  Clone ID: MRT4577_137280C.1
gccggccgggctgcggggcccccatccgccatcccccaaccccgttcttctccctccgtccgaccgtccctcgacagtgccgaggcgcaacctagcagccgcccacacggcgcgacatccactggcgcaagcgaaatccgcaagggccaacggatcgccggccggcgcgccgccagcctcctggctcggccgtcccgcggctaacgcaggggcggaaaggccggccagccgcccacaccccacggctcatccggccagccaggcggaaacgaccgtaagagggaagccgcagccggccgctgactccgatcccacctctagtcaaccacagtcagaccgatcctcctcgtctgaccacgacggccatctcgcacgcctacttccactcaaccacataagtcttttctgccaggcctaacctttcccctgccccgcctctactggttttgcacagtgccgtgacgtgggaagacgtggagatccaacggaaattaaatttatttcttccttcttcggtgaggaactcaaaactacccttctaggtccaacaggttcctcagcttgcgcaagatccgtctgggttgtccgccctccattagactacccaaggtgcggcgcatccaccaggtggaagatatctgcgtaagtcaaaacatagaataagagtggactgctattagttttccataggatggaatctttgtggaagctgacctacttgctcgaccctgcatcagttgccctcattgctacagccatttctgtggcctatgcatcagcatcacgagctctggactatggcaaagagatggagagaaacttggatttttcagaggcttccattacattggatcgttcgcaggctctaatgattccccttgcaagctcgtgcagtctgttgctgatgttctacttgttctcgtctgtttcacatctcgtgacagcttttactgctgtggcctcagcattggcactgttcttttgcctgtctccacacatcacctatctcaaggcacgattcaatctaatggacccattcatgtccagatgttgttcgaagtcatttacacggttgcaaggtttgctgatgctcttctgcatagccacagtcttagcttggttggtttcagggcattggatgctaaataacctactggggatttccatatgtatagcgtttgtcagccatgtgaggcttcccaacataaagatctgtgcactgcttcttgcctgcttgtttgtgtatgatattttctgggtgttcttctcagaaaggttctttggagcaaatgtcatggtttctgttgccactcagaaggcatctaatcctgttcacacagtagcaaataagctcagcctgcctgggttgcaattgattacaaagaagctggagcttccagtcaagcttgtatttcctaggaatttgttgggtgggattgttccaggaagcaatcctggtgattacatgatgcttggccttggagacatggccattccagggatgcttctagctctggtactcttttttgataaccggaagttaaaggatgtgaacgttgttccatcagacgtgtctcccctgagacggcggaattatgtgtggtatgctctaacagggtatggtattggcttggtagctgcactagctgccgggatcttgtctcagtctccccaaccagccttactgtacctggtgccgtcaacactggggcctgtcatgtacttgtcatggttccggaatgagctgtggcacctatgggaagggtctggaactattctgaacgacaaagctcgtttgttggaggtctgagatccaagtggacaataagaaggatctgagctcaccgggattgaatcttaattaattattaaacattacttaagctccaa

SEQ ID NO: 40878 - DNA, 391 bp, Zea mays
  Clone ID: MRT4577_137281C.1
ctattctcgccgacaagtacatgaacaaggagctggagcttgacaagttcataacccatgaagttggcctcaaggacatcaaccaagcttttgacctcctgctgcaagggaagagtctcaggtgcaccatatggatggacaagtgatgcaataacaagagttacgcatcggaacctgaagatgctatgatgcttccacctcgtttcagtgaaaataattgttttatcagctgccaaaagaaatgttatatgtaccttaaattcgagttttccattccttttcttcacgtcatcactcaaacatgttaaaatgtgcccatgttttgatttttaaaaaaaaaaaaaaaaaaaaaaaaaaaaaaaaaaaaaaaaaaaaaaaaaaaaaaacccac

SEQ ID NO: 40879 - DNA, 450 bp, Zea mays
  Clone ID: MRT4577_137282C.1
ccaaaaaaaaaaacgggtggtagggcaaaaattgttgctgctggaaaaaggcaccccccaaggggttacccccccctaggggataaaaaaaccggggcccctgtgggaggcccccaccaaattcccccccaaccagtgggtaaaaagaaaaaagttgtcccaagaagccaaaagggtttcccacacctagctgaaaaaaaccgggaccaattgggggcaaaacctggggtggcaacaaccgttgttccaggtttttagggcctttccccaaagcgagcggccaaaaaaaaaaaaattttcccgttgtaggaaggcaaaagggtcccccatggctagttaactgacccctggaaaaaactgggccaacgggggggggggggggtatccaactccgtttcccaaaaaaagggggttggatccaaccacctgttgtgccaagtaggcaaaagg

SEQ ID NO: 40880 - DNA, 331 bp, Zea mays
  Clone ID: MRT4577_137283C.1
gggggaaacaaacccaaaaccgcccgggggggccaagcccctaaaaaaccccagcccctgcaattggggggaccaaaaagggcatgggtttttgaacattaacctaacgggccccccttaaagggggggggggcccccaaaccaagatcttaatttttcctggggaaacggggtaacaaaggccgggtttcctcaggaaaagggccgttttttgtttcccccgggcaatcccccccaagggacgttttgtaaaaaacgggggggcctttaaaagggaacacccccttttgggatttccgccgccaaaaagaaaaaaagggtttttttggaa

SEQ ID NO: 40881 - DNA, 132 bp, Zea mays
  Clone ID: MRT4577_137284C.1
gttgcaccaattcctgattttggagtgtaaagatagtataacctagggttaacgacgatgcaccagttatatgctgattgccacgttatttgcgaggtgctactgtatcacagtgagccgacattctacaac

SEQ ID NO: 40882 - DNA, 298 bp, Zea mays
  Clone ID: MRT4577_137285C.1
tcgcggactcgtgggcactgcttatagctttgatcattcaaattatgtatcgatgtgacaaggatacctctgcttatggtttctacttttgatgcactctgtgactcttgagtgcttggcatgatccctgcttaacacaatataaaaattgtgacagataagacggtaaactgaggtggggatactaacgtattagtgggaagagtgctacactggatgattgctatgatggaaatcttactgcaactgatggacaagctattatcctgttcgatgtctttcacggtcatggtggatc

SEQ ID NO: 40883 - DNA, 253 bp, Zea mays
  Clone ID: MRT4577_137286C.1
aaaaaaaatatcgtttaaaacctaatggtcgctgccacagaagtaatgcttgacatgagtgcatgactgtccttgcttggattcaatccatttgcatacttacactggcatcccctgggccccggagcaacggcaggctgaccgtgtacgaacaagcaagtcctccgagagcggaccaaagcgctcaaggacgcttaaccaaatgaacttcggggccgaacttgccgtccgatttgggccggtgtgcatttgt

SEQ ID NO: 40884 - DNA, 313 bp, Zea mays
  Clone ID: MRT4577_137287C.1
attaggaatcccggtgtagcatatgcattactacaggataacataggcatatttagtagatcagataactaacactggaactacagcataatttgttcataatttacaataactatggagtaataaatccatccaaaggtgtctcatagcggtgatcacacataatttacaataaagataaggtattgatccaaaacgcctctgcagaggcatcacgcctatatacgataatattactcgagaaacaaaaagaacttcatctttgtatgcggttgaaacatcagtcgcattcaccacagttcaagctcacatg

SEQ ID NO: 40885 - DNA, 317 bp, Zea mays
  Clone ID: MRT4577_137288C.1
acataagcagaaatacaaacaaagacatttgactttacacgaggcgctgcacacaaacacgccgagcattaagcaccaatggctgactaccagaaggtggactacttgctcggaagaagtgaggtcggttgccccggacgtcttgggccgtcagtgatgcggcgtccagcagcacgtccccaatgagaagttcaaggaggtcgacacggtctcactctccggagccaatcagcactaccactaccatggttaccacggcagacactgcttcgttttgcgctagaccagtgttgaggaagacatcttttcctgcaccg

SEQ ID NO: 40886 - DNA, 661 bp, Zea mays
  unsure (1)..(661): unsure at all n locations
  Clone ID: MRT4577_137289C.1
ctgcagnagatccgcaagaaacagtctactttctgctgtctcctaccggaagagagaaatcaggaaaggacagctaatgaccataatacctggacctctcttcacggatatttgctcctacggcacgaatgggacgtcggatcgctgctttcgggaggcttgcgttccgatgcgcttcacgtcgtgatgangccaagccgtaggcgacctccccgctcttctcgcgacggcgctaccgcgggctgaacctgtccctgctgaccttggaggcgccaacttacctaacgggctcgtacgcgccggactacgcctggtattcctggcgcgttgtaggacctagcgccttagcattgacaggcaacaaacaatcactgagatgtgatgactcccgctcttcatgctgttggcgctcgctgctccttcaccggagctaggtcgcccgcaatgtctccaagctcattgaggtcgtgctgatcttctgcgcctccgatatcgtctcctctctggcatcggactacctcaggctgcccatgctcgtacagagatatagcatcctcttcacctgttgcttgcagggagggatcatgctgagcatcaaggtctacactccctccatgggaacgcccagagatggcgaataaccgctctatggcatgggcag

SEQ ID NO: 40887 - DNA, 3027 bp, Zea mays
  unsure (1)..(3027): unsure at all n locations
  Clone ID: MRT4577_13728C.1
ccggccggggcgtgcgcccttttcttcgctcacattcatcccgcgtgctctctctctctctctctctcgggccgtggcgtcgagtgggcgaccgccgccacccccgtgccgtgcgctctctctctctctctcgtgtcgacgggtgggtgggcgaccgtaggccgccgccgccgcctaggccaggtgcccaggtcgaccttcaacagcgacgagcatccaccagatttctacatgagtgtgatcttcctattgtgaattcagacgcaatcaagtatggcttcaatggcaatcattaggagaaggaagtatttcttggatcatgttaacacacctaccatttcatcgtctgctttctttacattccaacatggaagactcggtttggaggttgagccaagaacagaacagcgatttctcgagcatagttctggggattccaaatgcgagaaggagcaacacaatatgaatttgataaaaaaggatctactaggtcttggtaatgggttttggcaacgtccatcttatgtgatttctctttctcatggtggatttggaaggaatgaatttagattgcctctgagcctgggagctagatctttgctgcagtcggtccgcacagcatcaactgcaacagcaaggcagcctaagatggatacagatgatgaacagagcgaggaacgcgagcgaaataaaaggaaaaaggaggcatccccagaagaatgtgatcaggctgtggaaggcctcagcactgcaaaagctaaggctaaagctaaacaggtacaagaatctctgaaggttggccaatcaattatacagaaattttgggcaagagtcctgggtgtgggccctgctcttcgtgctgttgcttcaatgagcagggctgattgggcagcaaaacttaagcattggaaggatgaattcgtttgtacactgcagcattactggttagggacaaaactactctgggcagatgttaggatctcatcaagattgctggtgaaacttgctggggggaagagcctttcaagaagagagaggcaacagctgacacgcacaacagcagatatcttcaggctggttccgtttgctgtgttcatcattgttccattcatggaattcttactgccagtcttcctcaagttatttccaaacatgcttccatcaactttccaggacaaaatgaaggaagaggaagcattaaaaaggaaattgaaagcaaggatggagtatgcaaaatttttgcaagataccgcaaaagaaatggcaaaggaagttcaaacatctcgtagcggagaaacaaaacaaacagctgaagatctggacgaatttttgaataaggttaggagaggtggacgtgtctctaatgatgaaatcttgaattttgcaaagctattcaatgatgaacttactctggataacatgaacagaccacgcttggtaaatatgtgcaaatatatgggtatccggccttttggtacagatcactacatgaggttcatgcttcgcaaaaaacttcaggacattaagaatgatgataaactgattcaagctgagggagttgaatctctctctgaagaagagctccggcaagcctgccgggaacgtggtcatctaggcctgctgtcaactgaagagatgtgccagcagctccgagactggttggacctatcacttaatcatgctgtgccatcttcacttctcatactttcaagagcctttactgtgtctgggagaatgaagccagaggaggctgttgtagcaacactatcttctttaccagacgaagttgtggatacaattgggacagtattgccatctgaagattcagtttctgaaaggaggagaaaattagaattccttgagatgcaggaagaacttatcaaggaggaagagaaaaagaaagagaaagaagaaaaggcaaaacaaaagaaagaagaggcaaagatgaaggaaccagaaactgctgaagaagatttagctttgaaggaaatgactgatgctactgctagggaagaactgagaaaagcaaaagaacatgacaaagagaagctctgtaatatcagccgtgccttggctgtgctcgcatctgcatcttctgttagcaaggagcgtcaagagtttctgagcctcgtcaataaagagatagagctatataactccatgctcaaaaaagagggtactgaaggtgaagaagcagctaaaaaagcatatatagccgctagggaagacccagacaatgatgctgaggctgctgcagaagaaaaggtctcgtcggcgttgattgagaaggttgatgctatgcttcaagaattagaaaaggagattgatgatgtggatgcacaaattggaaaccgttggcagctgcttgatagggaccacgatggcaaggtgactcctgaggaggtggccgcagctgctgcctatctgaaggacaccatcgggaaggaaggcgtgcaagagctcatcaccaacctttcgaaggacacagaaggaaagatcctcgtggaagatatcgtgaggctagcatcgcaaacagaggaacacaacgacgacgaagagcaatcacggcagtaggtggaaacagcccgagtatctagatgggtggcctattatttcaggaagaaaactaccaacctctcagttacttgatggctgtgcctggttaatcagaaggcagtacaggcgtttttggtgcccctagtcagagaccccggtagaataactcgttgctgtaaagatggtgtgactgtgacatgcatacaagtgatagggtactctacagagttgtggttcggcaggtagttcgcaaccgaaattttgactggttgctgtgaaagtggaaatacagttcggttttgtcttaaagctaccctcaattctaaaaaaattgtcttctcttgagtctaaaagtagacgggtgactaatgtggaaatgaattaggatgtttatgtactccccctgtttaaattatagagcattttaactttttggagattcaaaaaaaaaannnnnnnnnnnnnnnnccg

SEQ ID NO: 40888 - DNA, 859 bp, Zea mays
  Clone ID: MRT4577_137290C.1
ggaccctcgaggccggccgggccggctttctcttagactatctgccgctccagcctttcgctagggtttaaccaccggcggcgcgcgcgacggcggcaagatggtgcagcgtctgacctaccgcaagcggcacagctatgccacgaagtccaaccagacgcgggtcgtcaagacccctggtccggatctcctcgacttcctatcattttctcttctgtttccttttcacttttgttggttcctttgatatcttggtttgagtatgttttttatgtgctagattggtttgtttttcaggtggcaagctcgtgtaccagtacaccaagaagagagccagcgggcccaagtgtcccgtgaccgggaagaagatccagggcgtgagtgaccactttctcatcataacataccttatacttgtggcacgtagctcacgattgttcggttagtcttgcggccttggtagggcgatttgttttgggaaattgggagtaggtacggtggtgggaaattgcggtattgaagttggtggtaatctttccgtaaaatgtagtgaagttagttgtccatatcgatatttatgtcactttataatgattagaattcttcttagtgtggaaacgggtgaaattcgggctgcaacatgcaatccttttttgcacaggcataaaattcatgggatggaatttgattcccgagctgtgcattttgttgtgtaatggaggctagggagcctttcagtcggaaatggattggtggctcactataaccggtcgaattacgaaaaggctaggggggtgttcatggcagctaaagcagtgtctgcaaagtgggacactagcagtagcagattgctgctaca

SEQ ID NO: 40889 - DNA, 406 bp, Zea mays
  Clone ID: MRT4577_137291C.1
atagctctgatactgtcacgcaagcaaaacttgcgctgtaccatgcactgtttcaaaaggagcgtgggatcgccgctgagactgtatcacatcaccgccaccatttccgcgcgcaacacaagattaattagcacctccggaaaggctgcatcctctaaagtatccaaagtcagaccaggcggacctgaagttccaacctgaggaacttcatccccttgatgaagctttggcagctaagtatgaacatgctggataggattccaagctttggttccaataggcggacttcactgacatggtggcacatcatgctcacaataggataactcattccagactatgttggccatccctacaagaaagaattcaatttttaatgtcatacctgcagagctttgttcctcac

SEQ ID NO: 40890 - DNA, 499 bp, Zea mays
  unsure (1)..(499): unsure at all n locations
  Clone ID: MRT4577_137292C.1
aacaacagcaacaggggcggccaacacagagccaccnagccgnggngaacccngncaccnacnngcaacagcagcngcnggcanccaacccacnngcgcnggcgaacgnagcngcaggccagcaacaacaacagcggcaacagtttgtgccagagcacagggaacnagccagggggaacccngccgncnaccnacaacnacnnncancnagcccgcgcgcggngggcaangcaccnacgnaccnacaacaacagnngcngcaacaaaaaggaccagcncngacncagggggcgggggcaaacccggcngccnacnaacaacagaagcnnccaaacaaccaacnggcngngncaaacncngcngcgnaccnacaacagcgacaacagnnacccaaaccaaaggcaggggccaacccaaaggncgcnaccnnccggcagcagcaacaacaannggcgccagacaaccagnncncnnngangaacccngccnngcagcaacc

SEQ ID NO: 40891 - DNA, 799 bp, Zea mays
  Clone ID: MRT4577_137293C.1
cattgggtacctcgaggccggccggggaatactttgaagagacatataagcttgatcctctagcagcgacagcgttgagagcagattgtattattagcagcatctcgttcccgatcgatcttatagccatgacgacgacgacaaaggtaggccgcgggagccgggcgggacgcggaggaggagatgaagcggaggaacgccgagctggagagggcggtcgcggaggcggcggcgagggaggagcggctgcggcgggagctggaggcggccctggcgcggctggcggtggccgaggaggccgaggagcgcctgtgcgtgcagctcggcgagctggaggccgaggccgtggagcaggccatcgagtaccaggagcgtgtcagggcgctgtccgagcgcctcgccttcgccgacggcgtgctcaggtcgtccgggatccggggcttcgccgccgccggcgcatccacctcgaggatggattgatttgatcgatgtgtgtgtacgtacgtcatcaccggcaaaactggctgcgtgctccgatcctcaacgatcgacgggtattagtagtggcctaaattaaagggacgtgtacattttgttaattatttttattatcgtccaccacgttgattcatgtgtggcgtagtacgtgtgtatattgtctggagtttatattattagcttgagagatgtagacaaggttgtaaagaaatcagtggctactgatctgctttctacttttcgctggtttcattttaatttatatataatataagaccggacggatcggtctttgccctct

SEQ ID NO: 40892 - DNA, 349 bp, Zea mays
  unsure (1)..(349): unsure at all n locations
  Clone ID: MRT4577_137294C.1
cggacgcgnngggaccnggcgnacaggaggacgacccaacccaagcggcacacaggaaggaagaggangccgccgccgccgccgagcgggccgcnggcgcagccgcaggacccgaaccacgcggcggcgcaggagggccggnaccgcaacagccaggccggggacgccgacgcggccacggcggcggaggcccggggccggcacgcgccggggcacgaggccgagaccgccgagcacgacgaccggcacccggcgcaggagcacgaggccgcgaccaccgacgggccggaccacgnggaccnccaggccggccgacgacgcgggcacgccgacaccaacgccggcgcgg

SEQ ID NO: 40893 - DNA, 489 bp, Zea mays
  Clone ID: MRT4577_137295C.1
gcagtactgcgtcaccagtccacaggcagaggaaaggtcccaggagacaatttgccaccatgactggccgtaggtgtgcatccactcctgcagcagcgaaaaaccctaattgctccagccactggaacatgttgccactacatgacaaccgtaagtattagaacaccacgtgatctgctgataccatacaacttctcttgccgagcgtcacaaagacaaattgcatcaccacttcaaaattgagttgaagttacagagccatgttttgcttgtcctatcggaggatgcatgaggcataacttggtggcctggatgaagacaccaaaactgtggcgaccatcacagtgcataatccgtgatgaccattcatgtgcgaatatacattctgactgagaagaaagatccgcggcaagaggacctaatcaccacctcaaacatcgtagacaaaaaaatgaattgctgccggtattgcaaaatctgcagccattg

SEQ ID NO: 40894 - DNA, 374 bp, Zea mays
  Clone ID: MRT4577_137296C.1
cggacgcgtgggcggacgctccggaggaagactttgataagcgggaaagcggaccacgtcggcagacgcgaacatatgggcaatgctagggcgagtcaaggacgagcaggatgagaacgtggtcgtggccacgagcacgcgtagacggctgtccaagcaaagggcaacaacccgccagcggggtccatacaggtcaagcggagcaccacggagaactagcctcctacggacgccagacgaagaaggaagggttctgaattgcttacaaaagctagggatgacagctattaatcgcgaccaagtggaactacaaggaaggagcaggcgtttgacacagaggagattagttcctagggcaagtatgacgcctcaca

SEQ ID NO: 40895 - DNA, 182 bp, Zea mays
  Clone ID: MRT4577_137297C.1
taccaaaccaacacactggcagtctctcctgccatcctgcacaactaccgattcatgctatagggaaaatcacccatatccattcctctctatttaacaacgtaataatgcagaaaaacgacacacattctaacgtgtggtatgaccaatactatatgcttcatactaaaggcgtggttgca

SEQ ID NO: 40896 - DNA, 621 bp, Zea mays
  Clone ID: MRT4577_137298C.1
tttttaccccccccccccccccccccccccccccccccctaaaggcaaaaagaagggccaacacaatggcacaaacggatacaaactatttttaccactacttaaatccttcctttatgagcatcccaccggggttacattaaattaaaaaatactgcatactaaggcaagcttagttaggaagtacaaatactgcaaatttgttaggcaaatagttgaggggcctgaccaaaaaaaaggttttctttaacccttaaaaagggagggccttatttaccataagcccataaccaaatggggcagccaaaattttgatttcattttccataaaataaggattttttgatcccccattttccaaaaaatttaagggcttttgtagccccacattacaggggagggtaaataacaggggatactgttgcacgttttttttttcctttaagaaatactaaaaaagttaggggcatggggggcctaaatctccttccatatttgacccaggggatatccatccatgacacttctgggggttctcaagggggctggggacacagctaccattgggagtgtacccattgcccatccaaatgactggaatggtgtaaaaaaggcaggttt

SEQ ID NO: 40897 - DNA, 356 bp, Zea mays
  Clone ID: MRT4577_137299C.1
aaaaaacgtacggactagaacttaaattacacaccaaaccgaatatatattatatatgggctatatatctagtagccgagtacaacctagcaacaacgggcaagcgctaccaaatggcgcctctaggagacggcggagctgctgccgcggcggcgtccaacaacctggtggtgtcattcggcgagatgctgatcgacttcgtccccaacgtggacaggctgtcgctggccgagtcgggcggcttggtcaaggcacccgtttgcgcagcctgccaacgtagcctgcagcatcgccaagctcggcggatccatacgcttcgcaggcaagttcggcgacgacaagttcgggcacatgct

SEQ ID NO: 40898 - DNA, 335 bp, Zea mays
  Clone ID: MRT4577_13729C.1
gggggagaacattctgggggcaagcacgatataactactctcctaatcactggcggaatactttcacaaagggtgctcatgctctgtttattgaaaacaacaaagacttgtgctggcagcctcatgtcgagcgaaaacagcccaatacacgcttcttcttcatcatagacagacaggggcggctgtccctatccgcgaaggcgataacctgctggaaacctcttaccccactgtgcttgcggcaatggatgcccgtgccaaagataacagccagggccgttgagcgaacttcatatcaaacaaaggccctagtgggctgccatccacatgcctca

SEQ ID NO: 40899 - DNA, 590 bp, Zea mays
  Clone ID: MRT4577_1372C.1
gcctgcgtgtactgggctggtattacacggtcgaccttagcgttcggtggtcgttcgtgttctaccggtgcagatttcgtcgtgtggttcgtgacgagcagggttcgtgtaggtgctccgcggccttggatgaggtgtgtcaggtttctacgaggcatctggtagtacctggttgccggtctggagctaaccccactcgttcggggtgtccatacacactcgacacgcactgaatcatgctacatgcgtggaaggcgagggagtggggacgacaacctattacggctagtaggctggcatacaccatgcgagcaagggcctcatatttctgtggggccaccactggtcatgagacgctatcctggcacaacactcgacggcgcccaagaaactgggcatccttaagattcttcatactatttctgcgcctggtgagttccaggtctttttctgtcccggcgggaggaaccgggaatttttcctgtctagctttagcatgagcatccatagagctggatacaagatctccagcgagcgagtaaagaagctgttctggaggcatgagcaggacaaggggatcatcttgcgcg

SEQ ID NO: 40900 - DNA, 743 bp, Zea mays
  Clone ID: MRT4577_137300C.1
ctcctcctcacgctcgagcccacaacagtctcctgcgcatggcacgcgcgcccacccagcccttccccttccagcagttgagcacaccgtccctccccagccgtgagctcgcgaagcccattttcctggtgccgagtttcctctgcgtctctcccacggccgtctccctcccttcagctcgccctgtccctgccatggacgccggtgtcctctgctcgccgcggagcttcctgctcggaccgtgcctccatggtgtgtcgacatggtgctcgggccgcgtccttggtcgcctgtttctctgctgtcgcagccctgtcatttgccagcgcccctctgctcgcctgttccagtttgccatcgtgtgcccctggtctcggctccacaccaagctccgttcatggccgcgtcccgccaagttccgtcctccatggctgcgtgcaggcttctctgttcgccgtgaccctctgctcggcgtcctgctcgcccccgacactgcgctcggcctagccatcttcacggcgttcgccggccgcgattttgcctgagtttcctgttggctcgccgggtgtttctccctgcagctacgccatcggcgcgcccagcctgctcgtcgtggacgtgagccactgcccatgtcgagctccctttcgtgcgttctcctgtgtttagccttgatgcgcgcgctcctctgcttgccagtgttcccagctcgcccgaccgtagtgttagcactcctcgacgtc

SEQ ID NO: 40901 - DNA, 1979 bp, Zea mays
  unsure (1)..(1979): unsure at all n locations
  Clone ID: MRT4577_137301C.1
cgccgtcgaccattccgtcgtctcgtctgggaccctcgagacgttatcgcagtcgcagcgggccgggcccgatctcccaccaccaccactgaacccgctgcttcccctcctccacacctctcggtttcgggaaacctctcccccgttcccctcgaagcctacgggctcggggggcttcgatcgaatcgaatcggatcggatcggaagcatggagatctcgctcgaggcgtcgtgggtgggcgtgcagcggcacgggcaggacctggcggaccgcctcgcgcagggcttctcggggctcctcctccacgcgcagccgccgcagctgcccccatggtcgccggcggcgctgttgccgcccaagctcgtcatccccttcgacctcgacctccccgttgtccccttcgtcgccgggatgcgccgcggggtcgggaccgtggacctccccgccgtggccgtctcgtcgctcgtcgagatcggcggcaggctcgggcaggcggggtccgagctcggtgcggcggttcagcatctcgcgcgccaggtgcctgtgcctgtgcccttccggaaatgggaagccgcacagccgccgaccgtggtgacgggggatgttgcgctcgctgtggggacggttgggtccgcgaacgtcgctttggaaagggctgtagacatagggtccctcgaggtggcagcggctgctgctgcggcggccactggaagtgccactgcaggtagtgtgggcgcggttggggccatggacgacgatagactggatgatgaggaagacggatttgattgcgaaattgggacattggagaacattaagaaggctaagggcactgtaaatgtctcagcaacttacaacaccaggcaccatgactttgagagttcagtagtcgcacgaggagacctttggaggttggagtcatcgcgtggcaatttaacttcagggaatgatagctcaccacttttccttgttcaacttgggcctttactgtttgttcgagactccacgcttcttttgccggttcatctgtcaaagcaacaccttctttggtatggttatgatcgcaagaacggaatgcactccctatgcccagctatctggtcaaagcatagaaaatggatgctgatgtcaatgatgtgcctcaaccctgtagcttgttccttcatggatgtgcaatttccaaatggacaaatgacatatgttgctggtgaggggataacagcaagtggttttatccctttatttggtggattactccaagcacatgcaaagtgtcccggtgatacaagagtgagcttctccttcaagaacaaacaaggtactaggttcagtccaacgtttcagtggcctgacaattctgtttcatttggagtcgcacaagctgtagcatggaagagatctggccttatggtcaggcccagcattcaaatcagtgtttgccccactttcggaggaactgatcctggaatatgcaccgagtttgtccactctttgaaggaggaagtcagcgtaatgtgtggtttctcttgctcaagacatccctcagcattcacagctctctctcttgggcgatccaaatggaatggccaggtcggcagttcgggactagtaatcaccttggagacaccccttgacaacatggcaaggccttctttatccgttcaattgaacgggggtttcgagttctgacatttcccccgtgggctctagaatacaactgtatatactgtatctcatagcgagaagatgatatgccactgtatatattgcacacatgtagctgtgattaagtagatatcttcccaaccggtgaagtgtatagtcctaaaaacagacaaatggcttactgttttggttcactgaataaatttgaaggcttgtatgtcgtacctgtacgttcgaactatttgtcttcttcaataaaaattgtagtactccttgaaaaaaaaaaaaaaaaaaaaaaaaaaaaaaaaaanag

SEQ ID NO: 40902 - DNA, 160 bp, Zea mays
  Clone ID: MRT4577_137302C.1
cccctaacccctttaatccttacagggcacaatggtgcaaagtggaagtggcgcgatttaccaaaagggcctctacctgattgggttagggggtcggagtacctgaggttaaaaaaatccccttgtctgccccaccccaaagcacaggttctaaggttcg

SEQ ID NO: 40903 - DNA, 398 bp, Zea mays
  Clone ID: MRT4577_137303C.1
cctttttattttttttttttttttttttttttttaaccggggggttttttataaaaaaaaatggggttaaacaccccaccaaccgagaaggtggatgaaaaacacaaacgttttcactattccctttttaaccaccaaacataacaatcccccaaaaaagaggaaactgaccaaccggaaaacaaggcacaagaccatttacacaacccactgaacaactcaaaacacttaggccttctttaggatgcatcctagcactaggaccaaaagaagcccctgtttttccaccaaagagctaaaccgtctgcccagaattcttgacttgacattaaacaaccggttgaactccctgaggagagacccgataatagcaccaccaccattgcctgtcttcccca

SEQ ID NO: 40904 - DNA, 319 bp, Zea mays
  Clone ID: MRT4577_137304C.1
acggttccctgacgttccaaaaatgcaagcgagtgttttgcccgaggatgggctcttccatgcgctattacaagccccactttctacgggcgagaatgacaggtcaactgaagagatacctttctcaatcgcatcgtcatgtaatggatactcccagaacgccccccaacaatcacttatgttccaaaacgagaatgcaatgtactagcactaaagctcttaccatctttaaatagcacacatacaaaaatgatgtgatggatgctcacccagataactcacaaaatgcacacataataatcacttacacaattggccc

SEQ ID NO: 40905 - DNA, 1151 bp, Zea mays
  Clone ID: MRT4577_137305C.1
cacgaccacgctagcacgcactctccgtctctccccttccggttccagtagctgcatccgctgcgccaagtcccaataatcccgcagcccggcggcatggcggtgagcaacaacatcacggcatgcatcaacttcctggtgcttctctgcaccatccccatcgccgcgacggggctgtggctggcctcgaggcacggcagcgaggactgcgccaggctggcccgctggcccgtcgccgtgctgggcgcgctcctcctgctggtcgcgctggcgggtttcgcgggcgcctactggaaccgcaggggcctgctcgcctgctacctcttcgcgatggccgccctcatcacgttcctcctcgccttcctcgtcttcgccttcgccgtcgcgcacgactccggcgcctacccggctcccggcagggcctaccaggactaccgcctccagggctactcctcgtggctgcgggggtacgtcgccgacgacccccgcaggtgggagggggtccgggcctgcgtcgccgcctccggcacctgcaggaagctcgccatggatagatcattcatcgtgccggagcagttctacatgtcgcacctctcgcccatcgagtccgggtgctgcaagccaccgacggtgtgcgggtacgcgtacgcgagcccgacggcgtggacgggcccggcggcggacgcggactgcgcggcgtggagcaacgaccccggccagctctgctacgcctgcgcctcctgcaaggccggcgtgctgggcggcctgcgcgagcagtggcgcagggccaccgtcccgctgctcgtcgccaccgtcgcgctcatcttcgtctacgtcgtcggctgcagcgcgttccgcaacgcgcagaccgaagacctcttccgccgctacaaatggggaaattattaacgatctctcccactgatctactgcgtacatacgtacacgccgatttggatcgggtgagttgcgctttctgtttccggccgtcttttttttaatattttgcgaaatcgatctgtttctggtgctcttggcacagtggttagtgctgtagaatgtggacaacagctagaatgctagatgttaattctataggagcttacttatgtatctattctatctctatctgcgatatctgaagcttcggt

SEQ ID NO: 40906 - DNA, 318 bp, Zea mays
  unsure (1)..(318): unsure at all n locations
  Clone ID: MRT4577_137306C.1
cggccgccctttnttttttttttttttttttttttttttttttttttttttttttttttttttttagcacaaaataaaaagatcggttccgatggcctcaaaccacaaaacaatttcttttggtccagggcaatgcctttggggacactgtcactgaaagcttcacatgggtcacgggtttcccagaatttatttacaaaaaaggggcgtttgtttacccacaacctttttgcccaaatgaaccatttatacccctttgattccaatacccgacagactccaaggcactggatctagacaaattttgtnttaccaccc

SEQ ID NO: 40907 - DNA, 1528 bp, Zea mays
  Clone ID: MRT4577_137307C.1
cctcgaattcggcagggggcacactcactctttacacgaccacgctagcacgccctctccgtctctccccttccggttccggttccagtggctgcatccgctgcgccaccccccgtctgctcacccaagtcccaatcccgcagcccggcggcatggcggtgagcaacaacatcacggcatgcatcaacttcctggtgcttctctgcaccatccccatcgccgcgacggggctgtggctggcctcgaggcacggcggcgaggactgcgccaggctggcccgctggcccatcgccgtgctgggcgcgctcctcctgctggtcgcgctggcgggtttcgcgggcgcctactggaaccgcaggggcctgctcgcctgctacctcttcgcgatggccgccctcatcacgctcctcctcgccctcctcgtcttcgccttcgccgtcgcgcacgactccggcgcctacccggctcccggcagggcctaccaggactaccgcctccagggctactcctcgtggctgcgggggtacgtcgccgacgacccccgcaggtgggagggggtccgggcctgcgtcgccgcctccggcacctgcaggaagctcgccatggatagatcattcatcgtgccggagcagttctacatgtcgcacctctcgcccatcgagtccgggtgctgcaagccaccgacggtgtgcgggtacgcgtacgcgaacccgacggcgtggacgggcccggcggcgagcccggcggcggacgcggactgcgcggcgtggagcaacgaccccggccagctctgctacgcctgcgcctcctgcaaggccggcgtgctgggcggcctgcgcgagcagtggcgcagggccaccgtcccgctgctcgtcgccaccgtcgcgctcatcttcgtctacgtcgtcggctgcagcgccttccgcaacgcgcagaccgaggacctcttccgccgctacaaatggggaaattattaacgatctctcccactgatctacatctactacgtacgtacacgccgatttggatcgggccacaggattttcacatgcgcctcggagagaccgagaatggactctgcgttaccgtacattttcagcaatccggttcaccaagatttgggcccaatggcccatcacggatatcccatccgtggcgtgtgctcgccaaattggagcacgccgtccgcgctcttcgcgtccttttgtttgggatggttgccagttatattaaggtcgctcagcaattatgtgttacatgcaaaataaacataaaaataaactgtaacactgggtgtatttaaatcaaaaaaaaaaaataaggtaaaaacaaaaaaaaaatgagttgccctttctgtttccgcccctcttttttttaatattttgcgaaatcgatctgtttttggtgctcttggcccagtggttagtgctgtagaatgtggcccccagctaaaatgctagatgttaattctataggagcttacttagggatctattctatctccatctgcgaaatctgaagcttcggt

SEQ ID NO: 40908 - DNA, 192 bp, Zea mays
  Clone ID: MRT4577_137308C.1
aattcctgtgacgcacgagcatactaccccggcggccgcccataaaaaaaggggggatttttaaagatttttgggggtcccccccccccctgtcccggaggaaacaacccgaatttctttactgcgatttgcagacacgtctgggtcatatttaatcttaaaagaactggatttacacttttacaacaaaag

SEQ ID NO: 40909 - DNA, 229 bp, Zea mays
  Clone ID: MRT4577_137309C.1
gtcttggctttgtcgaacagtaatgttttttaggcagaattgtaagagcgtggtgtaggcacggtatttaatacgcacacgccattacttaataagtgttgcaaaatcatcacaggggctacccaagtgactttgattactgtaatactgcctaatttttaaaaaacactaagttctttcaaagctttacaacaacgcaggccaatttgttggcccttaaacccttctg

SEQ ID NO: 40910 - DNA, 440 bp, Zea mays
  Clone ID: MRT4577_13730C.1
ggacgagtacattacccacaacatgaacctggctgacatcaacgacgcgttccacctgctccacgaaggtggctgcctgcgctgcgtgctggcaatgcaaatttgaaattcctaagcaaagcagtttgcatatatgtcgtcatagacttcttttggaactagaactcctttgccctcgtttgtcctgttggaactagagctccgtttgcctcgtttgctgtgtgctaggtatgtggtacttattgatctgtatcacggttgtaaacaagtgctgtttctaaaataagtttatgcgtgtcaaatttccttgcatggataattgaacggtatcaagcatccgtcattttatctagcttagcccaaatgagacatgtaaaacacggttgaccaaagggtggagtataatgatacaggtacaatgtcacaagattccttttggt

SEQ ID NO: 40911 - DNA, 1490 bp, Zea mays
  Clone ID: MRT4577_137310C.1
ctcacttgctttcctggccgccgtctcctccgcggctcttaacgccgcatccactcgccggttcttaacgccgcccgccgcctcctccgcggctctgccctcccgccgctgccgccgcctacccaggaatcaggatgcgggtgaagaagcggtcgaagcaccgcaaagcggtcaagttctacgccacatgcttcggcttccgcgagccctataaagtcctcatcgacggcaccttcgtccaccacctcctcacccagcgcctcctcccggccgacgaggctctccgagacctcctctcggcctccaggacgccagccctcttcacctccaagtgcatcctcgcagagctcagacgtctcggcaagtcacatgccgaatcatttgacgccgcgcagcttctcaccacaaccaagtgtgagcatgacaaggtggtcggtgcagttaactgtgtccagtcactgataggtgataaaaatcctgaacatttcttcgttgccacccaggatcctggtctccgagaaaacttacgagagattcctggggttcctgtgatatatggtctgaagaactctttatgcatagaacggccctctatgcagcaacgcaagtttgctcaattggatgaggagaagcgtctcaatatggatatctctgaatacaagaagttactgaaggctgcatcagaaggaaagacaattgccagtgaaaatggaagtggcgaagaacaacatgagatgcctattagttctcttgtaaaaaatgcacttcatgttactgataaaaccaagtttaagaggaacaaagcaaaggttatatttatagccattggtatctcttgttatgcgattgactatacaatgtttattatctagtaagcataagttcactacacttatctatttcctgtattatttaacgtttacaagtatcattatgcagggtccaaacccactctcctgtaagaagaagaaaccaaagctccccacggctattcaaaagcaggcaggtacggctgatggcgaggcaaagaggaagagggttcggaagcggaagagaggccaaaaagataacaagcaattggaggctgcgaactagaaggatgggcttgcgtaggaagtttcagtgctcttgctagacatccatcctgactccggagcaagtcaactatggaggagttcctttctcccacacaggattcagtatgccatgccataccatgctcattatatgttgaagatgcttcttgcaacgtaacacttgattggttatggtgatcgtgaatccttctctagaggatgttattggatgtttcttttgtcgcaagatgcaactttaaatgttttttgaagcaaaagtttgatgccagtagctctaccaggttcttgcttgccctgctacatgtgtgatcccattcttcaattgtaagatgtgtttgttgagaatatgtataatagataatacttctattattttagattttagacagtagt

SEQ ID NO: 40912 - DNA, 964 bp, Zea mays
  unsure (1)..(964): unsure at all n locations
  Clone ID: MRT4577_137311C.1
gatgaacatagtgtaggcgtgcacgattgcatggcgcacggttctgccaactccggacgcgcctgtcgcgccgcgaatcgcggccgccgcatcctcagatcaataccgcggccgtgggcttctctccccccgcatggtggcccgtcgtccccttccaaccctcctccctcgcctgccggtgtccctttcttcccccgtgtggcggctcgcacccgcacgagatctagactaccttcccaccctcctcccctgcccgctcgcctgtcggcgtccctttcttctccccgtgcggcggcccgcgcccgcacgagatctagactagacgccgagggcacgacgctttgcctgcctcgcctccgtcccctcgtcgcctccacgactccacctctacctcctcggtgagagagagagagagcgggggagagagggcactagaccaccagcaagcatgaggcagaggaggagcgtggcggcgccgctacactctaatccgctggctaccccatcaggagagagagagaggggggagagaaggcaccagacaccgccagtaagcatgaggcagagaaggcaccagacatcgcgctatcctccgcatccgccgcccgtcggcttcgtccgctgcgagaattctcgtgtcgcccatcggcgacaactgtccgggtgctgcaagccaccgacggtgtgcgggtacgcgtacgcgagcccgacggcgtggacgagcccggcggcggacgcggactgcgtggcgtggagcaacgaccccgacctgctctgctacgcctgcgcctcatgcaagggcggcgtgctgggcggcttgcacgagcagtggcgcagggccaccatcgcgctcatcttcgtctacgtcgtcggctgcagcgcngtccgtaacgcgcagaccgaggacctcttccgccgctacaaatgggggaaattattacgatctcttccactgatctactgc

SEQ ID NO: 40913 - DNA, 287 bp, Zea mays
  Clone ID: MRT4577_137312C.1
agcagatcagccgtatcgaactctacctggctgtctctcgtccctggcggtggcggcaggaattgggcttctactccgatgactgtggaggacgtgaacccacacgagtttctcaaggcctactccgggcatctcgatacgcttcggcaagattgagctgctgagtaggatgacattgtgaagactgctaggttcaaggagctcctccttatgaccctgactggtactacatcagggctgcatctgtagcaaggaagatctacttgagacaaggcattggtgttggt

SEQ ID NO: 40914 - DNA, 1600 bp, Zea mays
  Clone ID: MRT4577_137313C.1
ataaaacaacttatataatattttattcatatttgtactaatgtgcttgataacataagaaaagatcaacattaaattttatacatatctattttaaaatattaaatttgttctaacagttcgaattaccactttcatccctatctaatggtaggtactttaaacatttgtctcgaggtccaaataaactaaggttactactgtctaaaatctaaaataatagaagtattatctattatacatattctcaacaaacacatcttacaattgaagaatgggatcacacatgtagcagggcaagcaagaacctggtagagctactggcatcaaacttttgcttcaaaaaacatttaaagttgcatcttgcgacaaaagaaacatccaataacatcctctagagaaggattcacgatcaccataaccaatcaagtgttacgttgcaagaagcatcttcaacatataatgagcatggtatggcatggcatactgaatcctgtgtgggagaaaggaactcctccatagttgacttgctccggagtcaggatggatgtctagcaagagcactgaaacttcctacgcaagcccatccttctagttcgcagcctccaattgcttgttatctttttggcctctcttccgcttccgaaccctcttcctctttgcctcgccatcagccgtacctgcctgcttttgaatagccgtggggagctttggtttcttcttcttacaggagagtgggtttggaccctttgctttgttcctcttaaacttggttttatcagtaacatgaagtgcattttttacaagagaactaataggcatctcatgttgttcttcgccacttccattttcactggcaattgtctttccttctgatgcagccttcagtaacttcttgtattcagagatatccatattgagacgcttctcctcatccaattgagcaaacttgcgttgctgcatagagggccgttctatgcataaagagttcttcagaccatatatcacaggaaccccaggaatctctcgtaagttttctcggagaccaggatcctgggtggcaacgaagaaatgttcaggatttttatcacctatcagtgactggacacagttaactgcaccgaccaccttgtcatgctcacacttggttgtggtgagaagctgcgcggcgtcaaatgattcggcatgtgacttgccgagacgtctgagctctgcgaggatgcacttggaggtgaagagggctggcgtcctggaggccgagaggaggtctcggagagcctcgtcggccgggaggaggcgctgggtgaggaggtggtggacgaaggtgccgtcgatgaggactttatagggctcgcggaagccgaagcatgtggcgtagaacttgaccgctttgcggtgcttcgaccgcttcttcacccgcatcctgattcctgggtaggcggcggcagcggcgggagggaagagccgcggaggaggcggcgggcggcgttaagaaccggcgagtggatgcggcgttaagagccgcggaggagaaggcggccaggaaagcaagtgagccgagctagggcggggtcccggcccggccggcctcgaggtaccc

SEQ ID NO: 40915 - DNA, 214 bp, Zea mays
  Clone ID: MRT4577_137314C.1
gcgttctattaactattttagccccttaacgctaaggaggcgagcaaaggcgtacgagtgattggtgctcaccgctgattgaacgataacctaggtgcatggaccgaagcacactaacctaaaactatagctatgtttgcaaggaagggtggggcaacccgttgggaaagctttgtgcagcttgcgtgcatgcatctaagttgggacatgctaa

SEQ ID NO: 40916 - DNA, 439 bp, Zea mays
  Clone ID: MRT4577_137315C.1
gggcaaagggggtcccaaccggatccccgtttcttggtagtttgcatcaattaccgcgggggacatcaaaaacgaatacccttccactgaaaaggaaaaaaaaacggggaaaaaaaaaaaaacaaaattcgttgctcgacgaaaccttaaactacgtgtatcgaaaaaaaaaatggggctgaaatgctcttttaaaccaaagggaaaaccagcctgccacccttatatggacattttattgcccacaaactgaaaaactggaaccgtactccaaaaaaacagccggaaaaaacttttccccttaaaaaaaaggctttgattgctcacccactttttaaaaaaaaactttcccagcggaagctggccattggagggcacccaaacctgggggcccacaaaaaagctggccccgcccttaaaaaacccctgaggaagccct

SEQ ID NO: 40917 - DNA, 335 bp, Zea mays
  unsure (1)..(335): unsure at all n locations
  Clone ID: MRT4577_137316C.1
tgccgtnagcnggggtcgccggtggtgggccccgcggtnngctgctacctgnngcagcggcngnngcgacgacccctcggnaggcncccgccatcaccctgcgnnggcaggtgaagctcccgcccatcgcgccccctgccctcnnncctacgcccgcgnngcacggggtcccggccccctccgcgntcctnngctgtagcggcgtgcagggaaccctcaagaagcgnnccgccagcaccccgccgccgacaggggcgcgccnngcctgcaacnntgcctcaagaaaaccgccgccagnngggcgtnnncagcggcccctcaacgcnnncggcaac

SEQ ID NO: 40918 - DNA, 682 bp, Zea mays
  Clone ID: MRT4577_137317C.1
actcctaagggcgattgggatcatcaaggccggccgggcggagtgtttctcgatcgtctgacagcgctactactactgcaaaatacctccccaacaaactggtgctggacttcgtgactatcgcccatatccgcgttatcacgctgctgaacaccaagttcttccacatgaacatcttcggaacgaacaacgtgacgatcgacaaggcgacgataatggcccccggagaaactcccaacacggacggtatacccctcgtagattctagtaacctgactatcagcggtaccaccatcgtccttggagacgagtgcgtcttcatccagcccgaataaaacagcatccgcgtgcatcgagtaaatggaggtccacgtcaaggaatcagcgtcagcagcctctgtcggaatactgacgagatagtacatgtatgatcctaatcagaacgggtgcacgctcgtcggcaccaccgacgccctgcgcttcaagtcttactaggactccaagtcgtcactcgagggctccaagttcctgtaccagaacggcaccatggacaacgaatcctaccccatcatcatataccagaagtattgacccaacaacatttgcgtcaagtcccgtgcctcccaagtgaccgacatcgacgacatcatttagaacatcctcggtacctccaacacggcgg

SEQ ID NO: 40919 - DNA, 1130 bp, Zea mays
  Clone ID: MRT4577_137318C.1
ccggcaccgacccggccacgggcgtcgtgtccaaggacgtcgtcgtccacccggccaccggcctctgggcgcgcctcttcctccccgccggcagccacgggaagaagctccccgtcgtcgtctactaccatggcggcgcctacgtgatcggctcggcggccgacccgatgacgcacggctacctcaacgcgctcgtcgccaaggccggcgtcctcgcggtcgcgctcgagtaccgcctcgcgccggagcacccgctcccggccgcctacgaggacttcatgggagggacttcaagtgggtggccacccacgcctccgcctccgccgccgcgggaggaggaccggccgccgagccgtggctaaccgagcacggcgacttctcccgcgtgttcctggccggggccagcgcgggggccaccatcgctcacttcgtagcagtccgtgccggtgagcagcacaagagcggcggcctcgggatgcggatcagggggctgctgatagtgcacccctacttcagcggcgcggcggacatcggcgacgaggggacgacggggaaggcgcgcaaggcgcgggccgacgcgttctggcggttcctgtgccctggcacccccgggctcgacgaccctctctccaacccgttctcggaggccgccggcgggagcgcggcgcgcgtcgccgccgagcgcgtgctcgtctgcgtcgccgagaaggacgacctcagggacaggggcgtctggtactacgagagcctcaaggccagcggctaccctggcgaggtggagctgctcgagtccatgggcgagggccacgtcttctactgcatgaacccgcgctgcgacagggcgcgggagatggaggagcgcgtcctcggcttcctgcgcaagtgagcgagcgacggagcgcgcgccttgctacgcgattgagatggaataatttcaccgtttccagatgtggaggcgtttgagcatgaggccatgagggtcttatttgtttgcttaagatcaattgattgaagtttcgaaatctatctcaccgcacttgtcatgtgtctaaatttaaaagaaatgaaaacgaacccataccgtcaaaaaaaaaaaaaaaaaaaaaaaaaaaaaaaaaaaaaaaaaaaaa

SEQ ID NO: 40920 - DNA, 172 bp, Zea mays
  Clone ID: MRT4577_137319C.1
acactgaactactgataccttagctaagacactagctacgtaaatctagcaccttcacagcatcagatctacattcacggcatagtataccatccctgcagcgtcacattcacatctacagtatgagcatgagggcagggatgcaaggctttcttgagaacaactggacaga

SEQ ID NO: 40921 - DNA, 526 bp, Zea mays
  unsure (1)..(526): unsure at all n locations
  Clone ID: MRT4577_13731C.1
cacatatcggggagcaagccctctcggcggcggtcggcgacgtggtcgcgcggaccatgtccgcggtggcgggcaggtacgacgcgcacgcgagcgtggacggccagctggagcgcctcgccacgctgctcgtcatggtgcacagcgccgtggacgaggccgagcgcgtgcacgtcgccaactggtggctccgccgctggctgtggaggctccgctacgccgcgctggacggcgacgaggtgctgcggtccatgaggcagcagcgagcggccgacgaggcggcggaggcgaccgcgacgacccatagtgcgggcggcaggctctggaacgccgcgacgcgcgtcgtcgtccggtccgcgaagagcctgctcgtgtcgtccaggagcggaggcgacgtggatcggttgaggcgcaccgtggagaggttggagcaggcttgcgccaggctaggcgacttcctcaagctgctcgagctggagatcatgaggtcgcaggcgccgcccccngcggcggcggcggcggcggc

SEQ ID NO: 40922 - DNA, 380 bp, Zea mays
  Clone ID: MRT4577_137320C.1
acagcttacaagcaaatttacacgcgataaaaagctcgatcgaggaagaaaataaaggcagagggagcaacatacaaccagccccgtgcataccgatcgcaccagcaggaacgagagaaccagctcacctcctcttgtttctagctcccgaagcagcagcgaaatgtagaagaggatgcggaagaggaacccccaggcgacggtgatccagaggcagtcccacttggtgaggtccgtcacggcctgctagcgccaggaagtccggccccgtcgtgatgcacgtggccgtgccgatgtccacgcccagcgactggctcatggcgcgcasacccagcaccttgagcaccgccggcagcaccgccagcggcgtgttgtcgaac

SEQ ID NO: 40923 - DNA, 276 bp, Zea mays
  Clone ID: MRT4577_137321C.1
ctcagcttgaccctgcaccacacatctcggctaaagtgaacaactccagcctgataggtttaggctacactcagcctctaaagccaggtattaaactgacactgtcagctcttctggatggcaagaccgtcaatgctggtggccacaagcttcgcacaggactggactttcaagcataaatgaatactgtacaattgtgtaattttaaactattttgcagcatagctaccttcagactttagtgtatctttcaatgttgtatgtctgggatgcaag

SEQ ID NO: 40924 - DNA, 226 bp, Zea mays
  Clone ID: MRT4577_137322C.1
acggccggcatagtacacgccaccgcagtcctcctcctcattttttaccaatactatcctacccccgccgccgccgcatacatgccaagcaagatcgacccgacgcagtcgagggattccttcgtccgactgacggagggtgaggtccgccggccttcgtgcctgccgacaaagatccgctcgctcgctctctccccagaataagatcagcgcattacattgccaa

SEQ ID NO: 40925 - DNA, 403 bp, Zea mays
  unsure (1)..(403): unsure at all n locations
  Clone ID: MRT4577_137323C.1
agccagccgcttcgcgatcggggacgcggagagggaaangcgagtcctcctccgtccacggcagcttccctcctctcctctccggccccgcttacctaggccggcccctcctacgcccccccgctcgccgcggcggacgataancacctctccggccgcgtcccccgccgcgtcacctccgccggctattgcctccgccgccaagggctccgcggccacccagacgttggtggtccacgacaggctcccctcacacctggacccgttcctcccacaggcgctcgacaaccctccccaccgccccctggctcctaccatccaactcgatatacggggggggggggggggcctcccctgccggagctccactccaaacactttcccacttcccacccaccctccc

SEQ ID NO: 40926 - DNA, 573 bp, Zea mays
  Clone ID: MRT4577_137324C.1
aattcggcacgaggcacacaatcacacgcacacaccagaggtacgcacacacccggtctctcagagagagagagagagagagctagccatgtcggtggggagttgttgcattcgtgctatcccgggcgcggcaccgccggctcgggtcgggctgctcgggagcgccttcctacaggtgtccgccgcgcggacgcggacgcggacgcgggccgggcggtgccgtgccgcgcagcacgggctcgtgaggctcggcggccgcgtcgtggcccgagccggggccgcggagacgccggtggctggcactgacgaggacgctggagcggcgttctccgagacgttccccctgcgccgatgccaagctgtggaagggaaggcgtgggtgagggtggacgcagagccggactccgaaggcaagtgcaaggtcgttgttgggtgtaatgtggcggggaagtgggtactgcactggggtgtctcgtacgatgatgaacatggaagagaatgggatcagcctccttcagaaatgagaccacctgtgtcagttgcaatcaaggactatgcaattgaaacaccatt

SEQ ID NO: 40927 - DNA, 288 bp, Zea mays
  Clone ID: MRT4577_137325C.1
cataatgtacagcacagggagaaattacaccatgcattacacgtttgttaaaggggtattccatgtaaccaagcacaggcaaaactgtagattcaatgggcatgatcctgcctaaacgagccgctattattcgacactttatctatgggcagagattacaaagagacccccagattcacacaaaatctgactacctagagaaccagctcactcgccttgggaagatgggacctgccaaagccattgtgggtcaaaccgtgtgtgctcttgcctcagtgatgctcaggt

SEQ ID NO: 40928 - DNA, 113 bp, Zea mays
  Clone ID: MRT4577_137326C.1
agcgcggcattaaaacaattgcataccaaacctaagagactcaaaccgtgtggacctacatgacatttgaacgggagctacacaccggggaaaggtgccaaccatacaggcag

SEQ ID NO: 40929 - DNA, 417 bp, Zea mays
  Clone ID: MRT4577_137327C.1
cacccgaaatcgtaccttcgtcacttcttgcttccaaataaatttttggacagcgacaactcttgactaggacctgtacccgatcaacacagcattaaaccccccagtggggtacatattaatggacccaccctggaccccgtaaactacatttaaacttaatccttactaccgagcgacgcattccctttatttttttaatcaccccacacatacaaatacgtcttcaactaactcaaaggagtaaaatacacatcaaacaacctgaccgatcggttttgatttgggcatgatctgcccatggacttgggatttctggccaacacgcgttgccctaaccacgctcatccacaacagagcggattttgtgacgtcacccaggggctgtgcacatccatttgcatctccctgtggtct

SEQ ID NO: 40930 - DNA, 459 bp, Zea mays
  Clone ID: MRT4577_137328C.1
ggggccggccctttgtttttttttttttttttttttttttttttttttttttctccaagaagggaaggtctaacaaggtttcctttttaatacacaacgggagttcggggacagtacataatttttaatacacggacacacattttgataagcaggtaaacccaccccaaaggaaggttggctgctacctggattaattttttaggaaaagaggcaaacacacgtaaaggttggctttgcagaacccataaatcagctactagggtcataatcctccgaaaggtttttggttcccgaatgcaatgttgtccccgtacccaattcggagcataccgaagtaccttttgtagaacccaacccggtccttgggggttttggccccgtggggggagcggtcctcgccgaactctaaaccaccgttgatgatgttcggggtcgggccgtatccggggagcctcc

SEQ ID NO: 40931 - DNA, 1592 bp, Zea mays
  Clone ID: MRT4577_137329C.1
gtgtagaagacactgaaagcgaactaggtggctatgacctctcacctgtcaaaagaaaggacgggcaaagagccggagccgcgaccgacgactcatcagacatggcgaagccggcggcggcgaggaagccctctgcggcgtcgaccgtcgcactgacactggttctggccctggcttcggctgtcctcctcttcctcctgctccgcttctctccctcctccccgtcccccaacccgcacccgcaccgccgcctccgcctccgcccccgcgcgcatgcgcaccaccaccagatcccattcgaccctgtcgtcgcggtgcaatacatggttgtgcgccagtcccagaggatctcaccgacggtgaggtcgacgccgacgaggactacatcaatgacgctgcgcgcttcaacgtcacgcttcgcgtggaggcgctgttcccaaagatcgacgtcgaccctgccgatggcgccgtcacgggcgctgagctggccgcgtggaacctcgcaaatgcgcggcgggaggtgctacaccgcaccgcccgggagctcgagctgcacgaccgcgatcacgacggccgggtcgcctacggcgaatacgagcggcccagctgggcctggcgtttcgacgatcataactcaaccgatgatgtcttttacaatgggaaggaggagcattttagtgctgcagttacaggacgagctccgttagttcccaattcaacttttaataactttatacattcagctgttactaccaacccaaagctaatacattggttgtgcaaagaagaagtcagggaaagagataaagacaatgatgggaagctcaatttccaagagttcttcaacggattattttactcaattcgacactatgatgatgaaggcttaacagatgacaccggtggctctgatgcaccagctaaaaagtcattttcacaccttgatctggataatgatgggctcttatcagcagatgagctaaagcctgtaattggtaatctccatccatcagaatacttctatgccaagcaacaagccgactatgtaatatctcaggctgacacgaacaaagatggacaattgagcatgaatgagatgatcgagaacccctatgtcttttacaatgctttattcacagaagatgattatggctttcatgacgagctccgttagttcccaagtcaacacaaagctttatggaatcaccactgtaggaagtcggaatactttgttatgcactgctaagaccatttccattttctgtctgaaatcatccatcatttgacggtgattccatgtaaaacaagcatgtttttagatgcacctattctagaagctgtgttcttttgtactacccttgagccttttttatagtttgttgtttttttaatcatatatgtacggtgaggatgtgagtgagttttgttctttcatcttcttgaatcttgatacgatacaaaactagcgtcttccagaatcacaatttgtaaaccatacaaacccaggaaagcattactgtaagccatgaattgacgttatctgtaatgattgtgcaaatcatgaaatctgtcaaattcatgctttagtccct

SEQ ID NO: 40932 - DNA, 278 bp, Zea mays
  Clone ID: MRT4577_13732C.1
ctgtaaactgatttgctccatcaccatgttttgtttacatatgaaccctactcaacggggtctctatacaaggtgagtgcgtatgttcaatgctgctttcatcatacttatcatctcttctatttctttcaccatcctccctcccctaattatttaaaccctcttttttgttaaaactctatctggtgttcttgccttaaccctgttttcttgagtgcacattgccatctcttcttccaacacctttgttgcattatacaattctaataagctcattt

SEQ ID NO: 40933 - DNA, 788 bp, Zea mays
  Clone ID: MRT4577_137330C.1
ctgggaacaaagtgacattggcatagcagtattcatgatgttgattgctcgtcttcctgagaggagttggaggagcaccatgccgaagctgtacacatcccctgcagcattcaccctgtggttgtggcggtattctggatcaacatagccaaatgttcctctgacttcagagcttacgtgcgacacacctaagtcgatgactctagagagtccaaaatctgacagcttgggttccatatcaaccccaagaagtatattggttggctgtcatagaaagtccttcagggtatatgtgcaggaaccaaaggccacaagcacttcaaagtgctatctgaagcctctgaatccatggaaggttaccgttgatgcacagctcatacacaagaaaacactcctcctgcccgtcacagtaacctcttaatgacacaaggccagccatttgtcagcactcctctgtataccttgcctggaaccacaagatgaaccagttgcacaccataaaggacaacatatacttgaacagttaggtttctaagtctcgtgttcttggatgaaaaatatactttctcttgatttatggtatagataccataactgtgaatcaggtagtctcctcatactcaagggatgccaacgcgacctctgcaagaaaaaaaaacatgtgcaacttcgtattgctattagtgggtaaaaaaacatctatctcagtaacttctatatgcatatggatgtgcaattaattagtgaaattaccaatatcgtttcttgatggttgggacttgctggct

SEQ ID NO: 40934 - DNA, 996 bp, Zea mays
  Clone ID: MRT4577_137331C.1
attgggtacctcgaggccggccgggagagtgactaacgtgtagaagaaaatgaaaggggactaatgaactatgacctctcacctgtcaaaagaaaggacgggcaaagagccggagccgcgaccgacgactcatcagacatggcgaagccggcggcggcgaggaagccctctgcggcgtcgaccgtcgcactgacactggttctggccctggcttcggctgtcctcctcttcctcctgctccgcttctctccctcctccccgtcccccaacccgcacccgcaccgccgcctccgcctccgcccccgcgcgcatgcgcaccaccaccagatcccattcgaccctgtcgtcgcggacatagagcgccgcctcgaagaccgcgagtgggagcgcctcgccgctgcagggctgcacgctccgggcatggaggcggcgccagtcccagaggatctcaccgacggtgaggtcgacgccgacgaggactacatcaatgacgctgcgcgcttcaacgtcacgcttcgcgtggaggcgctgttcccaaagatcgacgtcgaccctgccgatggcgccgtcacgggcgctgagctggccgcgtggaacctcgcaaatgcgcggcgggaggtgctacaccgcaccgcccgggagctcgagctgcacgaccgcgatcacgacggccgggtcgcctacggcgaatacgagcggcccagctgggcctggcgtttcgacgatcataactcaaccgatgacggagtgggatggtggaaggaggagcattttagtgctgcagatatggatggtgatggctttctaaatcttactgagtttaatgactttttacatccagctgatactaccaacccaaagctaatacattggttgtgcaaagaagaagtcagggaaagagataaagacaatgatgggaagctcaatttccaagagttcttcaacggattattttactcaattcgacactatgatgatgaaggcttaacagatgac

SEQ ID NO: 40935 - DNA, 397 bp, Zea mays
  unsure (1)..(397): unsure at all n locations
  Clone ID: MRT4577_137332C.1
gaagaaaaccttttacttctaaattctgtttattgttattttttttttttgggaagattgcttgtacacatatatatagaacttggtaagatgtactctctccgttttttttttatttgtcgcgttttagttcaaaaattaactagcgcgacaaatattccagaacggaggtagctgagataagaatggtaggtaaccaaattctcacatgtccagctaattatcgtccgtaactgtaattgacgccatttgtcagtggacccagcaaatggcattaatttcatgtattaagaacacagcnnaaaaaaaaaaaaaaaaaaaaaaaaaaaaaaaaaaaaaaaaaaaaaaaaaaaaaaaaaaaaaaaaaaaaaaaaaataaaaaaaaaaaaatataaaa

SEQ ID NO: 40936 - DNA, 404 bp, Zea mays
  Clone ID: MRT4577_137333C.1
agcagtaccaagtgccagcatactttcctacgcgaatcgattaacgggcggtactcaccctccgtgtggcctggcaaactgtcccctaggccccggccccgcccgtgcctggccagtggccatacatcccttaccttcggttcaacgcaccaatcttgtacaggagcctgccaaatgcagcacggccacacagccccatgcaagaagggcagcgcatgaacagggagcgagcatcgcacggacaatggcggcttctttcgggacgcgctccgtgcgcctgctgatgcttgtgctctgccttatcggattctgcgttgcgctgagccaccaggtgtctgcagtagactcgtgcgccagggccacagtcacggtcgtcagactcgtgcccttggactccacgttct

SEQ ID NO: 40937 - DNA, 416 bp, Zea mays
  Clone ID: MRT4577_137334C.1
ttaatggggaaaaaaatggggctcgggggccccttttttttttttttttttggattagagatgtagctaaattgttaggtgcaaggtatataacctgaaaacacatctttggactatagcagtcataggatgaaatagttatgttatggctatactcacaattcttgggaaacaaggatgtaatatcgcctgcgttgttatctgccttcttatgagactgactgtccaaggggctgtctgcgtcgccctgttctcagacaaatcccagtagggcacacgttgggaggtgaccattatacaggcctttcacatccaaggggccattgtctgatctggacaagagctgagggccttggcatgtgttgaaccctgtttgtgggaccgagcacttcctgggggacatagagtgtccacaa

SEQ ID NO: 40938 - DNA, 528 bp, Zea mays
  unsure (1)..(528): unsure at all n locations
  Clone ID: MRT4577_137335C.1
aggggggaaggatgtaacacccctggtgttacgatcactaaaactctgacatgtcatcatcaacatttgcattaacttgcttgatacacttagaatgcattcactaggatccaaaataatctaagtatgatgttgtgattagtgaagagtgaaggacctggttttgaaaatctcaatttagagcttcaaaagtggaacttgtgatttggcaataatttgccaaaaggtcaaattaccaaatttatagagttctccaacccaaacaactttcaggtatagatatttccatgttttataggaagaagtggagaaaactcaaaaattaactttttggacctaaggttggnatggctggaaacaatatcaagtagctgtctttgaatcttcataacttttgatatataggcaatttgaagatggtcacagtagcaaagctgtagagctacactaaatgtgtaattttgtttaagctacttaaccctaagttcatatggaactaggtggaaaactggtccaaagtgggaatgt

SEQ ID NO: 40939 - DNA, 333 bp, Zea mays
  Clone ID: MRT4577_137336C.1
gggacatggaacaaccgacgttcaaaaaatgcttttttgtttaccaatccacgtttaaaacgccacgcaagatttacccccgcaaaacacaatcaatttagcactacattttacaggagcaataatggccaaaacttgtccaaaaacttggtttttgggggccaaaagcccaaaatactttgagcttggggttttcccaaaacaacaacacaagacttgggacgtttgaattcaaacccctagtacacgggttttaacttttggccatgggattattttcactggctggtttgacctttgaattcttggttccagcttaaaaaacaccttttt

SEQ ID NO: 40940 - DNA, 249 bp, Zea mays
  unsure (1)..(249): unsure at all n locations
  Clone ID: MRT4577_137337C.1
gggacgtgcacgactggcnnctcggcgccggcaccaggccgacgctcttcatcttccgccccatcgtgctgtccagcgcgtcggcgccggcggggatgctcgacggcggcgcggtggtgcccgccgccaccacgggcttctgcttgtgcctctacgcgtggaagctcgactttttttgctggctngctngcttgctgcggggggcggctttgctgttgtttgctggctctcccctgcctccggcggggg

SEQ ID NO: 40941 - DNA, 151 bp, Zea mays
  Clone ID: MRT4577_137338C.1
gcacgagttttggttccttgtaccagtaagtaaccacagcctttcgcctgcagctaaatcacttgcttctcttgtattgatgcatttggttccattggttctctttagacgactccttatcacatttgtccacaaaaaaaaaaaaaaaaaa

SEQ ID NO: 40942 - DNA, 374 bp, Zea mays
  Clone ID: MRT4577_137339C.1
aacaattatttaatacaataaatgagcaacattgtggccatcaaaattaacaatatacaaaagttgggacaagctgcatattgtccgatgtttcagctgagtcatatgatcaattttcccctccctcctcctatgcatgcttgcatgctaggagtaaaaatgcaggaagaaacttgtgcagcattccgacgaaatttgaggctgcttcgctgcttcccatgtttattaagtcagtggattaactactacacatttacaagtgtatctatgtagagctctagaggagagcaaattagccccatcaaaattttactaatcaagcactgagaagactgggacacccttggcactgaaagtgtcgcatttcacaagca

SEQ ID NO: 40943 - DNA, 370 bp, Zea mays
  Clone ID: MRT4577_13733C.1
ttagttctagatcgcgagcgggcggcctttttttttttttttttttttttaaaagggtaaaacgtttaatttggaacaatacttttttcttttcatttcaaatggtcattcaaggcattggttacactgacactggcacccatggggatgcgtgacacattattacccaattattggcgcttaatgacttaacttgcttgcttgccagcgggttttctacagcacattgtttctttaatgggggacgacccccgcccctacttgtgggcttaaagtcagtttttgcgggcccaactttgccagaaagttaagcaggtggagccgcaacaccggtaccaagcgatttttggtttgggccttcaatccattc

SEQ ID NO: 40944 - DNA, 464 bp, Zea mays
  Clone ID: MRT4577_137340C.1
ataggtgggttttcttcgttttttcccttttttgtttttttttttggcccccatccaacatgtttttcccctttttttggccaacaaaagacgtaaataaaacagcccccctttttgcccggttccctgacccccggttttttaatccccttaaacataaagcatccatgggggggtgccttgaaacatgctttatttgaacaaaacctcacgggggagcgtcttcccatgcatttaaaagttggggttttccggaagggcctcacccaccaggggtaaatttgttgttgcataaaccatccttattttttcgggaccaacctggggtggggcccccaatttttttggttgtttcccccgggtaacaaaagggggcccaaagaataacaccttggggggtggggggggggagccattcggaacggttccccccggggagggggcggccatggcccccgggggaa

SEQ ID NO: 40945 - DNA, 1762 bp, Zea mays
  Clone ID: MRT4577_137341C.1
cattgggtacctcgaggccggccggagagcagagctgcctccagacgagacgaggaggacgcggcgccgctcgggcttggcagcaaccagcgtcgagcgcagtgcccttctgtctcctatctccccgctgcccagccgggtctcactttccagtctccgagtctcgctcgcaccccgtcccctgcagcctgtgctctgggttggagggaggtgagctgcgagggagcgcggagggggcgaggagatggaggcagattcggcgaggaagagacttgcattgctggccctgcttctcctggcggcgcccgtccgcccggcctcggcggctccggtggaggatggcctgctcagcaatggtgactttgagacagcaccaagtggtggttttgtaaaatctgcgtctgttgctgagggtgcatcgtcaatccctggttggacgatcaacggcacggttgaactcatttcagcaggccaacaccagggtggcatgatcctgattgttccacagggggaccatgcagtaaggctagggaatgatgctagcgttgggcaggtggtggacgttgagaagggttcggagtatgctatcacattcagtgctgcccggacatgtgcacaactggaggcactgaatgtttccgtgctaggtggcgtgtctcagacagtagacttgcagacgttgtacaacatagaaggctgggacgcgtacgcgttggcttttcaggcgacggaagagcaggcacatcttcaattcatgaaccctggcatggaggatgatccaacttgtggtcctatcctagacaacgttgccgtcaagaagctcttcaccccagacaaaccaaaggataacgtggtgctgaatggagactttgaggagggtccatggatgttcccgaacacgagcttcggtgtgctgctcccaactaaccttgacgagcaaacgtctgccatacctggttggatgatcgagtcaaaccgcgccgtccgctacatagactctgatgagtacaaggttccccagggaaagcgagccattgagcttctgtcaggcaaggagggtatcatctcccagatggttgagaccacccctcagaaggtttacagcctgacgttcacactgggcacagcgggggactcgtgccaaccaccaatggccgtcatggcattcgcgggggatcaggcccagaacttccactactccccaatgggcaacgccaccagccaggctgcgaatgtgacgttcactgcacgcgctgagagaacacgtgtggcgttctatagcgtgtactacaacacgaggagtgacgaccacagctcgctgtgtggcccggtgattgacgatgtccgggtatgggcattgaacgccgcggctgggttgaaggcaagtattggactggttcttggcattgttggtgtcgttggcatggtgctgttctgaaatctgaatctctcggtggcagtggtcttgagaagtatggatgtataatttcttctgttagctggagcctggaggcttactagttttggtagtaagcttgaagtttgttgagtgatatgagcttaggttaaaaagctacgagaacctacatggtattgcttgtgttactttattggtgatttccgaagtaacatgcagttgtatggtattgtgtggcttgtttgccctagcttgtaatatgagatgtcagaattattcgaagatcatctcttcatatcaatatattagtaggatgcccgtgagttgcgacggcataaattattc

SEQ ID NO: 40946 - DNA, 702 bp, Zea mays
  Clone ID: MRT4577_137342C.1
ctcttttgcgaactccgcttcgtctcgcgtcgtccagccgatgccaaatctgctctacagccaaaaaagagagaaagatggctcgtagcagaaacactagctcgcaagtccccaacgaggacattctccaagaatgcaactagtatgcaaagatgtgcgtaaacctgcccccaccactggagaagtgaacgaatctcacgcgctaccgaacctggaaatgatgtcctcacgaacatctgctggtcctctacgacacatgagctgatgatcaagactctggccttacataaactcgagaggtgaaatgaactttactcttgaactgatttaacgctgccagagatttcgaaaaggttggcccccaccattgtgatgactgagaacctgcggcgctggaagagaacccctgactgtgtgccatccatggtacacaggcttacaacataccaggacacattgagtatgcttcgcgaggtgcgctcgcaagagcaactatgcgcgactctacacatcaggaccttaacattgatacccggggacattgtgactacatgcgccattagtcggacatataagcactctgtagatttgtggaacgccagagacgctactgatactgttgctgccaatgttgatgtccgtcttgataggatgaactacaaacacctcctaggccgtcacaataatggatatgagggatat

SEQ ID NO: 40947 - DNA, 789 bp, Zea mays
  Clone ID: MRT4577_137343C.1
ctttttcccagaaagaactaacgatagctagctctcttttagcattctgccatggctcacgtacatgtagacgagatgctccacgaagcagcagcagccgctccacgatctctcttgattgcgactgcggtgctcttctcccttgtggttctgccgctcctactccgcattattgccaagcagggagcggcaagcgatgccaagctgctgagcctgctcccatctcccccgacgaggctccccatcatcgggcacctgcacctaatgggcgatcttccctacgtctccctcgctggcctggccgccaagtacggcccggaactcatgctggtacacctcggtgccgtgcccaccgccgtcgtgtcctcgccgcgcactgctgaggccgtcctgcgcacccacgaccacatcttcgcatcgcggccgcggtcgatggtcttcgacatcatcatgtacgggcagacggactcgtgcttctcgccctacggcgagcacttccggaaggccaggaagctcgtgacggtgcacatgctcaacgccaggaagatacggtcccagcgcccggcccgggaagaggaggtccggcaagtgattggaaagatcgccaaggccgcagccgcgcgcgaggccgtggacatgagtgagctcctgcactcgtacgtcaacgacctcgtttgccgtgctgtgtcgggcaagttctcccaggaggaggggcggaacaagctgttccgagagctcaccgacatcaacgcggcggctcctgggagggttcaacatcctcgactactt

SEQ ID NO: 40948 - DNA, 1083 bp, Zea mays
  unsure (1)..(1083): unsure at all n locations
  Clone ID: MRT4577_137344C.1
ctgaatgtttctgtgctaggtggcatatcccagacagtagacttgcagacattgtacaacatagaaggctgggacgcgtatgcactggcttttcaggcgacggaagagcaggcacatcttcaattcatgaaccctggcatggaggatgatccaacttgtggtcctatcctagacaacgttgccgtcaagaagctcttcactccggacaaaccgaaggataacgtggtgctgaatggagactttgaggagggtccatggatgttcccgaacacgagctttggcgtgctgctcccaactaaccttgacgagcagacatctgccatacctggttggatgatcgagtcaaaccgcgctgtccgctacattgactctgatgagtacaaggttccccaggggaagcgtgccattgagcttctgtcaggcaaggagggtatcatctcccagatggttgagacgacccctcagaaggtttacagcctgacgttcacactgngcacggcaggggactcgtgccaaccaccaatggccatcatggcgttcgccggggatcaggcccagaacttccactactccccaataggcaacgccaccagccaggctgcgaatgtgacgttcactgcacgtgctgagagaacacgtgtggcattctacagcgtgtactacaacacgaggagtgacgaccacagctctctgtgtgggccggtgatcgacgatgtccgggtatggggcttgaacgcagcggctgggttgaaggcaagtattggactcgttcttggcattgttggtctcgctggcatggtgctcttctgaaatctgaatgcctcagtgcctgtggtcttgggaagtatggatgtataactattctgttagttggaggtggctgctagttttggtagtaagcttgaagtttgctgagtggtatgagcttaggctaaaaagctaccagaacctacatgttattgcttgtgttacttcatttgtgatttccgaagtaacttgcaattatatgggattgtatggtttgtttgccctagctatatgagatgtcagaattgttctaagttcatctcttcaatatattag

SEQ ID NO: 40949 - DNA, 349 bp, Zea mays
  Clone ID: MRT4577_137345C.1
ggaagttctgtgggtagaggactatagactgcatatcgagggtctggcatccttgggggggggttggttgattacgaggaagagagatggtcctcctcaacaagctgtggtacgacaccttcacattccctctgcccggacacctgtctcggtcgtcttcgcaagctgcctgtgcgtcccgccgtcgtcaagatcagtgatcctggcttgtacgctgtatcgtttgtgccgccctcacctggtttggttagcgaggatactcctgttatagttacgcgcattatcatgattaagctcctctcgtggtaccctttattggcttatgttcgcggaatgacattggctttct

SEQ ID NO: 40950 - DNA, 1783 bp, Zea mays
  Clone ID: MRT4577_137346C.1
ccggccaagagcagagctgcctccatatcatactccaacccaccagacgagacgaggaggacgcggcgccgctcgggcttggcagcaaccagcgtcgagcgcagtgcccttctgtctcctatctccccggagtccccgctgcccagccgggtctcactttccagtctccgagactctgagtctcgctcgcaccccgtcccccgcagcctgtgctctgggttggagggaggtgagctgcgagggagcgcggagggggcgaggagatggaggcagattcggcgaggaagagacttgcattgctggccctgcttctcctggcggcgcccgtccgcccggcctcggcggctccggtggaggatggcctgctcagcaatggtgactttgagacagcaccaagtggtggttttgtaaaatctgcgtctgttgctgagggtgcatcgtcaatccctggttggacgatcaacggcacggttgaactcatttcagcaggccaacaccagggtggcatgatcctgattgttccacagggggaccatgcagtaaggctagggaatgatgctagcgttgggcaggtggtggacgttgagaagggttcggagtatgctatcacattcagtgctgcccggacatgtgcacaactggaggcactgaatgtttccgtgctaggtggcgtgtctcagacagtagacttgcagacgttgtacaacatagaaggctgggatgcgtacgcgttggcttttcaggcgacggaagagcaggcacatcttcaattcatgaaccctggcatggaggatgatccaacttgtggtcctatcctagacaacgttgccgtcaagaagctcttcaccccagacaaaccaaaggataacgtggtgctgaatggagactttgaggagggtccatggatgttccccaacacgagcttcggcgtgctgctcccaactaaccttgacgagcaaacgtctgccatacctggttggatgatcgagtcaaaccgcgccgtccgctacatagactctgatgagtacaaggttccccagggaaagcgtgccattgagcttctgtcaggcaaggagggtatcatctcccagatggttgagaccacccctcagaaggtttacagcctgacgttcacactgggcacggcgggggactcgtgccaaccaccaatggccgtcatggcattcgcgggggatcaggcccagaacttccactactccccaatgggcaacgccaccagccaggctgcgaatgtgacgttcactgcacgcgctgagagaacacgtgtggcgttctatagcgtgtattacaacacgaggagtgacgaccacagctcgctgtgtggcccggtgattgacgatgtccgggtatgggcattgaacgccgcggctgggttgaaggcaagtattgggctggttcttggcattgttggtgtcgttggcatggtgttgttctgaaatctgaatctctcggtgccagtggtcttgggaagtatggatgtataacttcttctgttagttggaggcttactagttttggtagtaagcttgaagtttgttgagtgatatgagcttaggttaaaaagctacgagaacctacatggtattgcttgtgttacttcattggtgacatgcagttgtatggtattgtgtggcttgtttgccctagcttgtaatatgagatgtcagaattattcgaagatcatctcttcaatatattagaaaagagtaaagtgtaaaaaaaaaaaaaaaaaactcgagactagttctctctctcctcgtgc

SEQ ID NO: 40951 - DNA, 317 bp, Zea mays
  Clone ID: MRT4577_137347C.1
ggcccggggaccccaatatgaaaagaaagggtttggaacaaaaatgggaaacaatatgaatcaactgggggaggttccccatggtgggagcaaccatccctcgggaaaaactggggggagtttctctccaaggggagcgccttatgtccctccaatccaaatgagataaaaaaaaacatgcctggcccgggtggttccaaatcaattggacaaggtgaggcccaagcccccaaaatacaaaaaaaaataccctttgaagctctcctatcctaaaaccctccccgaaccctgggcggaaccctgggcggacacctggg

SEQ ID NO: 40952 - DNA, 446 bp, Zea mays
  Clone ID: MRT4577_137348C.1
ttctcgcgtccgctcatgtgaatgcagctatgtagattggtttcaaagctttatattcctattttccatgcatgttgtcaccttgtaaaatatgtgacctgagaaaggccatattatcatgtagtaaatacatcgttcctattaatacaaatccgagtcccagtagaaactccatttcagattgtcgcaatgttgtagcatacatattgactagtcaggccattggatttttgcgtgagctccttgagtgccacatcttgaacagttccatgtactagttgcttctactttcaaaatcttaaattgtgcatccaccttgccaagcaacagagctaaagtaaatggcagagcatctcccgttagtggtagaaaaatcataacacattgcaacatacacctcgatcacttaccataattccttgatgttccaacctatttgtacgtgt

SEQ ID NO: 40953 - DNA, 148 bp, Zea mays
  Clone ID: MRT4577_137349C.1
gcctctcaatcgatggattctgacctgcatcaaatgatacggacaagtcatgctttgtcagatgaacactgccagcagtttctatatcaaattctgccaggcttgaagtaaatacaatcagcaaatgtacttcaccgtgcactgaagc

SEQ ID NO: 40954 - DNA, 793 bp, Zea mays
  Clone ID: MRT4577_13734C.1
acattttcgtgttcttctagtgacaggccagggagagcttgagccagcgagccggccagcattgggcgggcgcaacgcaatggcggagctgctgcgaccggccgatttctttgacctgcgcgcggcggcgccgttcctggcggcggcggtggcgctctacttcctggccgagcagctgtcctacctccgcaagaagggccccctgccaggcccgtcgctcgtcgtgccgttcctcggcagcgctgtgcgcatgatccgcgaccccacggggttctgggacgcgcaggcggcgcgcgccaggcggtccggcgcgggcctcgccgcggacttcctcttcgggcgcttcatcgtcttcatccgcgactccgagctgtcccaccgcgtcttcgccaacgtccgccccgacgccttccacctcatcggccaccccttcggcaagaggctcttcggcgaccacaacctcatctacatgttcggcgaggaccacaaggacctgcgccgccggatcacgcccaacttcacgccgcgcgcgctctccacctacgccgccatccagcagcgcgtcatcctggctcacctccggcggtggctcgaccggagcggcggcggcggcggggcgttccccatacgggtgccctgccgcgacatgaacctggagacgtcgcagacggtgttcgtggggtcgtacctcgccgaggaggcccagggggcggttcgccaaggactaccccctcttcaacctcggcctcatgaccgtcccccttgacctgccccgggttcgcgttccggagcc

SEQ ID NO: 40955 - DNA, 1197 bp, Zea mays
  Clone ID: MRT4577_137350C.1
cacagaagagcagcaccgctccccttggcggccgccttgtaaaccctcgactggtctcgtagccgaactgcaagagggaagagaagcatcgcatctctgagtctgaaaccctagccgcctgtctccctgtccggtctccactcgtccgggcgacgagacgacgacggagggtttctgcgggggatttgtttgtcgctgactcgccggcgaccaagatgaggccggttttcgtggggaacctagactatgatacccgccactcggagctcgaccacctcttctaccgctatggcagggtcgagcgcatcgacatgaagtcaggctttgcttttgtctactttgaggatgaacgtgatggcagtgatgccatacgtgctcttgatggttatccatttggccctggcagacgcaggctttcagtagagtggtcacggggtgatcgagctgctagacgtgatggcaacaaaccagaagtaaatactaagccaactaaaacattgtttgtcattaactttgatccaatggacacaagagtcagtgatatcgaaagacactttgcaccatttgggaacatatcaagtgttaggataaggaagaactttgcttttgtccggtttgaaacactagaagaagcccgtaaggctcttgaagctactcatgctaccatgcttttggatagggtgatttctgttgagtatgcctttagggatgatgatgaacggagtgataggtacgacagcccaagaagaggtggtggatatggtaggcggggggatagcccagcgtacagatcacgtcctagtccagactatggtcgcccagcaagtcctgtatatggttcgtatggcaggagcagaagtcctgttcgtgaccgctatcggagatctcctgcttaccgatcaagatccccacctgccaaccgaagagcatatgactaatcaagaactatattatgatgctataaatgctagcggcaactcgtgtcgggctttttcagggctgcagccagcgggaagaacttactgtgcctgtaccggagtgtcaccttaattgctttaaactcctgtctttaaaatggcatgttatgttatgcgactgtcggagtttagtacatgcaatatcgtcacatgcatgctggcattttgtttttcaaaaaaaaaaaaaaagatcggcttacatcttttaccgtcctttgtc

SEQ ID NO: 40956 - DNA, 412 bp, Zea mays
  Clone ID: MRT4577_137351C.1
accacgcgtacgctcaacctagcattactgtgtgtgagaaagatcgacagcgccggtcaaggaatagagcgggttctctgcctcgtgtcattcctatgtactgtggtctgcggaggcctaagttgcagcgcgctgagatagagttcacatctaaatagacggcttcgattgcccttctatgcctcaagctctactgactccttatgcttcttattattccactgtcttactctgctgcgcctctgtccataaacctgtcgctgactaggaaccttctgcagcccgcggatgaccctgctccagaggttccagatcccgaccagcaaggtgcggatgctgatgctggtacggtgggagctctagaccatggcagttaggtagcgagtaggatggacatcgatgtcaacgacta

SEQ ID NO: 40957 - DNA, 428 bp, Zea mays
  Clone ID: MRT4577_137352C.1
cctttagtgaaaaaaaaaaaaaaaaaaaagtagtatctccattttaaaaaggtttgagtttaggaaaagaatgtttactgtagtgattaataacccttcaccctgtctgcattacaactttcatatatgatgtgaacgtttggtgacaaaaaaaaaaaaaaaaaaaaaagtagtatctccattttaaaaaggtttgagtttaggaaaagaatgtttactgtagtgattcaataacccttcaccctgtctgcattacaactttcatatatgatgtgaacgtttggtgacaaaaaaaaaaaaaaaaaaaagtagtatctccattttaaaaaggtttgagtttaggaaaagaatgtttactgtagtgattcaataacccttcaccctgtctgcattacaactttcatatatgatgtgaatgtttggtgacg

SEQ ID NO: 40958 - DNA, 443 bp, Zea mays
  unsure (1)..(443): unsure at all n locations
  Clone ID: MRT4577_137353C.1
tgttgttcaggctccacacttgacagggcacaggttagggcgccaggagacggggagaatcggtcgccctgaaaaaagagcagagtgtnannctttccccccggttcctagttttggtactactacaggctcccgctgcatcatccccaacgaaccagcagagctcgcaagcaacaaaagagaaggacgaagcaggcgcagccgccacacggacacgcagcagagcatcgccgcagcggtccagaggcatgggggccgccgccgccgcaaagcacgccttgcaggttgtcgcggcgggaggagatgctgggcaatcgagcttcagcgccaactcaccccccaccaccggcgccgggttcgtcgccctcgacgtcggtgaagctttgtctctggccggcgacgccggcccttcgggcacgcccattgtgccggcccggacaccc

SEQ ID NO: 40959 - DNA, 315 bp, Zea mays
  Clone ID: MRT4577_137354C.1
gtggggggttttttttttttttttttttttttttttttttttttttatcacaatcagaaagaaaggtttgttctccctctcgtttatttacacccgtgggcattgcacatttttcataccctcacatacaggtttttatcccggggaagtcaaagacggcatgccccagcccatgacttggcattgctcggcggggtggcgtccgcccttacaggctaggcgtcctttcgggggctccggtgatttctgtgagctggttttttcccaaggggtctctgtggtgcttttcgaggttcttctcgtggcctttgccgt

SEQ ID NO: 40960 - DNA, 835 bp, Zea mays
  Clone ID: MRT4577_137355C.1
tataccttctcgatctcctcttccccttcccattccccacccacggctaggttgcaaaccctagctcctcgctgatgtgagcctcccggagattcccaatccagctgccaccccactccggcgcccgactccgtccccggtcctcctcctcctctccccctctcgcacaaggtgctgaagactcgtccgcgactttgcatgatggaggctgcgcggtacggaccttggtcagatctcccgccggaactcctgggccttgtcctcaagcgcctcccttcgctagctgaccgtgttcatctgagagcagtctgtcacccatggcgctctaatggtctgctgcaacagcttcccgtcccattcccgtggctcacccttcctgatggtaccttcttcagcatcccaggaggcgaggttcaccgcatgcctataccagatggtgctagttgctgtggctccatcgacaactggttattcctcatgggcagtgatgacacatgcacgttgatgaaccctttctccaagaccacgtttgagcttcctgatctggtcacagtttggcggcatgaggcacattatgaatctgatcataagcaacttttgtacaagttggtcacaccctcgcccctggacatatcacctgattccctcattgcggcattgatcaaggatggtggcaatggtacactttgcattagccagccaccgattgccccttacttggtacagggcaataggaagccattgcagcacctatttgatgttgcgttctttgatggaaagttgtacgcggtgtctgtctttggcagctggtcacccttaaagtttgcacaacttg

SEQ ID NO: 40961 - DNA, 2521 bp, Zea mays
  Clone ID: MRT4577_137356C.1
tcccccgccccgcctcacagtcacacttcaccaatctcgcgcacactctccaatgacccaatctccccgagcctgccactgccagcgccagctcctccctggcattccagtcccagctccggatcgcttcacgggccgggaagcagcacccgcgctgcgcgcctgatgcgcgcagccaatgccggcgctcgcgtccaccgccatggcccgagccgccgcgcccatcctcctccacctcctcctccttctgctcctcctcactgaccacggccccggccccgccgccgcggtgcgcttcgactacgcctcgctcaccctcggcagcctgaggctgctgggcgacgcgcacctcaagaacggcaccatccgcctgtcccgggacctgcccgtcccgacctcgggcgccggccgcgcgctctacgccaccgcggtgcccctccgcgggggcttctccacgcagttcgccttcaccgtggccacgctcaacccgtcctccgtcggcggcgggctggccttcgtgctcgccaccgacggggccacgctcggcgacgcgggcgcgtacatcggcgtgtccgtcgccaccgacgccgccgccgtcgagttcgacacgctcatggacgtccagttcggcgaccccaacggcaaccacgtcggcctggatctcggctccatggtctcggcagccgcagccgacctcgggggcgacgatgccggcgtcgacctcgccagcggcaggaccatcaacgcctggatcgactaccgcccctcttcttctccttccggctccgccgccggtatcttggaggtcttcgtgtcctacgcgcccaagcaaccgcccaagcccgtgctctccgcgccgctcgacctcgcggaggccgtcaaggacgccgcgttcgtcggattctccgcctccactcaggggagcacggaggtgcacgccatcgagtggtggagcttctccaccgcgtcgccggccccgtccccgcgttccgccgcgccggcgccggagtcccaggcgctcccgcctcccgtcgccactccggtgctcccgtcgccgctgctcccgggagggacgacgacggcgccagcgccgccatccgggagcgccggcgcgcccgccgcctcgatcgccccgtcgtcaggcgccacggtggggaggaatgccgccggatcggggacgccgcgccctcccgcggccgtggccggcgccgccacggcaggcgccttcgtggccgcctccttcgcgggcgtcgcgctctgggcgctagcgcgccgcgcaagggccaggaagcggcaggccgcgttggcggtgggcaccaggcgcgacagcagcgtggcgtcggcggcggcgctggcgcggtccccgcgggagttcagctacaaggagctgagcgccgccacgcggggcttcgacgcgtcccgcgtcatcggcaacggcgcgttcggcaccgtgtacaagggcatcgtgccggacacgggcgccatggtggccgtgaagcgctgcagcagcaccggcgcgcgcggcggaggcaacgcgagcggcgagcaggcgcggtcggagttcctgtcggagctgtccatcatcgcggggctccggcaccgcaacctgctccggctgcaggggtggtgctacgagaagggggagatcctgctggtgtacgactacatgcgcaacggcagcctggaccgggcgctgttcgacgcgtcggcgcccgtgctgccgtggcgccaccggcgcgaggccctggccggcgtggcgtcggcgctggcgtacctccaccacgagtgcgagcggcgcgtggtccaccgggacgtcaagtccagcaacgtgatgctggacgaggcgtaccgcgcgcggctgggcgacttcgggctggcgcggcaggcggagcacggcgagtcccccgacgcgacggcggcggcgggcaccatggggtacctggcgcccgagtacctgctgacgggccgcgccagcgagtgcaccgacgtgttcagcttcggcgcgctggcgctggaggtggcgtgcgggcggcggccgatcggcgccacccctgagggcgtcggcgggtgctgcagcaacctggtggagtgggtgtggagcctgcacgcggaggcccggattctgggcgccgtggacccggcggctgggcggggagttcgaggagggcgaggcccggcgcgccctgctggtggggctggcgtgctccagcccggagccggcgctgcggcccgggatgcgcgccgtggtgcaggtgctgggcggcgaggcggacccgccgttcgtgccggcggcgcggccgtccatgagcctcggcagcgccaaccagcagctgctgctgagcctgcaggacagcgtgtcggactaccacgccatgctggggctcccgctgtcggactcgtcgtcgtccggctcgctcagctcgtcctcgctcaccagcacgctgcgcaggggcggccacgacatccgggtcagcagcaccgccggcgaagccaggtgactgcctgagcctcgtgccgaatt

SEQ ID NO: 40962 - DNA, 169 bp, Zea mays
  Clone ID: MRT4577_137357C.1
agcagctctagctttgcagtcgtgtaattggcccaagtcattgtttttctcgcctcactttccaccaagtgtctagagacatgtgagcctcgtgtcatctccggggtggccacaggctagatccccggtggttttgtgctcaaaataaaaagcctcagtgacccatgag

SEQ ID NO: 40963 - DNA, 305 bp, Zea mays
  Clone ID: MRT4577_137358C.1
attataaccggggtgttcttcgaacattattggcggcgggcggacaacccactcccctgtatattaggacattaaagcaccatctttctttttctggccaaaggctcaacatgagttctaaagaccaaattgctgatggaaggccatgacaccaacctttctgttattataaaccacaccggaccaaaataataatcaaaatacccccaaaacgctacaatgcttattacgacaggggaaccactcgttggcacattacataggtgtagcccttttggaacaagcctttattggcaacatcgctt

SEQ ID NO: 40964 - DNA, 423 bp, Zea mays
  Clone ID: MRT4577_137359C.1
tacatagctcccggcccaggaaaaaaaaagcataaattcttccggaactccaaaaaaaaaaaaaaaaaaaaaaaaaaaaaaaaaaaaaaaaaaaaaaaaaaaaggagaaaaaaaaaaaaaaaaaatgactgtcgacagtaccacaagacactggtcctatgagaaccgaaaggggactctgggaaactattccagcacatgtacccatgtgggggggaaagacgctgcgctcggtgctcgcctgttccttccgcggacgggcgatgacagcaattctagttaccaagatgcggacctaggatccacttacactccgaagtcgaacactggggtcccatgggaggtaaacgccctggcattgttgctcctcctgctagggactccactcggctttctgtcttacttaatattgacaggttacat

SEQ ID NO: 40965 - DNA, 207 bp, Zea mays
  Clone ID: MRT4577_13735C.1
ccggccgggacatccatctttacaccatcagctaaacacacaaaccatcatacttccagccattcttactactcgtcacgacagcatttcaattgctgtgaatacacactcttcatcatgacgtcgacagaccccaagaccaccgatgacaagcctgtcgagcaaaagccagagcaaaagcccgccgccctcggcgaggacgacgag

SEQ ID NO: 40966 - DNA, 251 bp, Zea mays
  Clone ID: MRT4577_137360C.1
gaaaaagaaatgaccgggacagatacaagaacgaccggggggggaaaaaccgagcaccacgaaagtaaaggagcccgcaaagaggcagagtgtcaccagcaggggacaggaggaggaggcgaagcgcaacacgcagtcccgaccacagaggaaggagaggggggaacaacacgagccctgtacggagccgaacacccccgggcaggaaaagggcaaccagcgatggggcacggacagataccaggagccaa

SEQ ID NO: 40967 - DNA, 573 bp, Zea mays
  unsure (1)..(573): unsure at all n locations
  Clone ID: MRT4577_137361C.1
ctccatcaaggcagctatttcaacttggagtttaatctcacaaatatttaggtactccattactctccttcaccatccacttgctaccatacagctatgcaatgccccagtaaatataattaaaactcagctctttcatgtttctgcattttatttcaagagccccttctctctattcctatcccaaacttttccacagtttcatattcctaaactaggaggcataggaaggtagaacgaaagtatatatgggtgaagaagcgacggcatgttctcgacacaaataacattatctacagccattcggaaccaatgcccttccgcctccttcataaaggaatgttcctcgaaagtcgaaacattgtaaatctaagtgccgaagtaaagaccgagcaagcttacggcggtggcggcggcggctacggtggcggcggtggctacggtggtggtggtggcggctacggcggtggcaaccgtggcggcggctacggcaactccgacgggaactggaggaactgagcgggggggcccgcgcggccaagttatcctgttcgctaccgngatgtttaccct

SEQ ID NO: 40968 - DNA, 261 bp, Zea mays
  Clone ID: MRT4577_137362C.1
aaacccgggcgaccacgcgtccggaatacctgcagactttggtcgacaattgctttgttcttagcagggaagtacacatcagaggcgagcaaacagcatgagtggtgccatggacatagcacgagccgcgtgacccatcatactacatacatacacctatcactatcatagaccagagattcagagctcaggagctcaggatgtgtcgttgtatgctaactatttattgaatgaggtagagaaatgtttttaccttctttt

SEQ ID NO: 40969 - DNA, 333 bp, Zea mays
  Clone ID: MRT4577_137363C.1
tcccacccacacgtacgcgtccgaaatctctaaattaaaataaaaattttaaattttaaaaaaaaaaaaaaaaaaaaaagaaaagctaaaaatcaaaaaacgccatctctcaacaacaacaaaaacataaacatatcacacaaacaaccaacgcaccccctcaccaaaacccctccatcccaccccatcaacccacctactccttccaaaaaatgcacccactaaacccatctcactccccatcacttcacactctctataaacccaaaaaccaacagttacccaaacaccataaatcactacaccttcccttacttcccactttctacataa

SEQ ID NO: 40970 - DNA, 331 bp, Zea mays
  unsure (1)..(331): unsure at all n locations
  Clone ID: MRT4577_137364C.1
agcagtggtaacaacgcagagtacgcggggatgtgacgtgccaacattatatttagggatcggactacttattactagctgatgtagtgattgttgtggaagaagattgcacagtcaatctctgtttcttacttgtcctgtgtcaaatttagtgtaagaactggcgtccttgacagctggtatatgtaaaatagtatggccaccactattactatatataacaagagacttcacattaaaaaaaaaaaaaaaaaaaaaaaaaaaaaaaaaaaaaaaaaaaaaaaaaaaaaaaaaaaaaaaaaaaaannacttctgaangggtaccactgct

SEQ ID NO: 40971 - DNA, 223 bp, Zea mays
  Clone ID: MRT4577_137365C.1
tttcttgttacaaaaaaaacactctatgatagggggttacctttaaatactcatggggagaaacaacctcacaggatattctttaacactaacatcaccattttgtggattcacacaaccagatgtctggtgaaagcttgagcaaaggccctaggattcttatgcataaaggtgtatgacaatggctgagcctgggtggcaatgaacgcccccagagacattg

SEQ ID NO: 40972 - DNA, 569 bp, Zea mays
  Clone ID: MRT4577_137366C.1
agatagattatattttaactgttaatgcccgtgcgttacaacggtcacacaaattattcgatacaatattatagggaccccttaatatcgttgcctcagtctaaagcacatagcaaaaaaattacaaactaaatgcaaaactggatattagattaaaccaaaacaacatgctcgtgtactgaccatgacaagtccaccgaagttgataggcaacaaggtggatgaggccccgatgcagggtgagcaacagttccgttctcctcctcctcgagggagacaagggtttcactctcgttgaccacctgcagctcttttcttggagtggcaatctctaggagttccactgatgccaaatccacatgcttgcatttctagattcacatttctagtgtgcatcactacaggcagcatgacacaaaaaaatggaggccaagctgatcactgatcaccttcactacatacacataatagccactcacacccccttaaactgcccaatccaatccaaacacattcatcaaatgggaaatcaatacatcaatatttgtgatcaccaacaccatatcacc

SEQ ID NO: 40973 - DNA, 633 bp, Zea mays
  Clone ID: MRT4577_137367C.1
gttcacaaggggacgcaccgtccgtttgtgcgacccagtctggtgctacgacgcttgccgtgaacatccagaattgaactacaaccaatgcgtcaatgattgctacgctgagaatatgccggacgccgcatggctggcggcccttggaggaaccggaggagaagaagcaagaggaggagtggttgatgtcccaatggtggtggtgcagcatgaggctgctgcaggtgcactgtcacggggcaactgcgatgagtattgccgcaaacactatgatgaaggctcccccgggtataggcactgccagtatatgtgcccacatctgagggtccacggggtagcagaaggagaagaagcaagaggaggagctgttgatgggccgacggtggtggggaaaccccactgcgactggttccgcgactgtagtgtaacgccatgcgtctggcgatgtgggaagagggtgcaagagaaggacaatgaaggaacaagaacaggagcgctcaatgtcctggcggctgcgcggcatgaggttgctgtaggagcatgttcgtcgactgtgtacgtgcaatcatgctatgcctgttgccaaagggaggttactagagatccggatttcgactggtatgcttgcattcg

SEQ ID NO: 40974 - DNA, 841 bp, Zea mays
  Clone ID: MRT4577_137368C.1
ttttttaaaacaaaccgtaattttcttcacttaattgctgcttatattttaactagtataatgcccgtgcgttacaacggcacacaaattattcgatacaatattatagggaccccttaatatcgttgcctcagtctaaagcacaaagcaaaaaaatatacaaactaaatacaaaactggatattagattaaaccaaaacaacatgctcgtgtactgaccatgacaagtccaccgaagttgataggcaacaaggtggatgaggccccgatgcagggtgagcaacagttccgttctcctcctcctcgagggagacaagggtttcactctcgttgaccacctgcagctcttttcttggagtggcaatctctaggagttccactgctgccaaatccacatgcttcgatgaaatattagtgcacaacaaagcattacacaaaggtcgattatcagataatgttatcttgagaatgataagacttcaataatcatgtgtaccttgcatttctagattcacatttctagtgtgcatcactacaggcagcatgacacaaaaaaatggaggccaagctgatcactgatcaccttcactacatacacataatagccactcacacccccttaaactgcccaatccaatccaaacacatccatcaaatgggaaatcaatacatcaatatttgtgatcaccaacaccatatcacctgaattatctcctcgtccttttgtcttatatcaattctgtacaaaaagcatgtgtccttttgtcttatatcaattattaaaagaaaggagtaaaccaatatgttagacgccccgcttattccatatcgcctgtgccga

SEQ ID NO: 40975 - DNA, 492 bp, Zea mays
  Clone ID: MRT4577_137369C.1
cccacgcgtccgcggaagcttggacggacgcgtgcgccgacaccgtgcttaccgtaccggtcctgcttggctttcggcttgtacatgggggtgtgcagttgctaaagtttttgatggacgttttttactattgctacgcgcaacggcttggccaagttctttctgttgatgctccatgggtgtgtcaaccaatgtgacatgttgtgaaaccttttgtaaaattatatgcatatctggttagattttgtgataccaagactttgtggaaggaatactttaaagaagatactgtgcctccttagttcaccgaataggtgacttaattatttctttagtaattttaattcacttctacctatgcctttgtgtaacgattggaactctaaattgttcgtatcatgtatagttcctacaatctcttctaaaaaatattcacataaatgttcaagaagtatcgtaaatattacctttaattgattgataatatattgg

SEQ ID NO: 40976 - DNA, 722 bp, Zea mays
  Clone ID: MRT4577_13736C.1
ctgcgacaccacgtcgtcgcgtacgcacgatcgatcttcttctgacactcgccgttgccagatacatggagggaaggaggcgtcggtcgccgtgccacggaagccgccggcggcggcttggggagatggctttggggcggaaagttcgcgagctccggcggctggtgcccggcgccgcggcgatgcctgccgagcgcctgctcctccgtaccgccgactacatcgtgcgtctccgggcgagggtcgagctgctcagggcgctgtcggagctcatcgccgtgactaaccatggcgggattggtggcggcgacggccatcacgacggtgacaccactagccatccctagctagtgctgggcctcagctccagctatgtgatttgtgtggccgtacgagtcgtctacagccgatgatacgtggtatttgctgagtatataagcatgcatgtcatgtatagatcgatcgacctctgtttatatgtatagcgagtcgtccgtagtcacgtcatgtgtgtatcattctttgcgctcccagcagttttgtttcctttcatattctctaccaaattttctaccaatttaattgatactttatgtcacagtgtatatgtttatgtgtcatttgtttttctttagaatggcttttatgagatgtttttcttgcatagaagttctattatttaagtcatgattatgcaagtacatagtagacgtttttactat

SEQ ID NO: 40977 - DNA, 5813 bp, Zea mays
  unsure (1)..(5813): unsure at all n locations
  Clone ID: MRT4577_137370C.1
tttttttttttttttttnnnnnnnnnnnnnnnnnnnnnnnnnnnnnnnnnnnnnnnnnnnnnnnnnnccaccaacaagaaaacaggtcagctaaaagaggaatgagagacagagtcagatgcatggccgggccaccaccaccaagccatgtacatgatggatcgctttgtcctcaaggtcagcgaccatgcatcgatcagcgctgcgccaaggaggaaatggagaggtatgaatttttttctgaattctcaaaacttggtgcgcagaaagtatggaacgctgtggattcatattggcaaactcccaccaccgccttacgggatattggtgaccctgctaaagaccttcgggtcacaggctccttatcacggttctgggcaaatggaggagatgacgatgaatgtgatatagatcaggattccggtgtctatccctctgcactcacggccaaccggctggcaaataagacggcttttactgtggaacagcttgtccagaaaatcgagggactacctgatcagaagtttcaggagcaggccactgtaattgacacatataaaaaagaggtcaagaattttttagcttttgaccagacggttcctccaagtagcaagttaaagccgtggcatgggccattacctccaaaaagaatctctccgtcactaacgctagcagactgtcctgttttgacagatctgaggcataagaaaaagggacatcggagactcagagatcttggaggcgccttacgccggagctggggaagaaatggggagtttcaaattttaaatcgagatccacgttttccgggtcgtgtgtccgatgcagtccaacgaaaaggtgtggtaacagataatggacctttgttgggctcaaaaggcacaagcccaaggattcatttcataccaaagcaggctttggggaggcttatgtcccgtcgaggccggttagccaggtctgaacttgattgtgctgaagcatcgttgttccctgtgacttgcattgccataagaaaccagaacttctcgacccccacgccgccgccaacctcgatcacccacaacgccacaacatttgctgacattgtgaggtttgggaggactaggatggatggggaaggtcaacgcagaggaggttttagggcacctggagtcattggcagatctggaggtggctttggtttcggcaatcgcgtggaggggttcacctcgggaggctttgggcaggcgtatggtccaaatggtgcggggcgaatttctggccaacacctaggtcctcagttcggatttggtgccgttggacacaacaacagggtgccgcaaaactcccagcaaacaatagtttttggacatggacagcagcaacctgcctcgttctcagttggaggagctcaacatggtacacaacaggttggtgttgggggacagaaacatgattatcataatcagcgctacaaggataattctgggtctggtcgacaggtagaaagaggtttttggccaaagcagcatgctaacaggggccgggccccattctccaaaggtccaagtttcaaccatattgcagctagtggttctgaaggtcttcaaaaggggttgggcagacatttacaacataatagtgatggaggttcaagtggcattggggacaacatgattttgatggataaaactgcctctaaacgttcctttcaggaagttgaagaaaacaggccaccctctaaaaaggttgaagtattagttgagaccaagaaagaggcgagtaaaccacaaggggaattgtttgaagtggcagaagtgtcagcaaaagggaggggtaagtggtgttttcgatgcaggacaaagggccatgtgtcagtggaatgcactacaatcttgttttgccaattgtgtgaaagtgatgaccatgtcgctgctatatgcccaataaagaaaaaacctcgtctgatggcttactcggtgggttatgcgatggatggtctgggcttctaccatatcccccatggccctatttccatgtcaaaaaaggataatactttggctttgatcacatttatgggaggcgagcttaaggaagctgaacttgttgctcatatggagaggttaattccaggaaaacacggttgggatgttcagttgcatgccccaaatacttgggtggctaatttcccatctaaagctgaattgaagcgaactgtaacatttgggtctgctgatcttaagaatggattacttctgaaattcgaagagtttgaggaggaagagtattgtggagaagagctaccaagggtgtggatgcgtgtattaaacctcccaaaagggttaagaacatatgaggttctatgggcgattgggacgatgtttggtgccacaactaaggtggatatgattactacaaggaaaaatacctttggaagatttgaggttgcagttctcaatgctagcattgtgcccaatcaaatggaggtcgttattggaactcgttggtttgagttggtttttgagatagaaggagaaattggtgaagctatggaaccaattactcatagggagaatggtaatgagggggatcatgggaatgccgatagaagggacaccactatggaggagaataactccaaagcaaaagacacaaatggcaattcttgggctgcaccttcctttgctagcaacagaagggacgtaggaaagggtgtccagatggacgatggtgctctggatgattttgatgaggatgacctgctcgaggatgaggtgatggaacaatctcctgctgtttcaccaaaatatgcagtccttagtgctgttcttgatgcaggcttaggtgagcaggccaaacagccatctggacagcatgactgtgagatgcaggagggctgtaattcaaagcctggtttggtggagcatagcaaagtgcctagggacgattgcagcaaaatgaaagaagctactgcgactttgggacaccaattgaagtgtgatggtcagcagtctgacgccagctttagctctgaagttgctcttccagtgatacccaagccggtaaaagtcctcaataaaatttctgcagccttgccaaaaaggagaagcaagaggcgggaagcagaagtagatgaggacatgctggaacgtgcgaaaagagtggtggcgaagaaaaatcttgatggaccggaaggtaacagttttaagaattcagttctttcctttactgatgagcttgttattaataatttaagatctctaggaatttctttgggtgcttctgaaaattcagttcagaattcggtagatcatcttaagatattagaaaaggagagaattaaagagtcgtctgttaaaatcggtcaggataaccatgtagagttaggagaatcagatgtagaagatgatgatctatatactcttggtgacctttcaggtgacctgtcggaggagatcatggaatatcttactgattctaacagaggtcttcgggacttggctaaactgaggtttttatttgatgcatctaatgaccataatttagactttattgctcttcttgaaactcacagaaagggctactctgaagctgagttaagtaccttttgtgggagcagagagttttcttggcaatggtgcccttctagaggtcgatcgggaggtattctactaggtgtcaacttagaaacttttgacatggttaaatcctgtaagggcgagttttttctaaaaatacattttaaaaataggagtgatggctttcaatgggttttaatggctgtatatggtgcagcgcaacctgaacataaagtccgttttcttacagagttagtcaatgtcatcagtatagagacaatgccaattttggtaggaggagattttaatattataagaaacccgacggaaaaaagtagtgaccgttttgataacaggtggccgaacttgtttaatgcctgcatagaatctcttaatcttcgggaactggaactctctggccgtaaatttacctgggctagctctgggccgaacccgacatatgagaagcttgacaggattttggtgagcactgagtgggaacgaaaattccctttatcggtggttgaggccctatcgagagatatttcagatcacacacctttattgtttcaaagtgaaaatgcctcctatagaggaaataaccaaatgttcagatttgagctctcctggttgtacatggaaggttttcatgaattggtagcaaaggtgtggaacaaggaaaataggggaagttcttccctagttagatggcaaaataaacttagagctctgcggcgttacctgagagattattacaaaaagttatttgggtcgccaaatttaaatcatttctcgttagatgaagatacgcgtgatgacatcccgcaagtatcgaatatcgagaatgagttgttgatagggagtttctcagaagctgagataaaaaaagtggttttccaattggaacacaataaggcgccaggtccagatggttttcctgctgagttttaccaaaacttttgggaggttataaaaaaggacttactggcactttttgaggatttccacaatgggattttgccactccatagtctcaactttggagtagttactctggtgccgaaaaaagaggctataaaagtggaaaattttagaccgatttgtcttttaaatgttagttttaagatttttactaaagtccttacaaatagaatatcaatcgttgccaaaaagataatccaacctactcaaacagccttcatccctggtagatatctcttggaaggagtggttatccttcatgagaccattcatgagatgcacaaaagaaagaaaaatggtgtaatccttaagctagatttcgaaaaggcgtacgataaaataaaatggccatttatacaacaagtgttacggattaaaggtttttctcaaacctggtgtaagtggatgcaacaggtggtggaaaaaggaagtgtttcaataaaagttaacgatgattatggccattattttcagaccaaaaaaggagttcgacagggagaccctctgtcacctattctttttaatatagtggtcgacatgcttgccattctcataaatcgagccaaggacttggggcaagtcgttggtgttataccacacctggtagatggaggactttcaatactccaatacgcagatgatacgattatcttcatggaagatgatttagaaaaggctaacaacatgaagctagtgctatgtgcatttgagcaactttcaggcctaaaaatcaacttccataaaagcgaacttttctgctatggtgctgctaaagggttagaattagaatactctgacatctttgggtgtggcgtggggagctttccattcaattatctaggtattccgatacaccacagaaaattgagtaatacagaatggagggtagtcgaagaaaggtttcagaaaaaactaagtggatggaaaggggatggtacacagattcagttctgggaagataaatggttggggtctgtccctttgaaagaccaatttccagatctgtacaacattgtgagaaagaaaaaggcaacagtagctaatgttcttcaacataatcaacttaatgtggcttttcgtcggtcacttaatgtaaataatctagctgctttgaataaggtcactttcagagggacacattggacaaggttctggacactgttgcagaaggaggaggacagacctcaaaatgtaagatttcgttccaatgtggaaccccatgtttgtgagtttgacagccgaatgtatcaaccgatacagaagctggaatattaa

SEQ ID NO: 40978 - DNA, 606 bp, Zea mays
  Clone ID: MRT4577_137371C.1
ccgacaggggtcactggttttttgcctacaacttttttacaagagtttgacggcttacccctttgccctgaaaaaaagctgcccttttccaaaatttccaaaaacctggggttcccttcccttattttattgggcaacagggccccccttttaataactttacaaacaaatccttttccactgtggtttactaacgggttgctatccaaacaaactttttttacagtccacctgtaaaattgcaaggggccaatcaatgaaatttccccttttccaaacgttggcctgcctgggaaatctgcaaatcctactatgaagggccagttgaaaaagcaaaactacgttgtttttgctggccgttttttccccccctaaaagtatcgttgcctgattcctcgttgctaaaagtatggccatccagtttttccacattttggggctcctttcctgccatcccttccttttccacatttttggggcccttgactgccttttttttcacttccgcgtttttcgactttttgcctgccgaattctttttggtttttacatctttggagcccttccctggtttcttcgtttcgccatgtttggattttttccctg

SEQ ID NO: 40979 - DNA, 274 bp, Zea mays
  Clone ID: MRT4577_137372C.1
aaaaaaaaaaaacccaccagccagaaacacacatttggttttgcaatcaatcaagggctcgggaagaacaggggcctgcatgcttgacagtttggggcggacaaaagcttccaccattctttggtcccccatttcacttacatacacatgggacaggcaaaactttttgattttggaagcacgggccggtggggcacatggggggtacaattaggggggttaattacaatgggggggaacaacttactaaggggggggttttggaaaaaacacc

SEQ ID NO: 40980 - DNA, 314 bp, Zea mays
  Clone ID: MRT4577_137373C.1
ctaggtctagctagctaggaaaggggggcgaaaatggctccgcttctcgctgctgccatgaaccacgctgcacgccatcctgggcttacgagccacctacgacgaccccgcaatgagagtttctcacgggtccacctggcgccttcttctccacagagcagcaagacaacgtggaaccttagctttactacacgatctgcaagagtaggcacccaaaatggagaccaaatgttgagcccctcggaaatcccacaaagggactggatcccctctgagcccaccttcggagactccacttcaccgtaccaaattga

SEQ ID NO: 40981 - DNA, 250 bp, Zea mays
  Clone ID: MRT4577_137374C.1
gggccggttggccagttattccactagatccctatgtttgcactcacccgttgagagggcctgattgtaatatgttcttatgtttacactaaatttgcgcctcacaagaagatattggttaacccaattgccatatatcacgtcactgcgtatatgcgctgctacctgcttttggcatcaagattcacattataatgtctatgttggggttataatattaaaaaataaaataatatataaaataatatag

SEQ ID NO: 40982 - DNA, 425 bp, Zea mays
  Clone ID: MRT4577_137375C.1
gtcgaccccgcgggcgggctttatcacctttttttccacttattgaggaacttattgaaaaacttaacaagggtgaattacctttaaaaggggacccatttatgaagggaccaaggtctgcttctgcttcttaagaagccacacaaactggattattaactggcccaccagcacaaaatccacaacccatgtctattaaatcaaggaggacaccaacatgggccaaatctcgtaattcccatgattcttcaagtgaatcttcaatccttaaacacgcatcaagtgacttcaagaggctaggcaaccggatttttggcttcatggatggtggagcccctagatctgaagtacgcccatgtgcttatactactggattaaaaaaaaccaattcccaatctggttggcatattatatactggatttat

SEQ ID NO: 40983 - DNA, 121 bp, Zea mays
  unsure (1)..(121): unsure at all n locations
  Clone ID: MRT4577_137376C.1
tccaagacctaccttcatttttcccacaccatccncaataacggctacggtcgcttctaaaaacgtccctgcacngtacaataattctccacttccaagactgctaatcatggccattcca

SEQ ID NO: 40984 - DNA, 770 bp, Zea mays
  Clone ID: MRT4577_137377C.1
catcccgcacctccccacaaacgcgtattgcctcctacgcccccggatccgctgctccaccccccaactccgttgccacacgcccttgcacaagcgagcgagcaaccatgtcgccagcagagccgacgcgagacgagagcgtctacatggccaagcttgcggagcaggccgagcgctacgaggagatggtggagttcatggagcgcgtcgcgaaggccaccggcggagcagaaggaggaaggtcggggcaacgacgcgcacgccgccaccatccgctcctaccgcagcaagatcgaggccgagctcgcaaagatctgcgacggcatcctcgccctgcttgattcccacctcgtgccatccgccggagctgccgagtccaaagtcttctatctcaagatgaagggcgactaccacaggtaccttgcagagtttaagtccggtggggagaggaaggaagccgccgagagcaccatgaacgcgtacaaagctgctcaggatatcgccctagcagatttggctccaacccaccccatcaggcttgggcttgcactcaacttttctgtgttctactatgagatcttgaactcccctgaccgcgcctgcaaccttgcaaaacaagcctttgatgaggctatatcagagctggacagcttaggcgaggaatcctacaaggacagcactttaatcatgcagctcctgcgtgacaatttgactctatggacatccgacaccaatgaggatgacgttgatgagattaaggaagccccagc

SEQ ID NO: 40985 - DNA, 449 bp, Zea mays
  unsure (1)..(449): unsure at all n locations
  Clone ID: MRT4577_137378C.1
cttcnntacctttcctttatttcggggtgggggcactcttccggtcctcaatttcctctaggctcacctttccggtaaatcctatgtgtctcgttactgcagtgggctaatgatgacggtggggtgttttctccatgtgccgtccatatcctggcgctgagttttctaatgccgcccgctgttacgagaccgtctttgctgctgtagcctcaagattccctggtaaggctgttgggtgtaaatctgcctgcgtgatcagctcctgctgtagctgctcctgcggatgaggcctaggacgatgatgacctttatctttttgttgatgaaactgaggatgacaagaatgcatcttatgagcgttccgtctctgccattgccttttctaaatataaagaaagaggtaaatcctcctgtcctatggatgttataccacgggactgattagactt

SEQ ID NO: 40986 - DNA, 536 bp, Zea mays
  Clone ID: MRT4577_13737C.1
ccggccgggaaaatttcatcatatgtaagatctccaggctggttacagtggatggacagaatgttttggacacatacaagggcaggaaaatgatggcttgaagtttttggtttgactttcactcagcctcgttcgagtttcacccgccacatgtatagtgcctgtacatcacttgagaccatggcagacaactgcagccagagtcaaatgcttgacgcagtgacatccagagcagctttggcttgcatggctgctggctgcacgaaggtgttcggtggtgacttgttgaggtcatcaaggagacgagattctgcatcgttgaagacagtgatcggatttttatttctatttttgacaaatactcttgagactttgctaacatccagttatcttgttactgcctctgctttcaaatatattgttaaaaaatcatttacgctgttactgccttgattgttaaaatatattacgtcgaagaaaaaaaaaagaaaagaaaaaaaaaaaaaaaagaaaaaaaaaaaaaaaaacccgcggcc

SEQ ID NO: 40987 - DNA, 176 bp, Zea mays
  Clone ID: MRT4577_137380C.1
gaacacgggaaaagaataagtggcggtccatatttaaaggatgggtattcaaaattaattgaatgatgtagccaggcactgcggctacacgcgtggcagctgccagaagtccgatggcaacagctgctattactactttgctaggacatggagtcacgtgcttgtcttcttcgggc

SEQ ID NO: 40988 - DNA, 403 bp, Zea mays
  Clone ID: MRT4577_137381C.1
gcagccaggccgccaagacatagtggtcagcgtacttatccgacgttgcctcatgcaggtgtggtacgccatcggtgtgccgtacccactgtccgtgttctaatcactggaacggatccgatctatccgcgacaaggagatcctcaagatcgagaaggagaactgattcttcatgcccgagatgatcagcatacaacctctacctgaagaagggcggacacaggcttataaagaccggcgattacggacatatgggccgatacgacaccgacttcacttggagaggtttgaagcccctcatgttggacaaggctttgctttaaggttgcaagggttaactgggaacttaaggactactttcctttggctttgtggtgacctccatccatggctcttcttggat

SEQ ID NO: 40989 - DNA, 462 bp, Zea mays
  Clone ID: MRT4577_137382C.1
agctgattgaatatatcagagtccaatctgatcatgcagatgctgctgacaacctaccacaacaagtgacagattgtggaattaccataggagaccacattactgatagtcgatgagaagcaccagatcatggatacagaggatggagatcttgatatgcatggttcttaaaccgataatgttcatcctgatgaacaaatggaagagttaactgctgagcaagtgctagagtacacaggtatgactcgtggaagatgttgacgagaagcaaaagagcacagttacagaggataaagatgtcgttgatgatcatttttctacagctgatgatgttcatgcctatgaacagatggaaacgtgacctactgatgtaacaccatagctcacagaggcagattactaatctgctgatgagaatcagcagagctcatatacactgaatggatgcattgaggatgatca

SEQ ID NO: 40990 - DNA, 397 bp, Zea mays
  Clone ID: MRT4577_137383C.1
aaccacaagcgcagccgccgtcacttctgccccatcgcggccccatcctgccgctcgtcgacgaccccaccccgcccctcgaccgcggctaacgccgccagtgtcgcaagcaagctttggtgccgccgccttcacacaggctttgaaggaggtggagcgccgggagcacgaggccgagacgaagacccgccacctgcagggatggcccaagcaccgccatgacccgaggagtgaggatgaggatcccgaggaggtggagtcatatgtggaggattcccgcgaggagaacgcggaggcggtgcccgtagctgtagggaaccggccaagagcactggaaaggggaaggcgcagatgtaccgccacctggtgttccccgtgctggagttcctccaggagc

SEQ ID NO: 40991 - DNA, 1418 bp, Zea mays
  Clone ID: MRT4577_137384C.1
cgggagggagacctaccaattagcgcagctgtagcctctactctctagagggtggcgaaggcggagctgacctgaccggctgacccgcccaacccaacaacctctccgctggccatcttcctcccgggatccctctccctccttcgatccagctcagctctcttcctcccgccccgtactcttcttgatccgttcactcatacttctcgagagaaaaggaagaggattcgatctgttgctaccgctagctgcggtactaacagcagcagcagcaacaggaggtaccgtagaagaagggaagggaatccatgaagagatggggcagcagcggacaggccgccgattccttctaccaggtccgccccgattgcagccaaaacgtccccaacaccaagttcaagatcaaggcggggaagacactgagcgttaggaaatggcatgctgcgttcacgcgtgatggatgcctggatatcgcctctgttctgagccgcatacagagagggggtgtgcaccccacgatcaggggagaggtttgggagttcttgctcggctgctttgaccctgggagcaccttcgatgagagggaccagattagggagcggagaaggatgcagtatgccagatggaaggaagaatgcaaagagatggattctcatgtcggcagtggtaaaatcatcaccgccccgattataactgaggatggattccctattaaggatccgttggtattacttgaggctacttcagacacgcaaggtacttcaatcgcaactggcaacagtggaaatggaattgacgatggtgattgacctgtccctatttcggtcttcctggttgctagtgtcctaaaagagaacagtacaaagcttctgcaagaggctcgagggattgatgacattattaggatattgaataatgttaatggaaatctggacgccaaaagagcttgcgttgttgcactaaagcttcataggaagtatcacaaaaagttgcaggaaaagaaatcctaacatcatatggcgagattgcacgcaacacaacactgggacttatatattgcttgtttctgttcctttcattttcccactcactgtatcggaggaagaaggtggtttacatatacagtcgcgggcgagacctcataaatataagtgacttattgtatctacaatatcaatgatccacgtccacagcctactcaattgtgaacatcaacctagtacatgataatttattcacaatcacaatggacttggcaaatattatcccatcagtatttgtcatgaacctcagtctactctcgtatcatcttaggtttttggatcccttcgttttgaaggaactgaaatttacttaatggagtaggttacttggtttacattctaccacttttcaaaatttaaatacaagtatatctc

SEQ ID NO: 40992 - DNA, 446 bp, Zea mays
  Clone ID: MRT4577_137385C.1
gcttgcgtacttgggtgaacccatatccacggtcatagtactgctatggtgcatgctctataagcagccatgggagtggatgtgctgcttttaaaatctgccaattcacactgtgatcacctgatagactaggccattgagataaatgacgtgtaatttactagatcatgtgatgctatagaatgaattggagaaccacccacacacctggactctatgaactatagacaatattgatgacgaacctttagatggactactaccgtttcagttgttaattacattccgaggtagggactatatgtaacctagcaaaaatgccttgtatcctaccattgaacgctataagatgatgcaaaagtcaattgctgcatgacaggatacatgaatcgtattctctggataacagaaaacggcaagcaaactgaagagcgtgatccacatgg

SEQ ID NO: 40993 - DNA, 1933 bp, Zea mays
  Clone ID: MRT4577_137386C.1
agagggtggcgaaggcggagctgacctgaccggctgacccgcccaacccaacaacctctccgctggccatcttcctcccgggatccctcttcctccttcgatccagctcggctctcttcctcccgccccgtacggccgtactcttcttgatccgttcactcatacttctcgagagaaaaggaagaggattcgatctgttgctaccgctagctgcggtactaacagcagcagcagcaacaggaggtaccgtagaagaagggaagggaatccatgaagagatggggcagcagcggacaggccgccgattccttctaccaggtccgccccgattgcagccaaaacgtccccaacaccaagttcaagatcaaggcggggaagacactgagcgttaggaaatggcatgctgcgttcacgcgtgatggatgcctggatatcgcctctgttctgagccgcatacagagagggggtgtgcaccccacgatcaggggagaggtttgggagttcttgctcggctgctttgaccctgggagcaccttcgatgagagggaccagattagggagcggagaaggatgcagtatgccagatggaaggaagaatgcaaagagatggattctcatgtcggcagtggtaaaatcatcaccgccccgattataactgaggatggattccctattaaggatccgttggtattacttgaggctacttcagacacgcaaggtacttcaatcgccaccggcaacagtggaaatggaattgagaaccgtgtcttggataaacaaattattgactggaagcttaccttacatcaaataggccttgatgttctgcgcactgaccgcaccatggtattttatgagaacaaagataacatttcaaagttgtgggatattcttgctgtctatgcatggatcgacaaagaagttggttattgtcaaggaatgagtgatttatgttcacccatgatagtgctactccacaatgaagcagatgcattttggtgctttgagagattgatgcgtagactgcgaggtaatttcagatgcacacaacagtctgttggggtggaaaaccagcttcagcatcttgcttctatcattcaggtgcttgatccaaagttacatggccacctagaaagacttggcgggggtgactatctcttcgcattccgcatgttcatggtattgttccggcgagaactatcatttggggactccttgtacctttgggagatgatgtgggctctcgaatatgatcctggcatttgctccacttatgaagaggataatactggggctgtggtccacaaaattgaaggaaaggtaaaatcaatacgtcagtttggtaagtacgagagggagaatatgaagaagagggcaaacgatggtgatggacctgtccctatttcggtcttcctggttgctagtgtcctaaaagagaacagtacaaagcttctgcaagaggctcgagggattgatgacattattaggatattgaataatgttaatggaaatctggacgccaaaagagcttgcgttgttgcactaaagcttcataggaagtatcacaaaaaggaaaagaaatcctaacatcatatggcgagattgcacgcaacacaacactgggacttatatattgcttgtttctgttcctttcattttcccactcactgtatcggaggaagaaggtggtttacatatacagtcgcgggcgagacctcataaatataagtgacttattgtatctacaatatcaatgatccacgtccacagcctactcaattgtgaacatcaacctagtacatgataatttattcacgatcacaatggacttggcaaatattatcccatcagtaaaaaaaaaaaaaaaaaaaaaaaaaaactttaaaaaaaaaaaaaaaaaaaaaaaaaaaaaaaactttaaaaaaaaaagaaa

SEQ ID NO: 40994 - DNA, 195 bp, Zea mays
  Clone ID: MRT4577_137387C.1
gggcccggcgcgtggcctggccgacgggtggagtgcggtctaggttttcctcagaatggtgcagattggaatggcggatccactctccggaaaggagactcccgggaaatggtggaggggtttaaggtcatttaacaattggaaacccggccgcctcgaggacccaattcgcctatgggagtcgattacgcgcgc

SEQ ID NO: 40995 - DNA, 639 bp, Zea mays
  unsure (1)..(639): unsure at all n locations
  Clone ID: MRT4577_137388C.1
ccggccgggacatctcatgctggccgatcacacattggacttgcactggtgcttgctcataattactatattcatcagaatacaacaaacaatggtacctaggctagcgtgcctcctagctctggtcatggcagccatcgacgtgtagccgtgcacggaccataactcgccgtaggactactggtacccttacaacgcgtggcgcgccgacgagggtgtcggtgcggagtcctgtgacaacaccgaccccatgtacgcataaagctacgcggagcagcgtcttcgcgactgccagatgatccactccggtgactcctaccttgagaacctcttctggggctccgtcgtcgccaagtggctcctgtgcgacgtcttcgtcctactgagcgtacgacaagtattagtacatagcaccaaccataagctgtctgctacttgagactcgcggtctgtacatctggatgagggggagatactccttcgtgattatctgggctcgcgcagtaatgttctgatttcctgggatgcaaatactctcgtgcttacttcctgacgaatagactccttccttggagcttctatgagactgtgatgactgctactgngatgtatctacgcctatgtgctacttgcggcagg

SEQ ID NO: 40996 - DNA, 260 bp, Zea mays
  Clone ID: MRT4577_137389C.1
aatccaaaagaagctcagctgtttttgctttcaaaggccaaacacctttttaagaggatccgattatactgattctgacacactcggtcttcttcaaaatgcgtcacagctcaagagcttggaatgttttgacaaagtggcgacagtttgtctccacagacccaactgtgttggctgctgcttgcaccatcgttctcaagccctccatcctctaccttatcgccactgctcttgcaccgtctcccatgacaagctcaatg

SEQ ID NO: 40997 - DNA, 339 bp, Zea mays
  Clone ID: MRT4577_13738C.1
gccaaacccaggctccaaagcagttaccaattatccgggagagggggcgcacccattgggccattggccacggccggggggggggccggccttttaaagttgttgggcccgtggccaacccctttctggaaccgggtccccttggcgctgaacctaagggggctggagtccaagaccgtggaggaggacctaaccaacaggagcgacctgttcttggcttccaaccccgtcaacaagctggttcccgtcctcctccacggggacaggccaatttccaagtaactcgacatgggggagtaccttgacaacgctttccccggggttggccaggccgtcttt

SEQ ID NO: 40998 - DNA, 1631 bp, Zea mays
  Clone ID: MRT4577_137390C.1
cattagggggccctggctattctcactttcttagcaaaatcgtaggtgcagatgtgcagccacatgtctgaattgaaggtgcacagatagcaaaattcctaaataagtttttgtctgaatttatgggagctctgtcaggcagtgctttgtatacaaaggattctgtcataattgatgaagtgattactgtgatttgtggtctatgagcttaaagaactactcatattcactttccatacataatagtaatatgatatatggtttatcttcgtccctgattgatccactttcatttagtagaatactattgtatttggtttggaattcgaatatttcacacctttatgaaagtatatgtacaaatttattttaaattcatgggcatgagagaagtaacatgatttttatacagggatgctccttcgttacggaagaccatgcagaacctatcaatcccattgccacatcagctgatattactacttctatggatatgcgtctaatgatgaataagatcaagattgttgagttcatctctgttctactatcaattggtagtgcagctgccaaaacacgactgattcaactaggagcaatcaagcatgctatagatctattttttgagtacccgtttaacaacttcttgcaccaccgtgcgagaatatcatcggctcatgtttggagagtaagcaggatcgactgattgaccatgtccttgatgattgtaaacttgttacaagaattctggaagcagagaagaactctgctctgtcgtcagatttaacgaagcatacattgtcttcagagggaagatttccaccatggataggaattgttggtcatatgacacagatagctaacaggctccttcagctggtcaacaccaacatcatggttcaatcacatttgcaggtttgggttcgatgatcattgtatagagaggaaaacctgctattatttacatgttacagggtctgcaagcaatatcactaattcacttgtaatttgtcatgtacaatgctcaaaataaaataatgtcacctaaactttttttcgcttaattttgctatcttgattctatgggttgtattgagcttcatgtgaagtcagagtttgagcaatatcacccctgaagttcatttgtgattcctgtatccgattaattagtgcacccatcccataatgaagctagctgatccggttagcctgaaatgcaatatgttgttcgttggattctgacccctactgggcgccgctttctactgcagaggaggttgctctcttcggatgcctcaagcatggatcaaaagtcgggctcttcccgggttcatctcccgttcatgcttcacagtcccactgaatgcgtgctgcggaagtgacgctccgtacaactgttccccttcaatactgtgcgggcgtcctggatctacagtttgccctgacccatcaaatacatctcatgggatggtctgcacttcaccgaggcgggttacaaagttgtcatccaaggagtgccaaacctcctctttcagaaacctgcaagggtgcggagttcaaagtttctcaacttcacccatgtacagataatccaataaacaccttatcatacaatgccttgagctcttttattt

SEQ ID NO: 40999 - DNA, 2259 bp, Zea mays
  Clone ID: MRT4577_137391C.1
gccggcctggctttcgaaaaaagggtaaaaaaaaaaaaacgtccctcgaggccggccgggatagagagagccactggccacaggcaggcaggcaggaggacgagtcagcgaggaagctgcctgcttttcagatagttattaagatggcgttgcttcggctgcttgccttctccctgctcttcgcagtggccactcctgtcagggacatcgccgatgatgcctgctcgtcacaagtgaaggatttccagcacctgaacaacagctcggggctccacctgacgctgcaccacccgcagagcccctgctccccggcgccgctgcccgccgacctccccttctccgcggtgctcgcccacgacggcgcgcgcatcgcgtcgctcgccgcgcgcctcgccaagacgccgtcctctcggcccaccttgcttgacgagagccgcgcggggtcgtcgtcgtcgtcccccgatgacgagtcgtccctcgcgtccgtgccgctcggcccgggcacgtccgtcggcgtgggcaactacgtcacccgcatgggcctcggcacgccggccaagtcgtacgtcatggtcgtggacacggggtcctcgctcacctggctccagtgctccccctgcgtcgtgtcgtgccaccgccagtccggcccggtgttcaaccccaaggcgtccagctcctacgcctccgtgtcctgctccgcgcagcagtgcagcgacctcaccaccgccacgctcaaccccgcctcctgctccacctccaacgtctgcatctaccaggccagctacggcgacagctccttctcggtcgggtatctgagcaaggacaccgtgtcgttcggctcgaccagcgtgcccaacttctactacggctgcggacaagacaacgagggcctcttcgggcagtcggcggggctcatcggcctggcgcgtaacaagctgtcgctgctgtaccagctggcgccgagcatgggctactccttctcctactgcctcccgacgtcgtcgtcgtcctcggggtacctgtccatcggctcctacaacccggggcagtactcgtacacgcccatggcgtcgagctcgctggacgactcgctctacttcatcaagatgaccgggatcaaggtcgcgggcaagccgctgtccgtgtcgtcgtcggcctactccagcctgccgacgatcatcgactccggcacggtgatcacgcgcctgcctacgggcgtgtactcggcgctcagcaaggcggtggcgggcgccatgaaggggacgccccgcgcgtcggcgttctccatcctggacacgtgcttccagggccaggcggcgcggctgcgcgtgcccgaggtcaccatggccttcgccggcggcgcggcgctcaagctggccgccaggaacctgctggtggacgtggacagcgccaccacgtgcctggccttcgcgcccgcccggagcgccgccatcatcgggaacacgcagcagcagacgttcagcgtcgtctacgacgtcaagaacagcaagatcgggttcgccgccgccggctgcagctgagaagcgacacctacatacacgcgcatgcacagaccgactcggtaactaaaactaaaacgagcagcgcatgcatgcatctaccgtccggtttcgtctgaaaccatcattaatttcgatcgtccactccacgcacagcaagttctttacggaccttgccgcatatgatatgtacatggtgacaagataaggtacaggagaattgatgaaagaagcgttgccggccagtcgtcgttgcacgagaacaaacacataaattaaaacattattacaggagtagggtatttattgtattgttcaggccagaaaaatatgtggaaagtgggtctttaacttaattcggaagaagcatatagcactccaaaaaaaaaaaaagattcatattcatcacatagccaacagatagcatgtagtagctgttcatgcatgttattcttttggcaagtcctggtcaggaagtactatttactgtgtgtaggacgaataaactgaagtgatgtgtatgtttctgatttctttcgtacttgcaaccccgggcccacgtggtttttttactcccttctatatatactgtggaaaatattgtaacccacgcacaagacacacactcctatgctatatatgttctatgcacaagacacactttgttaacgaacaaagagatcgatgatgcaaatatttatcactataaaaaaagaaaaaaaaaaaaaaaaaagcggcc

SEQ ID NO: 41000 - DNA, 2349 bp, Zea mays
  Clone ID: MRT4577_137392C.1
caacattgggtacatcaaaaccggccgggatagagagagccacaggccacaggcaggcaggaggatcggacgagtcggcgaggaagctgcctgctttcagatagagagagttattaagatggcgttgcttcggctgcttgccatctccctgctcttcgcagtggccactcctgtcagggacatcgcccacgatgcctgctcgtcagaagtgaaggatttccagcacctgaacaacagctcggggctccacctgacgctgcaccacccgcagagcccctgctccccggcgccgctgcccgccgacctccccttctccgcggtgctcgcccacgacggcgcgcgcgtcgcgtcgctcgccgcacgcctcgccaagacgccgtcctctcggcccaccttgcttgacgagagccgcgcggggtcgtcgtcgtcgtcgtcgtcccccgatgacgagtcgtccctcgcgtccgtgccgctcggcccgggcacgtccgtcggcgtgggcaactacgtcacccgcatgggcctcggcacgccggccaagtcgtacgtcatggtcgtggacacggggtcctcgctcacctggctccagtgctccccctgcgtcgtgtcgtgccaccgccagtccggcccggtgttcaaccccaaggcgtccagctcctacgcctccgtgtcctgctccgcgcagcagtgcagcgacctcaccaccgccacgctcaaccccgcctcctgctccacctccaacgtctgcatctaccaggccagctacggcgacagctcctttctcggtcgggtatctgagcaaggacaccgtgtcgttcggctccaccagcgtgcccaacttctactacggctgcggacaagacaacgagggcctcttcgggcagtcggcggggctcatcggcctggcgcgtaacaagctgtcgctgctgtaccagctggcgccgagcatgggctactccttctcctactgcctcccgacgtcgtcgtcgtcgtcctcggggtacctgtccatcggctcctacaacccggggcagtactcgtacacgcccatggcgtcgagctcgctggacgactcgctctacttcatcaagatgaccgggatcaaggtcgcgggcaagccgctgtccgtgtcgtcgtcggcctactccagcctgccgacgatcatcgactccggcacggtgatcacgcgcctgcctacgggcgtgtactcggcgctcagcaaggcggtggcgggcgccatgaaggggacgccccgcgcgtcggcgttctccatcctggacacgtgcttccagggccaggcggcgcggctgcgcgtgcccgaggtcaccatggccttcgccggcggcgcggcgctcaagctggccgccaggaacctgctggtggacgtggacagcgccaccacgtgcctggccttcgcgcccgcccggagcgccgccatcatcgggaacacgcagcagcagacgttcagcgtcgtctacgacgtcaagaacagcaagatcgggttcgccgccggcggctgcagctgagaagcgacacctacatacacgcgcatgcacagaccgactcggtaactaaaactaaaacgagcagcgcatgcatgcatctaccgtccggtttcgtctgaaaccatcattaatttcgatcgtccactccacgcacagcaagttctttacggaccttgccgcatatgatatgtacatggtgacaagataaggtacaggagaattgatgaaagaagcgttgccggccagtcgtcgttgcacaagaacaaacacataaattaaaacattattacaggagtagggtatttattgtattgttcaggccagaaaaatatgtggaaagtgggtctttaacttaattcggaagaagcatatagcactccaaaaaaaaagattcatattcatcacatagccaacagatagcatgtagtagctgttcatgcatgtaattctttggcaagtcctggtcaggaagtaccatttactgtgtgtaggacgaataaactgaagtgatgtgtatgtttctgatttctttcgtacttgcaacccggggcccacgtggtttttttactcccttctatatgtactgtggaaaatattgtaaccgcacaagacacactcctatgctatatatgttgtatgcacaagacacactttgttaaaaaaaaaaaaaaaagatgatgcaaatatttatcactaaacaaaagaaaaaaaaaaaaaaaaaagcggcccacaagacacactttgttacgaacaaagagatcgatgatgcaaatatttatcactatatatatatggctattgttagtttcgtgccttttgcacgagtaaaaaaaaaaaaaaaaaa

SEQ ID NO: 41001 - DNA, 932 bp, Zea mays
  Clone ID: MRT4577_137393C.1
gtgagctataaccaagaagcattgggaacctcgaggccggccgggatagagagccacaggccacaggcaagacaggcaggaggatcggacgagtcggcgaggaagctgcctgcttttcagatagagttattaagatggcgttgcttcggctgcttgccctgatctccctgctcttcgcagtggccactcctgtcagggacatcgcccacgatgcctgctcgtcagaagtgaaggatttccagcacctgaacaacagctcggggctccacctgacgctgcaccacccgcagagcccctgctccccggcgccgctgcccgccgacctccccttctccgcggtgctcgcccacgacggcgcgcgcatcgcgtcgctcgccgcgcgcctcgccaagacgccgtcctctcggcccaccttgcttgacgagagccgcgcggggtcgtcgtcgtcgtcgtcgtcgtcccccgatgacgagtcgtccctcgcgtccgtgccgctcggcccgggcacgtccgtcggcgtgggcaactacgtcacccgcatgggcctcggcacgccggccaagtcgtacgtcatggtcgtggacacggggtcctcgctcacctggctccagtgctccccctgcgtcgtgtcgtgccaccgccagtccggcccggtgttcaaccccaaggcgtccagctcctacgcctccgtgtcctgctccgcgcagcagtgcagcgacctcaccaccgccacgctcaaccccgcctcctgctccacctccaacgtctgcatctaccaggccagctacggcgacagctccttctcggtcgggtatctgagcaaggacaccgtgtcgttcggctcgaccagcgtgcccaacttctactacggctgcggacaagacaacgagggcctcttctggcagtcggcggggctcattggcctggcgcgt

SEQ ID NO: 41002 - DNA, 295 bp, Zea mays
  Clone ID: MRT4577_137394C.1
ggactcactataaaacagatgggaaagaaagggatgttactaaatggactcagaacgtccgtacctgggcataccatatcccttgcgtaccagggcaaaggccaatcccccttcaggccatattgagtatggcactacatgcacagagcatactttatgtgtgcaaagatacctataattaccgtggtaaaaattagagcagataacacagcacagccttttctttcccacttttttcaaacagccgaactgcccttcaaatgatcacacggcaccgtttgaggtctatgagtgc

SEQ ID NO: 41003 - DNA, 463 bp, Zea mays
  Clone ID: MRT4577_137395C.1
aggggatcgacttcatccattaaccaaattgacataataaccctaggaaaaactatttttattcccagctttttattaaccctttaaaccggggatcttaatttcttgatttactggtttatctaaaacgatcatcacaatatacccctgctaaaataaaaacatttattgggaccaacaattttatttataaacctagttgactggaatacaaattaacttacccttatgacatctgacttgaaaccaccaaattgacgacccctttcaactcaatatttcacccaaaaagggggagggctgcgtcaaatccccctttttttttttccacatcgaaaaatttccggccgcgtactgatttattttcttctacgcctaatcttttcaaaacttcccgttgaccaggatgaccatccaccacttgtttgagcttttgtcgaacccttggggaatataacccggc

SEQ ID NO: 41004 - DNA, 421 bp, Zea mays
  Clone ID: MRT4577_137396C.1
aaaccccccggggggggggtcgaagggggaaatcccaccacacggggggggggttataggggttcccggtttggaaccaattttgggttaaaattggaaaaaattttttcctgggaaaaaatggtttccccccaagttcccccaaaaatagaacccggaaaaataaattgaaaagcctggggggcccattggggggcccaaaaaaatttaatggcggggggctcaatgccccttttaaaaagggaaaaaagggggggccagtttttttaaaaaatcggcccaaccccgggaagagggggtttgctttttgggcccttttcccctttctggttaaaagaacttaagggccggaaaagggggttgcggggaacggttttaattctctgaaagggggttttaaggttaacccaaaaaaggggga

SEQ ID NO: 41005 - DNA, 344 bp, Zea mays
  Clone ID: MRT4577_137397C.1
aatggggggccccattccccttacgagaaaaaaagggaacctaaatcacccatcaaaacaaagcaccgttgagccaagttttgtctaccccccggaccgggcccaaaacttgggacgtggcaagaagaagcccatcccctccccctttattaaatattaaacgggcctgccatttaaaccccaggttgaacctggtccccaaagcttgggggaacaatttataattgggtggggaggccctttcccgggttcaaccaaaaaaggtaggagcctacactcccttttattcggagggcgcgggagaatttctgagaaaggcccccccctggggaattcccgggggg

SEQ ID NO: 41006 - DNA, 321 bp, Zea mays
  Clone ID: MRT4577_137398C.1
tttttctcttttttattctttcttctttttttttttttcttttttttttttttatttttttttgggctttttttttttttccccgaaacggagcgcggcatcgcacatccgcccccataaccccattcactggtttctacaaaagacaccaccaccgggtgacccaaaacacatggggcgccaacaacgcgaccttcccttcaacaagccgaaacagagtcacagacagacatcattggtgcaaacgcaggaacacaagccccgtccgtccaccgggagaaacaaggagatccatttccaccccacccgggcccatccatt

SEQ ID NO: 41007 - DNA, 460 bp, Zea mays
  unsure (1)..(460): unsure at all n locations
  Clone ID: MRT4577_137399C.1
ctgaactggtcgcccggtctaatncatgtgtttaaccttagtctcgattatcttgggtctctgttaacagaaaaccctctaccccacattgcaattaaagtgtccctcatctaaacacttgaacatgacatcatagatccctaatttgagtttgttcaattttaaacaggcacccttccagccacctgatccaaatcacctccttccttgggaggggaggcgccgtccacccttggaatcaacattaatgcttcccatttcttgtcgtttttgtaggatgtctgtacataagcccccactgtttttgcaaaagtgggtgggtcattacccattcctttggttgccaccaaaaattttctggaaacccactgagaccaatgcctttgatcaggctgacttttccttgctacaaatgcagccctgatgtaccacctgccagggtcataaggggggcgctcct

SEQ ID NO: 41008 - DNA, 743 bp, Zea mays
  Clone ID: MRT4577_13739C.1
ttttttttttttttttcccaaagaaatgaaagacatttatttcaaaatttccttactgtataaaattcaaaaataaaaattgtcgagagtacaggatcgtagcaaggataatttccccatgctaaactgtagcaatagtcaaagagccacgtaggaaaataaggaaccatcaggttttctgtatatttttctttatagtaatatgggtgttcttttcttcacgccccgtacgccatcagttctggaaccagcgcagctgccaaaaggattttgtagtgtacactcctgctacggcagtgccagctttcaaggatttgttgagtcgattacacaggccaactatctggtttacaaaatcctagcttctgacctcacagataacatggtaagttgcttactgcaggatggttgcacagaccaactatcttggagatatccatagactaaactggtaatctgacgaacccgagccaatgccttcgttgccgtcaaactcatccaatccaatcaactcttcgatccgactcttcttatccgctactttttggacgcctgctgcttcaatcttcttattactagatcgatctgcctgcaactgtggagaggtaatctttcttggaccaccgagtttcaagtgaggcggccttcttttctgacagatgctcggcatctggtgatgactgtaactggagggtgcagatgcttttgttaacctggaggcaactgcagccgtcttctcgtgc

SEQ ID NO: 41009 - DNA, 557 bp, Zea mays
  Clone ID: MRT4577_1373C.1
ccggccgggagtggtcccctcaccccaacacaacgaggacggatatattcctgatcactactcttgccgctttgcagcaccagcgacgaagatatgtggaggcttctttgtgacaacctcagataggaccaaggtgaataaacagatatcccattttgttctgtaaccatgaactccctgtacgacgtctcctgcttctccgctgatcttgctggcaaagtcttcgccctcgccctctacctgtaggcggagtctatcttcaagaggtccctcaagggaatagcctatgaaaagttctatgggctgttcgtacgtggtgaccctgctcgactgcagcatactgactattgaaattactcatcagcttgacagatgtggattggcatcgcatgatgagaatattgtgtaccacaaggcatatgctcctttgctagctctggttctgcatcctctaaaggcacagcataaccactcaattcaaggacgagatcactaatggtcgtgacaggactgatgagataacctcataaacatgccatctataaaattccttcaat

SEQ ID NO: 41010 - DNA, 200 bp, Zea mays
  unsure (1)..(200): unsure at all n locations
  Clone ID: MRT4577_137400C.1
tcgggccaagtcgcggggctgttggcggggcaaattaggcagcaactttccgcggatttgtggctttcaaaaaccatttattgccctacctgtttgcgggtgnnnggaatgagaactatggctgagatagcgtggtagnnnatgtgagtatttacgggatgatggtataatggtacgcataccatggggaggcattgtat

SEQ ID NO: 41011 - DNA, 1545 bp, Zea mays
  Clone ID: MRT4577_137401C.1
cgccccagcccagcgatcgccggagcccgggcctccccaccgctcgcgccggcggtcgccgatcatggccaccacccccgccgaggatccggagcctgggctacctcctcccaaggctctctgcgagcagccgcggcggcggcgcccgtgcgtcctccttagcttctcggcagcgcgcgaccgcttcctccggggccggttcctctcggcgggcctgcgccccttctccgtccgcctcccctcgccggccggcaccagcaccgtcgtccacctctgggcgccgccgcggtccgcgcggcggcccgtgctcctcctccacggcttcggcgcgtcggcgacgtggcagtgggccccgtacctccgcagcctcctcgcggccggcctcgaccccatcgtcccggacctcctcttcttcggcgcctcctcgtccacggtccccgaccgctccgacaccttccaggccaggaccgtgaaggccgccatggacggcatgggcgtgcgccgcttcgccgtggtcggcgtcagctacggcggcttcgtcgcgtaccggctggcggccatgtacccggaggccgtggagcgggtggtcctcgtgtcgtcgggcgtgtgcctggaggagggggacctcgccgcgggcctgttccccgtcgccgacgtcggggaggcggccgagctgctcgtgccccgccggccggcggaggtgcgtcggctcgtcaagctcaccttcgtccggccgccgcccatcatgccctcctgcttcctcaaggattacatcaatgtgatgggctcagaccaccttgaggagaaggccgagcttctacacgctctcatcaacgataggaaactgtcagatcttccaaagataaaccagccaacgctgatcatttggggggagcaggatcaggtcttcccaatggagctggcgcataggttggagaggcatcttggggagagttctagattagtagtcgtaaaaaacgctgggcacgcggccaatctagagaagtccaaggaggtgtgcaagagcatcattgactattttcaggaaccgggttcaagtgattgagttggggggaaaggaggtgaagccacaatgtgacggttggaaattctgagctaggacatcgtcctgtgattggcccgcagttttgccgtttccttggcaacttgtaattgtaacaaaagaacctttgtaatcacacggaccatacaagtctcctgtaaattgtctgagggctttctgcgctcaaagaaacacactcctgagctgtgaaattgaagaaggtagaaggctgaggtcctgttcccttgtccagccaatgccaaatgccactggaaaacggcctccaccgcaccaatctcgtcggtttttaatgccattttgatcatatcaatttatgatcattctatgctcaatgtaggattcagtaccatcatatataacacttagtttatctgtaaaatagaaacaacagccttattattgtaatgcccccataaggtacagtaggctcaccccctccccccgatatggttgaaggatgt

SEQ ID NO: 41012 - DNA, 249 bp, Zea mays
  Clone ID: MRT4577_137402C.1
gggttgggtttttttttttttggaaaaaaaccccaaaaaaatttaaagggggtttgaaagccctaaaactaaaaatttgtttcctaaaaaaattcttttaaaattagcctcctaacaaaaaaatagctttctattaaccaatttactttaaaaaagggaaaagttaaacctttaaataaggggtttggatgttcaactaattttaagcccctttagctttagcccattcaaacacccttttaaacccaa

SEQ ID NO: 41013 - DNA, 1820 bp, Zea mays
  Clone ID: MRT4577_137403C.1
ctcatgcaggcagagcagaaacactgcccacgcgatccggcctgatggtgcgatcccgttccctgtcgccatcgagttcgttttttcgttgcttgacagccttaaagcggcgcacgaatgccacgagccactgaggcggcttcccagttcactccaggcccagggcgcccggtcgccatgaactcccgctcctcctccggcggcgtgcggtccgagagctcgctgtcgttgggggagcgcctctgcgcggtcttcttccccgtcatcgccatcgccgaggccgttttcttcgccttcaccgactgcctcgcggacctctgcaccgactccggctcctcgcactcgcgccgcttcggcgcgggcgcgtcctcctccgccgccaggaacagtcggagcaaccattgccagccccaccacagacctttcctacgccgcgccactgcgggtggatggacctcccccaacctccgccagctcgcacgcctcgccgacgagtcccgatgcttctcggtgaacgaggtggaggcgctctttgagctctagctctttatgctctacaagaagatcagctgctccatcatcgacgacggcctcatccacaaggaagaacttcagctggcactgttcaaaactccaagcggcgagaatctttttcttgatagagttttttatttgtttgatgagaagaaaaatggtgtgatcgagtttgatgagtttattcattccctaagtgtcttccaccccttggcaccaattgaagacaagatcgattttgcatttaggttgtatgacttgagacaaactgggtttattgagcgtgaagaggttaaacaaatggtaattgctattttgatggaatctgatttaaaattatcagatgacttactcgaggccatcatagataagacatttgaagatgctgatgcggataaggatggaaaaataaataaagaggagtggaaggaatttgcgttacgccaccctaacctgttaaagaatatgacactgccttatctgagggacatcacaaccgtcttccctagtttcgtcttcaacacggcggtggaagattagtcgctccaattgaaggcaataaagcagtactggggattgcttgaggtgcacaaggttcctgaaacctgacggctgttggtcgccttcaaccactgagaatccgatgtgttctgagcatcaaggcagccgccacctgaccatcactcctgctataaattataatataaacgataagcctcacgtccgtccggccgatcggcgcccggtcgttacctgatacccgctcctcctccggcggcgtgcggtccgagagctcgctgtcgttgggggagcgcctctgcgcggtcttcttccccgtcatcgccatcgccgaggccgttttcttcgccttcaccgactgcctcgcggacctctgcaccgactccggctcctcgcactcgcgccgcttcggcgcgggcgcgtcctcctccgccgccaggaacagtcggagcaaccattgccagccccaccacagacctttcctacgccgcgccactgcgggtggatggacctcccccaacctccgccagctcgcacgcctcgccgacgagtcccgatgcttctcggtgaacgaggtggaggcgctctttgagctctacaagaagatcagctgctccatcatcgacgacggcctcatccacaaggttttttatttgtttgatgagaagaaaaatggtgtgatcgagtttgatgagtttattcattccctaagtgtcttccaccccttggcaccaattgaagacaagatcgattttgcatttaggttg

SEQ ID NO: 41014 - DNA, 1040 bp, Zea mays
  Clone ID: MRT4577_137404C.1
gggggggtgttttttttttgataaacaagggcttccattgctaatgacatacatgcatgttcacaaatcttgggctggatttactttagagctaagctgcaaatttatttccaggtatttacaatgttctaagttccttgtggacgacgaaactaggcaccggtgggatatgatacgcgcgactgcatacactagactgctgccctccaaagggaggacgcgtcggccggcgcgtgggctgggactccacttgggagctgttctgctcgggccaacgggagtgcacaccatacaaaggaaggccggagctgacgtgcctcggggactcccgcttctcctccgcacgcggtgtgcggtccgagagctctgcaccgttgggggagcgcctctgcgcggtcttcttccccgccatcggcagcggcgagggcggtttcttcgccttcaccgactgtctcgcggacctctgcactgactccggctcctcgcactcgcgccgcttcggcgcgggcgcgtcctcctccgccgccaggaacagtcggagcaaccattgccagccccaccacagacctttcctacgccgcgccgctgcgggtggatggacctcccccaacctccgccagctcgcacgcctgcggcgacgagtcccgatgcttctcggtgaacgaggtggaggcgctctttgagctctacaagaagatcagctgctccatcatcgacgacggcctcatccacaaggaagaacttcagctggcactgtccaaaactccaagcggcgagaatctttttcttgatagagttttttatttgtttgatgagaagaaaaatggtgtgatcgagtttgatgagtttattcattccctaagtgtcttccaccccttggcaccaattgaagacaagatcgattgtatgtatgctaactgcagaaacggtggtcaatataataataatatggagggtttttttatatttatatttgcagcatgcatttcgtgtggttcagttgcatttagggtgtatgacctgagacaaactggtttatt

SEQ ID NO: 41015 - DNA, 2118 bp, Zea mays
  Clone ID: MRT4577_137405C.1
cgtcctcctccgccgccaggaacagtcggagcaaccattgccagccccaccacagacctttcctacgccgcgccactgcgggtggatggacctcccccaacctccgccagctcgcacgcctcgccgacgagtcccgatgcttctcggtgaacgaggtggaggcgctctttgagctctacaagaagatcagctgctccatcatcgacgacggcctcatccacaaggtgcatccaacaaaatccctcttcgattccctgtatctaccgtccatattcttgtcattcatgacgtgatttggggttaatttgaacatctatttctttgagtgaagtatttcttgctgtacttggaagatgcgattttttttgtttttttagcctgcggacaattgcctccttggctttaaatatggaagaaatagttacataagacctgggatagtgacactctgtcatccccgcatgattgacgagtatattaggccattgagggcgacgtgcaatttagtacacaaatccatctttaattttgcagggcatgcagtagattggattattttctggtggcttgatcggtcataccaatgtaatattcttctttttgggttgagcatgtgatgtcatgttacaagcaaatatgacagcagcaatttttgtatgtgtgtgatgcggttcaaaatcagagaaatatttttcagccttacattttcagcagcatcttctatgtgtgctgtgtgcaaatagtccaattagaaaataaaatatgaatgtccttgctttttttgtatgcaactagacgaatggccaatgtcatattaatttttcttaaccattccactgctggatggttcttcaggaagaacttcagctggcactgttcaaaactccaagcggcgagaatctttttcttgatagagttttttatttgtttgatgagaagaaaaatggtgtgatcgagtttgatgagtttattcattccctaagtgtcttccaccccttggcaccaattgaagacaagatcgattgtatgtatgctaactgcagaaacggtggtcaatataataataatatgtaggtttttttatacttatatttgcagcatgcatttcgtgtgtttcagttgcatttaggttgtatgacttgagacaaactgggtttattgagcgtgaagaggtaagctcgcaaagatgttctgtatctatgcataccttttatgtggattcttttctagtaaagtggttaattgccctgccttgccttataggttaagcaaatggtaattgctattttgatggaatctgatttaaaattatcagatgacttactcgaggccatcatagataagacatttgaagatgctgatgcggataaggatggaaaaataaataaagaggagtggaaggaatttgcgttacgccaccctaacctgttaaagaatatgacactgccttatctgaggttcacctccgatctcctgatctttatgaaaagtaggttagcctgatgtcctgtcaaacatattaatatgtgcagtctcttgcaaaaaaaggaactgcacagaaaaaaaaggggtgatgcgtaattacaaggcagaacttcaggagagcttactttgctgccttttgtttttttgttaacgcaataattgctgattccgtggtccttaaaaatccagggacatcacaaccgtcttccctagtttcgtcttcaacacggcggtggaagattagtcgctccaattgaaggcaataaagcagtactggggattgcttgaggtgcacaaggttcctgaaacctgacggctgttggtcgccttcaaccaccgagaatccgatgtgttctgagagcatcaaggcagccgccacctgaccatcactcctgctataaattataaggctcatccggggtggcagatcggcagcgggaacttacctgatataatttcttgctgccgtttttgcgcagcaatggattgagagttggtagctgtagatacatctagcttccattctgtacgtagggatccaggaactgtaaatacgttctatggaattgtatcggaaagttcctagtacgccagccagatctagaataagccagagcttgtttcttgccaaaa

SEQ ID NO: 41016 - DNA, 296 bp, Zea mays
  Clone ID: MRT4577_137406C.1
cccccccccctttttttttttttttttttttttcaaagaaagcttatgaaacaattcttaaataaaggtgctaataagctttgtggaaaaaaaaaatagtgttcgagtccttagtatagagggtgctcttagatgtcagatttctcctgtccgactaccatgagtttaatgaatttggtgctgatggaggaccatcagctaaagcccttcggaccaaattcaacgtgtttgtcaaaaaatgtatctgctcatctgggagtagcttgtgccacacatttagttgaaacatgtgattg

SEQ ID NO: 41017 - DNA, 212 bp, Zea mays
  unsure (1)..(212): unsure at all n locations
  Clone ID: MRT4577_137407C.1
cttgagaattatttttattnncgagnnncagaccaaaagtggggtaaatcagaaagggtgtgctaagaaaaaaaaagatgcagaaaaaaaaggatacaagcgttcgaccgttcaagagaaacaaacgtaaccaaatattggggtaaacagcaacagcaaatacaatgtaaaataaaaaaaatcaagctatttaaaaaacagggccaagaata

SEQ ID NO: 41018 - DNA, 533 bp, Zea mays
  Clone ID: MRT4577_137408C.1
ggccgcgaagaaggctagcgcgtggatgtcgaggaagtaggccgcaccgagcgcggcgcacgcggcgccggacgcgagcatggccgtgccgaggaggcagcggaggtcggcgcggtcggcgaggtggccggcggcgaacatggcaagcgcgtagaatgagaggaaggcgacgtcgagttcgccgaggcggtgcgggccccgggggcccgagaaggggacccagtccgcggagagcacggctttgacgatgctgggcggcttgcgggaggcgtggaacgacgcgtaggacgcgaaggtgagcgccagcaccgcgtactcctgccgcccgaggccacgcgcgggcgcgggcgccgcggcttccatcggagcggcggatgctagttaggaggtaggtttgagggcatgggagggaaggcggaggttgagatctggcaacgagggagacgagtaaacactttttttttccggccggcccctcagtttcacagtacaggctatctggatgtgccttacgcgcgctcactggtcataca

SEQ ID NO: 41019 - DNA, 701 bp, Zea mays
  Clone ID: MRT4577_137409C.1
ctcaatcagaagccggtggcaaagattaggttctaaccgttatgcgctccagttagcaggatcgaagatcaacagttacagtttaacgaaacacagatctaatcctacgtgcccgatccgaatcgaacggcaccgatttattgtgtgaagggggtatacatcttgtaatcctagccgccgttagctgattgaacgaccatgatttaaaatacctagattaattctcgtgcgttcatcaaagatctactatcctgattcactctcctccccgacggccgacagcggcggtggcgcgcgcatacctgcggtagagccatggctagcgcgcggccaacaccgattccgacccacaacttcgagaatttatgatgcaacgtgagtaggaggtcgaggcgaacaatatgggtggggaaattttaccaaaggagacggtgggcgcaaggctgtcctcgacgtcgcgacggaaatgacctccggcgagaaatccccagtaacctcgtgcttttccgaccaccgcaaaccacactcgtggacaacgaacctcgacgacacaccctagcccctttaatttcaccgagtagcacgcagtcgtgagcccgaggcggagccgccaagttcctggcagaaggacatcctttctctctctctggaaatcgacgactgaggaacggcgaaggaatgggatagaaggccatggcgca

SEQ ID NO: 41020 - DNA, 327 bp, Zea mays
  Clone ID: MRT4577_13740C.1
ctcactcatgtggcgacacggttattcctgcaagcgatccatcagcatgaacgggcgctctctatctttgtgttatcacagccccgatagttgatcactcgcaccgtgtaaaataaaataaactaggttaaccttgattggctaataatgactctgttattatggcctagccgcaaacatagtgagagaagcactccgtggcgaattttgaagaatgaactccgtctgctttgtttaccacctgtgagtgtattctgttgtacatcgtaacagacgcgcacttatttgaactaagtttaatactatgaccattcttgtaatatactt

SEQ ID NO: 41021 - DNA, 381 bp, Zea mays
  Clone ID: MRT4577_137410C.1
gggctccaaaaatctttggagggatgctttttaattatgagcaacgtttttacaaggaataagatgcgaatacatcaaggtaatatcattatttggggccctccaacttatgaatgaataaatagggcaagggggtgaccaccctgcttgaccacaaggggagtctggggaaattcctaagcatgggtacttggtgaggaaacattgatacaggccgggctgggattgggaaatgggtttcaaaattcagggcgatgagcgcctttcggatagcttctccctcccggacttggtgaaaattgcggccagccctggggccatggcctggttaaattggtccgccatttggctaaacacacgtttgccgacgcctttgatgat

SEQ ID NO: 41022 - DNA, 199 bp, Zea mays
  Clone ID: MRT4577_137411C.1
acccttccggttttaaatcggaacaggccccccttgtttttttgtttggccatttttataaacctccctggttcttaaccaatctttcaaggcgcacataatcggcttcataatgcctatgcgccaccaccaaacctccaccaaggggttggccccttttttaatgaggaacttgaggtgtttaaggaagggccccggg

SEQ ID NO: 41023 - DNA, 190 bp, Zea mays
  unsure (1)..(190): unsure at all n locations
  Clone ID: MRT4577_137412C.1
gtgagcagcggcggcgcgcctatccaggcgccggacctccggaactgccacccgcccgacctccccgacacggcggaggacgtcaactgctgtcctagtccggggaacgangaccgctgcccccgcgcccgcgcaacgtgnggcgggcggcggctatcgcgacgcacccctagccgggccgcgcgccccc

SEQ ID NO: 41024 - DNA, 501 bp, Zea mays
  Clone ID: MRT4577_137413C.1
agaggatccaacccatacttgacacttgacactgaccgtgactctcagccaggacggcggaggtagcatactgcataccagcgcgaacgtaacgcgcctgatctcttattgttcattccaaacaacccactcactaacaaccaccgcctcaagaatgcaccactgttattacccacaggccccaacgctgcccaatgtgtgcggcgttcgttccctactcacctggcccccaactaattcgaaagcctcgtcacgccccccacaagcacacaattcactaagtcactcacaggccactcacaggccgtctcgtactcatttcgcgcccttggtggtgagcccgaagccgaacgggaagagcgggtcgtagtgcttgtcgcccacgttcatgggcagctggtccaccgacttgaaccacgtccgcgacagcttccccgtgaacccgtagtcgccgaacagcacgttcgccacgccctgcccctccgaccccggcagccacgc

SEQ ID NO: 41025 - DNA, 378 bp, Zea mays
  Clone ID: MRT4577_137414C.1
ccagagcatcatcaagtccatccagaaccgtaccatcatccagtcctctcagaacgccatccagcaggtacggaatatcggccctgctcagctcgccactggtggtgttatcgcagctgaggtcctcggctttttcaccgtcggtgagattattggacgatttaagcttgttggctaccgtggcgaggcctcttcccaccactaaatgtgtctcttgtagtaggtgcagaagttgtaaagattgatgagtgccgggcgatgtgataacaaataaggatgggtgggctttagacttggttctcccctgccgaggacgcctgaaaagggctggttggagaccgtctgtttgggggggagttgaaaactgggagacctggg

SEQ ID NO: 41026 - DNA, 224 bp, Zea mays
  Clone ID: MRT4577_137415C.1
gccttgtccgggatgctgcccagcgtcgacgcgcacacgtcgcggtgcagcgtgcccgcgcagtgccgctccacggccgccgcgtgctcggcgccggcgctggcacggccgtcgtcctcgagaaggacacgcttggcggcgggcgtcgaggccgcggagacgacgccggagaatgccctgtgggtggcgacgaagccgagcggcaggaggaggagggagaggaa

SEQ ID NO: 41027 - DNA, 1378 bp, Zea mays
  Clone ID: MRT4577_137416C.1
aaaaaaagtttgcaccgtaccacaaaatgcgaaggccgcccaaggccaagcgagtggcggcggcggccaagcttcccctccccctcaccgccaccttcctctccctcctcctcctgccgctcggcttcgtcgccatccacagggcattctccggcgtcgtctccgcggcctcgacgcccgccgccaagcgtgtccttctcgaggacgacggccgtgccagtgccagtgccagtgccagtgccaatgccaatggcagcgccggcgccgagcacgctgccgccgtggagcggcactgcgcgggcacgctgcaccgcgacgtgtgcgcgtcgacgctgggcagcatcccggacctggcgcggaagccggcccgcgaggtgatctcggccgtggtggcgcgcgcggcgtcggcggtgcgcgcgtcggcgtccaactgctccgcgtacctccggcggcccgcgggggcgctgcgggtgcgcgaccgcctggcgctggccgactgcgtggagctgctggggcacacgctggcgcagctgggcacggcggaggcggagctgtcggcggggaacttcaccgcggcggaggcggaggtggagtccgagtccttggcggcggtccagaccgtgctgtcggccgccctgaccaaccagtacacgtgcctggacggcttcgcggggccgtcggcatcggaggacggccgcgtccgtccctacatccagggccgcatgtaccacgtggcccacctcgtgtccaactccctggcgatgctgcggcgtctcccgcagcgccggcggcggcgccagggcagaggggcactggagctggaggggtacgggcgcgtgcggcgcgggttcccgtcgtgggtgtcgggggcggaccggaggcggctgcagcagcagcaggtggtcccggggccggacctgtggtggccaaggacgggagcggcaacttcacgacggtgggggaggcggtggcggcggcccccaacaacagcgagacgcggttcgtgatctacatcaaggcgggcggctacttcgagaacgtggaggtcgggagcgagaagacgaacctgatgttcgtcggcgacggcatgtggaggacggtgatcaaggccagccggaacgtggtcgacaactccaccaccttccgctccgccacgctagctgtggtcggcacggggttcctggcgcgcgacctgacggtggagaacgcggcggggccgagcaagcaccaggcggtggcgctgcgcgtgaacgccgacctgtccgccttctaccgctgcgcgttcgcggggtaccaggacacgctgtacgcgcactcgctgcgccaattctaccgcgactgcgacgtgtacggcaccgtcgacttcgtgttcggcgac

SEQ ID NO: 41028 - DNA, 340 bp, Zea mays
  Clone ID: MRT4577_137417C.1
aaagcccccaaaattaacgctgcaactttcattgctgcgaaagcagggcattattttatttcattttattatttttgcaagggggcagggtttttttcggggaaaaggaaaccgtccttttgaccaatgggcagcacctagatgacttgcacaccctggttaataatttacacaccacctcaacatgccaacgggaacgtatgcttggaaccttagttttttacacaatcaaagtagagaccctccgagttactctccacacctttttttttcttctccaaaaaaaaccggcccccccccagggaccctttaaaaagtggcataggcccgcaacggagct

SEQ ID NO: 41029 - DNA, 129 bp, Zea mays
  Clone ID: MRT4577_137418C.1
gtgggtttagctaataatttttataaaaccccacagcggggactatgaacaactacatatctcccaaagaaaatatgcattacgacatcctaccctacgatcctacttcacatatccacctcccacaaa

SEQ ID NO: 41030 - DNA, 204 bp, Zea mays
  unsure (1)..(204): unsure at all n locations
  Clone ID: MRT4577_137419C.1
gggtagaggaaacgccctgcacagcacgactcctccccatntaccgctacctttctacctacncatntagnacccctcgntcgnaaatcgnaatggcgntggccaccaactccgccggagcagccgcgnccgcgtccggcggcgcggnatcgnagccgcgacgcgcggccgtgttcctcccgctgaagaggcgcaccatctccg

SEQ ID NO: 41031 - DNA, 218 bp, Zea mays
  Clone ID: MRT4577_13741C.1
tctcacataaccgtagtcactctatagctattactttcaacaaaccccaacttcctttagggactgattcattatataaaaggctgacgcattctctgccctccgatcctataattcatgataacttgaccgatcacactgacttcatacctataactcatcattcaaattactgccctatcaactttcaatggtataatatagccctaccatattat

SEQ ID NO: 41032 - DNA, 448 bp, Zea mays
  Clone ID: MRT4577_137420C.1
gcccgggcagctaaaactatggcatggtctttattaacgctatctgcaaacatctcaatcttgtcccgtacaaaacagggctgattacacgttaaagtaccagccatgttgaagaggattacatccacacttgctagatcttcaagtgcaactgttccccggctagcaatccccagaaaacaaagccttacagatcccaatgccaatgccaggtaaaaaaaagtaggcattgccatcgggattccaccaatcaatggcataaaatgggcgtcgagtggcatgcctctgtaattttgtttttggaacaaaaatcttaagactatctcagcaaaagtgccaacaagtaccagggaagcacagaagcagccagtaagcatggctccttctttaagctgcccaggtcgagcataacgttgtgggtagagccgcaatgtacttctgggaatgc

SEQ ID NO: 41033 - DNA, 1040 bp, Zea mays
  Clone ID: MRT4577_137421C.1
gggataaagtgccgaagacgaggaccccgtcttttgctggcacggcagtcgccccacccgcagggcctcgcgcagtggcgacctcgggcttcccgccggccggggccaagtcaaacgtccccagcctcctaaaatttcccctttccccaactaacacgacaccccccttcccttcctccgatccccccgcctcccccaaaatccgacgcgtaatcgccgccatggccgccgccggcaagctcctcctcctggccgccgccatcctggcggcttccttcgtcgccgacgcgcgcccgtgcggccacgcgcagacgctcctcgtctccttctcctccgtcctcaggccgaacccggaccccaccaacccgacgccgctcaccaccacagtcgtcaccgtcctccgcgtccggcgcctcggcccgcaccagatccgccgccccgtggcgctcccctccgtcgagtcggaggtcgccgcctcgtccgcccaggaccgcgccaaggacatcctcgtcgtcgtctccggcctcctcttcggcttcggctgcggcgccctcaccgcggcgtccatgtacctcgtgtggtcgctcctcgcctccacctgcgcctctggatacgacgacgacgtctacagcgacgacgaggaccggctgtccgactccgagagccccaagaatgccggctacgtcatcatccacgacgctgacgagtacggcgccggtaagaactagggctggggatccgtcttcggtctcgccgggggtcagcagaaggattttcgtaataacatttgcatgattgcttggaaatgtgcagtatactctatgcacctttttaatcatgtgtgtcgcgtctgtcggtatgtatgtcgtctgggggaaaggaaatttaaattatatgaaatgaatatgctgttgatgtgtcaaattcaaatggtacttgcgctgctaccgcaaaacatggatcttattggctgccacgatatacaaaaaacaaaatcatggtgttaaaaaaaaaaaaaaaaaaaaaaaaaaaaaaaaaaa

SEQ ID NO: 41034 - DNA, 376 bp, Zea mays
  unsure (1)..(376): unsure at all n locations
  Clone ID: MRT4577_137422C.1
nnnnnnnaatantttcccaagggaacgggggaaactgggggggaatctacaaaggggtgaggcagaggcatttagaaagcctggaagcgcactaacccccctccacccatgcagggaggaagcacggggaagctacaaaaggtgcaaacaaacacaaggtacgtggagggcaatgccctaaaaagctcggacgtattggcccactgagatcatgcacaatgccatttctggaggccccgaagcaaaatagcccgccccctcatctagaaaaaaaaaggacaatggggcaagttaaaaggaaaaaccaattgtgccagagtcacgggtgtctgcgccagcactgtcagacagaataccttggccggacactgaccag

SEQ ID NO: 41035 - DNA, 484 bp, Zea mays
  unsure (1)..(484): unsure at all n locations
  Clone ID: MRT4577_137424C.1
aagctttttttttnnttttttatttatttgttttttttttttttttttttttttttttttttttttttttttttttttttttttttttttttttttttttttaaattcccggcccgtgcatgggggtacggaaccaaaccaaaacttggccaaattataattattcccttttccaaattaaaattgttttaccttttaaaatttttattttttcaaataaaaaaaaaaaaagggaaaaaaagaaaaaaaaaaaaaaaaaaaaaaaaaaaaaaaaaaaacggacaaacaaaaaaaaaaaaaaaaaaaaaaaaaatccaaaaaaataaaaaaaaaaaaaaaaaaaaaaaaaaaaaaaaaggccaaaaaaaaaaaaaaaacatttaccccttaagagaaaatgtcttttaatcccttcccctttcccttccttcctcagttaaaaccaacgaaaaggtggttaaacgcgtggagccagaattcccgg

SEQ ID NO: 41036 - DNA, 149 bp, Zea mays
  Clone ID: MRT4577_137425C.1
aagtgaatagcatgtattaagtgccggtttttagccattttttttaactgcagaagataccacctgaccatgactggtgaaaagtgggaaatcacgaacagtgctgggcacaaacgtagccaagctggaagaaacattcttgtttaggg

SEQ ID NO: 41037 - DNA, 862 bp, Zea mays
  unsure (1)..(862): unsure at all n locations
  Clone ID: MRT4577_137426C.1
ctcgagccggccgggccggagtcgctcatttctgttctcctccccagccgccagaatagtatccagccgccaggaagcatggccgacggcgcccttctcatcctttctctgtttctgttcttgcactgccaggccgtgccctttcccactggtgatggcgagtagctcaactggcccttaccgccaacgagtgcgtccccatgtgagggtgcgcggtcgtcggtcggtggccggtgagagctcggctagcccaaaaaaaaacaaaaatatgtcggccatcgccttttgaaccttgcccgacgaccaaaaccggccgcctctcctctctgttcatgctctttctaatctctgtttctaagttccagaccgctcacccaagaaccggtcgccaggagcttgggccgaccgagctatccttttctccctgctccttttggccgttcgccccttctccttctttgtttctgttttttttatttctttctagcatctagccgctagttactctctctatttctgttttttttatttcttgttcttgaatctggcgctatttccctcgccttgcgcgggcaggtcttttccttcaccagagttggtcggccgattatggggcgccgtctttaacctttcgaaactcggatctagtccccgtttactcgaatcccttattgtgtgtgaatgaatgtatgagatggatctaatgtaatattcgggatcgagttatgagctgataaaacgtagatccgagaccttgcgtttatgattttctgtaccatttctaatctgttcatctaggccacggatttataataccccgagccactgtgatctatgttgacccnnaaaaaaaaaaaaaaaa

SEQ ID NO: 41038 - DNA, 393 bp, Zea mays
  unsure (1)..(393): unsure at all n locations
  Clone ID: MRT4577_137427C.1
agcagtggtaacaacgcagagtacttttttttttttttttttttttttttttttttgggcatcaagtcaattttgcctaacttttattcgtcacattatacgtgactcattggatttccaatgagaaaagtgcggatcatatagatggcaaagtccataattggtttttacctagggagagtcgattgctttttggaaaagttcatctcactatttggaactactgcaaaactctcatttccagaagcccattttctttagtgaaattggtgggtggtcggatnccccgggtaaatgaaagcaaaccttgattcccggtttgccgggggggggtgggtttgtttccccctttttgcgactgggctgggttttggttttggtctttttccccgt

SEQ ID NO: 41039 - DNA, 286 bp, Zea mays
  Clone ID: MRT4577_137428C.1
cttttgtaatgaaggggagtgtccagtggaaggatttttaaaattatcttatggatagcttaagtctctgccatttgtaatttttggctctaagctccgattggagacgcttctccttgtgcatgtgagttgactgatgttgtgagtgtaaatgcatttggttatttctggtatcggtggccacttggatggatttttttacattctgttccccagttacaggaaggagtccctttggtgtgtgaatatgtgtgcctgtagagggtggggcagggtggggtgggga

SEQ ID NO: 41040 - DNA, 1492 bp, Zea mays
  Clone ID: MRT4577_137429C.1
gcggtctcggcgcgcgccagccgggccgcgtccatacggcacgtggtgcgcctcctccacacgtacgtactgtacgtacgcttccccgcccgtctcccccaccgcttccaggcaacatatgtaatatctgattcgagagcaggcggagttgcggattagctgctggtccgatccagaagctcctagacgatgatggacgtggagtaccacgaggagtacgtgaggaacgcgaggggcgtgcagctcttcacctgcgtctggctgccggcgccgtcctccgcgcccaccaaagcgctcgtcttcctctgccatggctacgggatggagtgcagcgacttcatgagagcatgtgggatgaagctggccacagcagggtatggcgtgtttggtatcgattatgagggccacggcaagtccatgggtgccaggtgctacatccacaagtttgagagcctcgtggccgactgcgacatgttcttcaagtccatctgtgacatggagggatacaggaacaagagccggtttctatacggcgagtccatgggcggagccgtggctctactgctgcacaggaaggatccgaccttctgggacggtgcagttcttgtggcgccaatgtgcaagatatcggagaaagtgaagccgcacccggtggtggtcaccctgctgactcaggtggaggagatcatccccaagtggaagatcgtccccaccaaggacgtcatcgactccgcattcaaggaccccgtcaagcgcgagaagatcaggaagaacacgctcatctaccaggacaagccccggctgaagacggcgctggagcttctcaggaccagcatggatgtggaagacagtctgtcagaggtgaggatgccgttcctcgtcctgcacggcgaggccgacgcggtgaccgaccccgaggtcagccgcgccctctacgagcgcgcggccagcgccgacaagaccatgaagctctacccggggatgtggcacggcctcaccgccggcgagcctgacgacaacgtggagctggtgttctccgacatcgtctcgtggctcgacaagcgcagtcgccactgggaacccgacgagcgggtgagaagggctccgccggagcctgagaacaagcgccgcgtcaccagcagcagcagtcaacggcccggcagcttcctctgcggactaggctgccgctgccggcaacaccagcaacagtgtagtaggatgtagatatggaaaacgcttgctttttcctccctaaagtttttttttggaaacgttttcctcctttaagttgttgacaaagaactgagaaaagttggatggtctcaacaaagatcttgtccatcctcagaactgtgttcctttgttctagtatagtttctgggagcaggataggcatactaaaagtgtcgggggagccccggcttgatgacctgtagccccgcatacacattccgagccggtaaaaaaaaagtgagctataccatatatattg

SEQ ID NO: 41041 - DNA, 294 bp, Zea mays
  Clone ID: MRT4577_13742C.1
gagccgcagacgcgccgccatgggccgtgtgatcccaggccagaggaacggtgccggttctgtatttcgtgcgcacgtgatagcaccgtaagggagctgcacgtctgcgtgctgaggacttcgcgaagcacaccggccacattataggcatcgtaaaggacatcattcatgacgctggccgcggcgctcccctcgcgagagtagtcattcgtgatccctatcgatctcagaagcggacagagctgcacatcgccgcatagggacatccacactggacagtttgtgtactgcggc

SEQ ID NO: 41042 - DNA, 165 bp, Zea mays
  Clone ID: MRT4577_137430C.1
gatattgatcagacgagctgtcgcccaggggggtgcctgcagcaagccctactgtaggcaccactagaagcaagttaatcgacagggtatgactagatcatgcattgtattgtcctggcgcgaacgcagccaagaggagttggggctcattcccatttagcaaag

SEQ ID NO: 41043 - DNA, 482 bp, Zea mays
  unsure (1)..(482): unsure at all n locations
  Clone ID: MRT4577_137431C.1
gttgggtgtgtttttttttttaatttttttttttttttttttttttttttttttttttttttttttttttttttttttttttttttttttttttttttttttttttaaaaaaaacttccaccattcttttttcccccctttaacttacagggggatgttcggggggaaaattttttaaatttnaaaacaccggcccttggggcaaaaggggggtaaaattaggagggttaaaaaaaatcgggggcaaaaacttactaaggggggggttttccaaaaaaaaaaattttttttttaaaaattagggaaaaaaaaaaagggggtttttgttttaaaggggagggaacaaaaggggttttttactgggtccttacattaaactaaactgctgggtgtggtaaaaaaaatacccccggggtgcccggtggctttaaaaaggggccccccggcccccggccccgggggttccccccggaatttcggac

SEQ ID NO: 41044 - DNA, 1572 bp, Zea mays
  unsure (1)..(1572): unsure at all n locations
  Clone ID: MRT4577_137432C.1
gcattactacgtatatatgatatgctttgcctccctatgccctcctcgatgtcgtcgaggccggccgggccgggaacaagccctgcgcccctgccatttacaacgacaccaccatgtcgtctgtccaggaggagcttaataacacacaggacatgctccaaggttacgtggagctctacaattacagtctctcctacgtgaagaccatggcgatcgggtgcgcgatccagctaggcatccctagcgccatccaccgccgaggtggggcagcaacaatctcggacatcatcaccgagaccggcgtcgacccgtcgaagctcccgtatctccgacggctcatgcgcgtgcttaccgtctccagcatcttggccaccacaggcacagacgagactgagactgagagcgacgacagtactgtttacaagctcactccggcgtcccgcctcctcgtaagcggcgcgggggcaccgacctcgtgcgacatatcgccgatgctggaccttctgatgcgccccactacgtcggtcgccacctacttcagcctggaagagtggttcaaggacgcgggcgccaccgccacgctcttcgaggtggcgcacggcatgtccccgtggagcttgacgaagaacgacgcgctgtacaacaagaccttgaacgacgggtgcgcggcggacagcaacttcgccatggacacgctcctgagagagccccgggccgcgggtatattccgcgggctcggctcgctcgtggacgtcggcggcggccacggcgccgctgcgatggccatcgctagggccttcccgcacatccggtgcagcgtgttggacctcgagcaggtggtcagcggggcacctgatgatggcacggtgaagttcatcgccggcgacatgttcgagtctatcccggctgcagattgtgtcttgcttaagtatgttctgcattgctgggacgacgaaagcagcgtcaagatcctccggcagtgcaagagagcgatccctgcaagagacgccggagggaaagtggtgatcatgaacatggtggtcgggtacggttcgtcagataggtttgtcaaagagacgcaggtgatgtgcgacatgtggatgatgcggtacgttggggttgagcgggaggagcatgaatggaaaaggattttcctagaggctgggttcagcgattacagaatcacgccgacagcgctgggtttccaatcggtcatcgaggtcttcccctgaggaagaagcatatatatatatatatatatatatatatgatcacgctgtgtaggatgtgtcatgtgtgccctgtgcgtaaggaaaaatatataccattattaataagttattaataagacagacatgatgatgagcgtatgggcaaatatacaggagatgcataagaatgagaaagatttaacgttgtactactgccgtttggattttcacgattacccctgtttacaaggagtagttgtatggatgcaaacattatttaccagtatgcaataaagaatggaacattttcgctctaaaacccnnnnnnnnnnnnnnnnnnnnnnnnnnnnnnnnnnnnnnn

SEQ ID NO: 41045 - DNA, 556 bp, Zea mays
  Clone ID: MRT4577_137433C.1
tgctgatggcacggtgaagttcatcgccggcgacatgttcgagtctatcccggctgcagattgtgtcttgcttaagtatgttctgcattgctgggacgacgaaagcagcgtcaagatactccggcagtgcaagagagcgatccctgcaagagatgccggagggaaagtggtgatcatgaacatggtggtcgggtacggttcgtcagataggtttgtgaaagagacgcaggtgatgtgcgacatgtggatgatgcggtacgttggggttgagcgggaggagcatgaatggaaaaggattttcctagaggctggattcagcgattacagaatcacgccgacagcactgggtttccaatcggtcatcgaggtcttcccctgaggaagaggaagcatatatatatatatatgatcacgctgtatgtgtgccctgtgcgtaagaaaaaaatatataccattattaataagttattaataagacagacgtgatgatgagcgtatgggcaaatatacaggagatgcataacaataagaaacacttaacgttgcactacaaaaa

SEQ ID NO: 41046 - DNA, 171 bp, Zea mays
  unsure (1)..(171): unsure at all n locations
  Clone ID: MRT4577_137434C.1
cgggtcgaccttgcgnccgcggacgcttgggacggcacataaatcagagtctggtctgnagggngcatcnnggctgagctccggggccgcaagccaanannnccaggaacngaangccngaancaacncaagcncaaagngaacgnccncggcacaangagggaggcngac

SEQ ID NO: 41047 - DNA, 128 bp, Zea mays
  Clone ID: MRT4577_137435C.1
caaccaccaagcggcggcgggcaacgcgcaaatttatgatcatggactccccaacagaataacaatggcggagaggggccacgaatacacctgttttcctgacacctaaccatattaaggtaatatcc

SEQ ID NO: 41048 - DNA, 522 bp, Zea mays
  Clone ID: MRT4577_137436C.1
cttcatgcggtggaaggtattcaggaaatgcgctgcgtacggcctcattgtcgatgatctcgcgagccgtcgcgtattcgatagatggatgtgtcagagccaaggagtcgctgactctccaggccggatccgaatcggaccccgcgtgccccagattcctcccgattgaactcgtctttctctcctagcgaaagcctcatgcgggagacctgcatatctcttccttcgactcgctgaaacccaagcccttcctagaacatgggactgagtgagcgcgatggatgacacagatcagacccggacgccgagtcatatgtgatagcggccacgggtatgtgtattatgtgacgcctactaccacaatactgcgggtggatagtgcgcgacgagtgcggggttgatgatgcttgagatcgatagcatgaaggttgtacgcaggactacctacgaacagatcttccaggcctacaggtacctattcagacaacacggagatggacatgaatgatcacgggcggacta

SEQ ID NO: 41049 - DNA, 449 bp, Zea mays
  Clone ID: MRT4577_137437C.1
aaaccgccgggggggccggttcaaaggggaaattgccaaccaccggggggcccacacaaggggaaccccgccgggcacaaagtgggggcaaaaaaaggcaaaagagggatcccggggaaaaaaattagaaccgcgcaaaactgcccacaaaaaagaggggaaaaccaaaaaggcaaaagccggggggccccaaggagggcccaaacaaaaaaaattgggggggggcccactcccccttttccaaaggaaaaaacggggggccctcgggaataaaaaaaccgccaccccccgagaaaagggaaaggcggtaatggggccttccccatttccagggaaaaaacacgaaagaaagggggacaagggggcggcaaagggtcaagatccacaaaaagggcgaaaagcgggtgtcccaacatagggggggacccccagaaaaaaaaacggaaaaa

SEQ ID NO: 41050 - DNA, 352 bp, Zea mays
  Clone ID: MRT4577_137438C.1
aagggcagggaaaatgggcccctcctttacaggggggggggcctcccccccccgaaaagaaaggaaggaaaaaacaggggggaacccccctttggggtcacgccccctaaacccccaacaaaaaagggaaagggggggtccccttttttttcccccccaattggggggggagggggtttgttcccctgggcccctccctccctgggggctcaccccccccgcccaatcgaaaactgccttgggccccgggggctttcaaataataggcccaggccccccagggggtttttcccctgcccggccccaaatttaaaggggggcttgggaagcttgggaaaccgggcgtttttta

SEQ ID NO: 41051 - DNA, 402 bp, Zea mays
  Clone ID: MRT4577_137439C.1
attcggctcgagggcacacacaaggccttcattttgtagaccgtggccccccccagctcggtgctatcgctcacggtaccccagctgatccctgctgagcccatgagtgccacgctcctccacattgtggaggactccgtcgacaccgacgtcgaggcagatgaccagctcctatacgggtgccacaatgacgcagacccgctgcggagcatcttcacccacaaggaccagaaggaggggacgacgattgctgaccacgacgaccagcaggaaatcatgaatgccttggtcccgcaggcgaactgcatcttggactactttggagaaacgaacacgggcaataacctggacctggacgaggagtgctacgataccaaacaggtcggcatgaccgagccccat

SEQ ID NO: 41052 - DNA, 236 bp, Zea mays
  Clone ID: MRT4577_13743C.1
gagcgcgcgcgcgcgcacgggctcaggttattcgacgctcatgaggtgcttatgcgcaggacatatcatgccatacatagagttcagatctcacattgtatggctttcatgattgcgtagtaccgtatacgctactggggctaggcggctggtccgaacttacgagaggttgcaccactctctcgctcggacaaggctgataacctagtatccactgcctttttcatggccacata

SEQ ID NO: 41053 - DNA, 1035 bp, Zea mays
  unsure (1)..(1035): unsure at all n locations
  Clone ID: MRT4577_137440C.1
gcgttcgcctaacaaanagcagcacgacagcttcgcgacaaatttagcagagaagaaaagctgagacgcaggagcagcttggcccaaaaggagaggaggtaaagaggcacagaaaagctactcctattttacaagaacatggaaagatgggagctaaaggttgctgcatgattaaacatcatttttataaacaaacagattgagggagagagggcaggaaggtagccctgctaggccacttggcaattccaagcctacaagatctccctccctcccttctgaacacacgacctctcaagacaagatcactgcttaccgccggcaccggcatacttgatggtcctagaaccatcgtcgccaccggcaccaccactgtcgtcgtgcaggggacctctagcgccttccactgagcccacggaggggcggggcaggagggacggcggcggcggcgacgacgtggaggaggagatggccgaggccaaggagatcggcatcaggcacagccccttgccctgcaggtactgcatggcagtgcccatgtcctcctccatcagcctggccacctgttgctccgtcacccgcaggctgctgccgccaccaccgttatcaccgttggtggcaccatcgccgccgtcgtcgcttgtgccgtttccggctctgtcgtcgccctgcaacaaggctctgagtctgattccattggcttacacacaacaacaagagaacaagaactgatcgccactcatcaagataataacgatcactcgtgggaattttgaccctgaatgcttgatcagtataccatgtaaccacttctacttttcaggcgtgttttttttcttcttcctttttggctcgagtccttggcaacaaagattcctacacactttcttttcagctgtgttggccactaatgctcgataagtcccctaagcaaagttatatatgggccatctccttttcgatttcgtgcagatgtctgtaagcatgctgcttgcttttggcagtagctcttttaggtgacttttttttncccgg

SEQ ID NO: 41054 - DNA, 311 bp, Zea mays
  Clone ID: MRT4577_137442C.1
tgccgaggcacagacatcatatcatatcatatatagacgcattgcaggcaggcaccgcggcgcactcgccaacgtgcaccgcccgccatgagaaaagccaccatctttctcatggcgctcgcactcacgctcatcccccatgagcaaacggtggcgacgccgccgcagcctcttcccctgcagctgcagctgaggagaagtcgcttccttgctgccaacaacgtcaacttctcgccgccgccgccgtcgttctacgactgcagcaagaagcctccatccatctgcctctcgcccgggagacccggcgcgac

SEQ ID NO: 41055 - DNA, 292 bp, Zea mays
  Clone ID: MRT4577_137443C.1
cttggctgtgtacagccaagactcagctcagtctggcgcaccggactgtccggtggtgcaccggacagtgtccggtgcgcacggctgactcggcgtgatatggccgctctcgggaattcgccgacggcgtacggctacaattcaccggacactccggtgtgcaccggacactgacggtgagccaacggtcagccgagccaacggtcggccgcggaatccgcacgcgacacgtggccgagccaacggctaaatagggggcacggaatgtccggtgtgcacggacatgtcagtg

SEQ ID NO: 41056 - DNA, 608 bp, Zea mays
  Clone ID: MRT4577_137444C.1
cctcgagccggccgggccggagtcgaagcgcatacacaagcacaagcgcatcccaacaatggcttctgaggttgtccgccctagcgacgccgagctactaaaggttcaacccgacatatggcggctcagcctctcctacctcacgcccctgtcactgaggggcgccgaggagccccccagaccacgagcaagcccacgcccccgccgaccacaacccagtcataacaacgaaaaacatgccccaccactacaacgacgacaccgcggactgacaatataaaaacaacgacttccccctaagcgacgcgaacacgcatcccctaccccaaaacccgcacaccatcgttgcaatcatcaccccctacgaaagcccgcgcggagaggtcgcacctcactaagaagccgacgccaccgaagaacaacacctacaaggacaaaactcgtgcacaactcaaaacaggcgccagaaagggagccatccctgcaccaaggaaacatgcaaccatactagacgacggggtcaatgaggacaaggacacctccccatcaaaacacgggttaacaatagctacctacaaaacgaaagtgccctcggacgcccgagctaa

SEQ ID NO: 41057 - DNA, 592 bp, Zea mays
  unsure (1)..(592): unsure at all n locations
  Clone ID: MRT4577_137445C.1
cggnggggatccgnagnattcggcaatctcaaaaacctcacaacgctgtttctatacaataaccagctcacgggcaccatcccggtgagcatcgggcttctaccacagctgagagacatccggttgttccagaacgagctgtccggagagctcccgccggagctgggcaagcactcgccgctgggcaacctcgaggtgtgccttaacaacctctccggcccgctgcgagggtcgctctgcgctaacggcaagctcttcgacatcgtcgccttcaacaacagcttctcgggcgagctccccgcggcgctcggggactgcgtcactttaaacaacttgatgctctacaacaacaacttctccggcgacttcccggagaaggtatggtcgttcccaaatctgaccttggtgatgatccagaacaacagcttcactggcacgctgccggcccagatatcccccaaactgtcacggattgagataggcaacaacatgttctccggctccttcccggcctcggcagcagggctcaaggtgctccatgcggagaacaaccggctgggcggcgagttgccgtctgacatgagcaagctcg

SEQ ID NO: 41058 - DNA, 379 bp, Zea mays
  Clone ID: MRT4577_137446C.1
ccggaatctcgtcaagctcgttggatggtaccggcaggacggcgtgctggtggtggtgtacgactacatgccacacggcagcctggacaggcacctcttcggcggcaaggatgcgccggcgctggactggaggcagcgctacaacgtggtcgccgacgtggcgtcggcgctgaactacctccaccacgagttcgaccagacggtgatccaccgcgacatcaagccgtccaacatcatgctggactcgtcgttccacgcgcggctcggcgacttcgggctggcgcgcgcgctcgagtccgacaagacctactacacggacaaggtcggcgtgccgggcacgctggggtacatcgcgcccgagtgcttccacacggggcgg

SEQ ID NO: 41059 - DNA, 329 bp, Zea mays
  Clone ID: MRT4577_137447C.1
tttatttgtactccgaggcgtccgactagatcgtgttcttctaggacaagttccgccagaagatgagggacatggacctgagcgcccacggaggcgtacagaatatcgaatacgatgacacctgataactggactccgggacgctgatgacactgaccagcaggtacgggaattgcaagcacgagagaaacgtgcgccgtctcgagagccagcggaacctggataggcattggcagctgacttgtaacgccatgtaaagctccgtgccggtggacgtgaagtgcgtgcactgcgagatgatgtacatgatgtccggcacggacatgttc

SEQ ID NO: 41060 - DNA, 1156 bp, Zea mays
  Clone ID: MRT4577_137448C.1
caaggccgtagcccgcagcttcatccgttgcgctgctcccggttccccaccgcgcggtgtgaaataaaagccggagtggtgtgtctcccgggggcccgcccgccggccgggggcatttcggtggccgtgccggaggtagcagtacgacgaggaggcaaggcctccttgaggacggccttcccgagaatgtggaatacatggccaagcgcgaagacgaccaggctgaaagggatgacgagatggatgagtatatggagaaggcgcctaaattgcctcgaggcccgggggggtcgagggagtttatagaaaacaaaaaacaaaccgtagcctgtagcttcatccgttgcgctgcgcccggttccctcgcgcggtgcggaatttaacatggccgtgccggaggtggtggtcgacggcgtcgtcttcccgccggtggcccgcccgccgggctccgccggctcgcacttcctcggcggcgcaggcgtgcgaggcctcgagatcggaggcaacttcatcaagttcacggccatcggcgtgtacctggaggacgcggccgtgcccgcgctggccaagaagtggggcggcaagacggccgacgagctcgcctccgacgccgccttcttccgcgacgtcgtcacgggcgacttcgagaagttcacgagggtgacgatgatcctcccgctgacgggcgagcagtacgcggagaaagtgacggagaactgcgtggcgttctggaaggccgccggcctgtacacggacgccgagggcgtcgccgtggagaagttcagggaggtgttcaagccagagactttcgcgccgggcgcctccatcctcttcacgcactcgcccgccggagtcctcaccgtcgccttctccaaggactcgtcggtgccggcggccggcggcgtggcgatcgagaacaagcgcctctgcgaggccgtgctggagtccatcatcggggagcgcggcgtgtcgccggccgcgaagctgagcctcgccgcgatcggagcttccgcgaggagaaagaaagcaaccagacggttgggcggcacggcgtctcacacctgccgcctgcgcttgcgtgctccggagtccggactggagagacgccgcgcgggtgcagtgcatccgtcgcgtcttgtctgccgcgctatggcgt

SEQ ID NO: 41061 - DNA, 1247 bp, Zea mays
  Clone ID: MRT4577_137449C.1
ctcgagccggccggggccacaaccgtagcctgtagcttcatccgttgcgctgctcccggttccatcgcgcggtgcggaatttaacatggccgtgccggaggtggtggtcgacggcgtcgtcttcccgccggtggcccgcccgccgggctccgccggctcgcacttcctcggcggcgcaggcgtgcgaggcctcgagatcggaggcaacttcatcaagttcacggccatcggcgtgtacctggaggacgcggccgtgcccgcgctggccaagaagtggggcggcaagacggccgacgagctcgcctccgacgccgccttcttccgcgacgtcgtcacgggcgacttcgagaagttcacgagggtgacgatgatcctcccgccgacgcgccgcaggcggagccgtctccatcagcctgaggcgaggagcgggcgggcgaccgaacgaaccgcgaggagaaagaaagcaaccagacggttgggcggcacggcgtgtgacacctgttatcgcgcacccggcctgccaagtgccaaaaccgtagcctgtagcttcatccgttgcgctgctcccggttccctcgcgcggtgcggaatttaacatggccgtgccggaggtggtggtcgacggcgtcgtcttcccgccggtggcccgcccgccgggctccgccggctcgcacttccttggcggcgcaggcgtgcgaggcctcgagatcggaggcaacttcatcaagttcacggccatcggcgtgtacctggaggacgcggccgtgcccgcgctggccaagaagtggggcggcaagacggccgacgagctcgcctccgacgccgccttcttccgcgacgtcgtcacgggcgacttcgagaagttcacgagggtgacgatgatcctcccgctgacgggcgagcagtacgcggagaaagtgacggagaactgcgtggcgttctggaaggccgccggcctgtacacggacgccgagggcgtcgccgtggagaagttcagggaggtgttcaagccagagactttcgcgccgggcgcctccatcctcttcacgcactcgcccgccggagtcctcaccgtcgccttctccaaggactcgtcggtgccagtggccggcggcgtggcgatcgagaacaaggcgccgcgagggtgtcggagctcctcgccaaggagaccgccgcgcccgccgacgcgccgtaggcggagcccgtctccatcaccgcctgaggcgaggagcgggcgggcgagcgaa

SEQ ID NO: 41062 - DNA, 1569 bp, Zea mays
  unsure (1)..(1569): unsure at all n locations
  Clone ID: MRT4577_13744C.1
gcttctgtaatgctgcagcatgcagaggagtaaaaggaaggagatgaatacacgatttagtttactagcattttttgccattgttaaatttcctgattgacagtgtgtaagctagtggtctggtgttataggagtctttgttgagagattaggctatagcaatcggatgtaatgcatggtaacttcggtaaatatgcaatcaattgttatgtatgcttccaccaatgttaatgcaatgcttccaccaatgttaatgcagcattattaggcatgattcgtccaatagtggatacaagcctatcaactatgtctatgtgttagagcagtgctattattcgactaagtagccagcacaattccattttattatttgctaaataattctagtgcaagagatttgttgggaatttggcatgcaagaaattttttgaattggatttagaaggcatggaatatagcctcattatggatgtaatgtgaaaatcactctcatccaaccctgttcagattcatatatcattttctaaacatttaaaatccacggccgatgacgattaagtttatggntatttgttgcacgtgggtgagcggatcgagatggcggcgtcggatgttgagtgccgcggcgcgtcgcgacccgggccgacaagatagggtcggaaagccccgccgccgacggcgtcggcgacgccgcgcgcaagcggcccagcggcgatgatggccccaccccggggccagccgacaagcgccgccgcccggagcacccttcttcctcctccgcgggctcccgcgaccgccaccaccaccaccacggccgccgcccgccgtcctcggccgacgagaaggtgcgcgcctctcacatcctgatcaagcacgagggctcccgccgcaaggcctcgtggcgggatcccgaaggcgtcgccatctccgccacgacacgcgacgacgcggccgacctcgcgcgcgcgctccgcgaccagatcgtctctggtgaccgcgagttcgaggacgtcgctgccgagaactccgactgcagctcggccaagcgcggcggtgacctcggttcatttgggaggggtaagatgcagaagccttttgagaaggccgcgtttgctctgaaggtcggggagatcagcgacgtggttgatacagagagcggggtgcacatcatcaagaggactggctgactgcacctgctgcagtatccatacacggtggatgccttggagaggctgtatggtttcttgcttcattggtgaatttgtgcgtgttttttcttcttctcttagacggttgtttggatgctcatctcttcacctcaacgcacatggttgagtggtttgaatccaaaccaaactactccaacctatatggattgaattgaaatatatacacgcgcatccaaacaatccctatgcccttaggaaatgggatgtttgacttccttttgtaaacttcgctggagacctgtggtttggaactatgctcacggctacgatgggatcagattattttgggtatttatgacacgagtatatgtcgattgtttttatgtcattgtgagtattg

SEQ ID NO: 41063 - DNA, 1805 bp, Zea mays
  Clone ID: MRT4577_137450C.1
ttgggtacctcgaggccggccggggcccttctctggcgggccgtccccgcatatttatcgcaacaaccccggcctgccaagtgccacaaccgtagcctgtagcttcatccgttgcgctgctcgccggtcttccgcgcggtgcggaatttaacatggccgtgcggcgtggcgttgtcgaccgagtttctctgcgaggccgtgctggagtccatcatcgctgagcacggcgtgtcgccggctcgcaacctgacctcgcggtgagccgccgggccgtcccgcatatttatcgcaccccggcctgccccgggggctcgggcaacaaccccggccggccgcgggccgcgcccttctctggcgggccgtccccgcatatttatcggaacgaccccgcgccggccggggggacaaccgtagcctgtagcttcatccgttgcgctgctcccggttccctcgcgcggtgcggaatttaacatggccgtgccggaggtggtggtcgacggcgtcgtcttcccgccggtggcccgcccgccgggctccgccggctcgcacttcctcggcggcgcaggcgtgcgaggcctcgagatcggaggcaacttcatcaagttcacggccatcggcgtgtacctggaggacgcggccgtgcccgcgctggccaagaagtggggcggcaagacggccgacgagctcgcctccgacgccgccttcttccgcgacgtcgtcacgggcgacttcgagaagttcacgagggtgacgatgatcctcccgctgacgggcgagcagtacgcggagaaagtgacggagaactgcgtggcgttctggaaggccgccggcctgtacacggacgccgagggcgtcgccgtggagaagttcagggaggtgttcaagccagagactttcgcgccgggcgcctccatcctcttcacgcactcgcccgccggagtcctcaccgtcgccttctccaaggactcgtcggtgccagcggccggcggcgtggcgatcgagaacaagcgcctctgcgaggccgtgctggagtccatcatcggggagcgcggcgtgtcgccggccgcgaagctgagcctcgccgcgagggtgtcggagctcctcgccaaggagaccgccgcgcccgccgacgcgccgcaggcggagcccgtctccatcaccgcctgaggcgaggagcgggcgggcgagcgaacgaaccgcgaggagaaagaaagcaaccagacggttgggcggcacggcgtctcacacctgccgcctgcgcttgcgtgctccggaccggagagatgccgcgcgggtgcagtgcagccgtcgcgtcatgtctgtccgcgctctggcgtcgtgttcctgcctttctggtcgcgtagttgtcttgtgttcgctgttggtcgttctgggtaacatttgaataaaacaagcggatttgttgcaaaaaaaaaaaaaaaaaaagggcctcggaagtcctcgccaaggaaacaaaaaagaacaccgacgcgacgcaggcggagcccgtctccatccccgcctgaggcgaggagcgggcgggcgagcgaacgaaccgcgaggagaaagaaagcaaccagacggttggggggcacggcgtctcccacctgccgcctgcgcttgcgtgctccggaccggagagatgccgcgcgggtgcagtgcagccgtcgcgtcatgtctgtccgcgctctggcgtcgtgttcctgcctttctggtcgcgtagttgtcttgtgttcgctgttggtcgtttcgggtcacatttgaataaaacatgtcgatttgttgctgttggtcgttctgggtaa

SEQ ID NO: 41064 - DNA, 444 bp, Zea mays
  Clone ID: MRT4577_137451C.1
atcatacccagcaaataattaaggtattcacggattccaaccctatccacgtttgccgcgtcgcgatcatcaacaggggccttcgcgaggaacccacccgtatggcctgacgcggtctggtgagaaggcacgccgaggatatctgacccataaagagggtgaaccaggccatgtacgtcctgaccactgacaccagggagagcgcttagctgaacatgaaaatcatcgcctactgccttgcatataaactagatcacagctgcacaagggctaatgcaacaattacgcgctcaagaaaacagacgaggatgatcgtgttgccaaggtcaaccagaaaacgaagcttgtatcctggagcactctgcgactgaaacttttatgttgctggcaaacacatcgggtcctgttttaccaatgtttagagagtcatgagacctatatgcg

SEQ ID NO: 41065 - DNA, 376 bp, Zea mays
  Clone ID: MRT4577_137452C.1
tgccagcttttttttttgccgccacagccaaccattttctttgtgggtgttttttttgattttggtgttttatttttttggctagccaataaaaaccccttgtttttcagcataaactgtagatcaagacgggcctagctaaagtgtttatctcaatctccttgctcattttgacaccttatatcaagggactggctattggtaccagtttagataccccagatctgagcaaagggacagaattgaagaagcgatctgtgggcattacttgtgaggcaaccagaactcaggtcgggtggttatcctccaggagattggaacacaccttcgttgtctgcggaggacctgtgtccaaacttgaaaagaggtgcgcact

SEQ ID NO: 41066 - DNA, 567 bp, Zea mays
  Clone ID: MRT4577_137453C.1
ttttttttttttttttttttttttttttttttttttttttttttttttttttttttttttttttttttgctttatccttacatacattggataaaaattctctgaaaatgaaaaaatactagctcgggcccagcatcccaacaaaaaggggggggagggggggatctcaaagatcaacgaaaaagggggaggggcgggaatcacgcaggaggagcctaatgggggagaccgccggggcaacagccagcgcagggaacccaaaaacatcgagccaaagccacgattccgggatggcacccagcttaggccccttcaccaacaggcacatgggacccgcgagcacaaacgtcagcggaaaggggctgaaagccccgacaggctcatgaaggcgccgaggaatgggagcaccggggccaccagcgaggccaccggcagggagccccctctgactgccactctgaaccccacgttggggatctcaaaagggccaccacgcccacttccatattgggtgtccaggaatccatacatggggctagcaaagatgtgcagcgctatgactggctg

SEQ ID NO: 41067 - DNA, 543 bp, Zea mays
  unsure (1)..(543): unsure at all n locations
  Clone ID: MRT4577_137454C.1
gccgccgtgtgccggaattttcctctttctggcggccgccgctggcgcggggacccttctctgcctcggcctgcctcctctcggtcgctctacgctcttcgtgctcgccgcctcccctcttccccttcctttcactccttccgtctgacgcgcgtggcctccgtcgcatgagattgcgctctctcctctccggggtgcggagggctctcttctcattttctctctccttctccccggtggggctgggttgctcattcctccgcctgctgccagtgccctatgagatctgtttcctgcgctgccttgatggatacggtggtctggggcttgtgtccttgtggcgaagctgcttgctcttcctgtcctctctgntgtttgtggtgactcgcttttctctgttcttggtgcggcttcgctgggctcggttgcgattgtgatgggccttgtggcgcccttcgttcttggcgtggcccgcgtccagcgcgccttcggttgcctccgcctgtggcgccgctgtcctccttggccggcttgttgcctgtg

SEQ ID NO: 41068 - DNA, 1527 bp, Zea mays
  Clone ID: MRT4577_137455C.1
atggatcctaaggaaaaggggatggtggtcaacgacaaggaggagtccctcttcaacgagccaagggacaacaagcccactgactcaggttcgagtcacaagaagagggacgggaagaagaagaggcgcatcaagaagatcatctactacgacagcgatgcatcttcctcttcaccaagggacgacgacgacgaagactcctcgtcaaagaaaaggacggttaatcaaaactattcctttgattattcacgtattccgtacaattcgaatgcccatttactttctattcctcttggaaaacccccacactttgatatagaggattactcattttggagccataaaatgcatagtcatctattttctctccatcctagcatctgggaaattgtggaaaatgggatgcattttgatagtacggataattctgtgatcattaatgaacaaattcataaaaatgcccaagctaccactatcttgctagcttcactttgtagggatgaatataataaagtgagtggcttggacaacgctaagcagatctgggacaccctcaagatatctcatgagggaaacgatgctacgatgatcaccaagatggagctagtggaaggcgagctgggaagattcacgatgatcaagggggaggagctaacacaaacctacaacaggctcaagaccctggtcaacaagatccgaagctacggaagcacaagatggatggatcatgatgtcgtccgactcatgctaaggtcatttactgtaattgacccccttcttgtcaaccttattcgcgaaaatcccaggtacaccaagatgacgcccgaggagatccttggaaaattcgtgagcgggtgcatgatggtaaaggaggcgcgatacgtggacgatgcggtctacaagaaggcgaaggatagactactagaaaagcaagaggacattttgtatgaggaacgtgacaagtttgttagtgttcaaaaatctcttgctttagaaattaaaagaaatgaaatgctatcctttgagttgtctacttgccatgaatctatctctagtttaaagaatttaaatgatgaattaaatgctaagctagaggaagttaacaaaattaattcatgtgaagagcctgttgttatttgtaatagatgtaaggattttaatgttgatgcctgtgatgaacatcttgcttctattaccaaattaaataatgaagtggcaagtcttaatgctcaacttaagacttgcaaggttgattttgataaattgaaatttgttagggatgcctacactgttggtagacacccttcaattaaggatgaacttggttttcgaaaggaaaccaagaacttaacaagccaaaggactcccgtcctcaacaaggagaaagggaaggcccctatggcgagtagtcctcaaaggaaccatgcttttatttatgataggacaattgctagccgttctcattatatttttttcattgcaacgcacaaatatttatctagtaatataagttatttgtctatttag

SEQ ID NO: 41069 - DNA, 352 bp, Zea mays
  Clone ID: MRT4577_137456C.1
aaggggggaggggggatgtattgaagaacagagtggtgagccatggagcacttcggaagctctacatgactggggaaaaaaaggacacggaattgctgctcttatgggcactgctactactaatgcccacataggcatgggtctgcaataactctgtgggtggggggggggaccaataacaggcaatgcgctggcccttgatgaggagagcctcatacaaggacctgagctgcaactgccctagcggtcgaaaccctggctggggcgcccgatacggaatccagcccaccctccgcgaaggaagcccctgaggaagcctctccgccgtgtcctccaggaaagcccaccttca

SEQ ID NO: 41070 - DNA, 275 bp, Zea mays
  Clone ID: MRT4577_137457C.1
cctcttcttcaggcttctgtgattaaaagcgcgatgtgtggtcaacgcacaaggatatgcctccccgagaggttgggcgatgccactgcccacatcgttcctgactgaaaagtgcaagaccgaacttttggaaaactatattcgggcatgcaaggcaatgggatgaagattaaaatggttcgtaatgaatccatactttatatcttacctatcgctatgcccaatggctttaagagagacacaagctcgaccagcttgctaagaactatatacgt

SEQ ID NO: 41071 - DNA, 2076 bp, Zea mays
  Clone ID: MRT4577_137458C.1
ttcttcctcccaactccgtcgatccgcctcctcctccctctccagtcccgttgcacttcctcggtcccctccttcactccccccacccccaccaatggcgtctcctcgccgccgctccctcccactccgcttcctcatcttcatccctgcccccctcttcctagtcctcctcttccaccgctcctctcattctaccgccccgcttctccacaccgcaggctctggctccggccccagctctgatccccgccgcttctccctcctcatcaagctcctcgcctacgaccggccggccgcgtttcgccgctgcctccgctctctcgccgcagctgactacgatggggaccgcgtcgcgctccacgtcctcctcgaccaccgcccgcccaactcctcgttgccccccctcgccacgtcgcacgagatccttgacttcgtcgatgcgttcccgtggccgcacggagagaagcgcgtgcactaccgcgcctccaacgcggggctccaggcgcagtggatagaggcatggtggcctggctccgacgacgagttcgccttcgtcgtcgaggacgacctccaggtctcgccgctctactacaagttcctgaagcggctggtcctgaggtactactacgaccgcgagaactacagcccctacctgttcggcgcgtcgctccagcgccctcggttcgtcgcaggtaaacatggaaacaagatacagctggatagtgagactcggcttttcttgtatcagatggtaggcacgtggggtcaacttctctttccaaaaccatggaaagaatttcgattatggtatgatgaccacaaagccaaaggactcaaacctattctccaaggcatgaaaactacagggtggtataagaagatgggtgagagaatatgggctccttggttcgttaaattcgtccactcacgtggatacttcaatatatacacaaacttcctgaaggaaagggccctgagcgtctcccatagggatgcaggagtgaactatgagaaaagtgttgggccagattctactttgttggatgggaagaatcttgatttcaatttatgggagctgcagcctctaaagaagctaaagtggtatgatttctgcttcaatgaagctcttccagggagaattgttagaaaaaatagtgaacttggttctatgctcaaatccctgcaattaaaaagtactgttgttctcgtaactctgtactcaatagaagagagatttgcaagaaacttgatttgccatcttgacaaggcaggcatgaagaacactattttccttggtgacaattcagagtttctggatgatcttgctcatagaggatatcctgtcattgatggcgtcaattttcttcagagcatcagattgagtagtttgcagggctctgacggtgttgttcaggaaacattggttaaatcttatgtgataaaagcttgcttggacctgggatataatctatggctactaaatggaaatatgatttcacttggcaataagttgatcgagccatcagatcagtctgttgacttctttactgcagatgaagggttgatgtttataaggagctcgctagacatgaaaaacaaatggaatgaacttgccatgtcgagagtgaaagcgatgtgtacatctagtgatctgtctgtttccatcaaacagaagagttttgtccatatgctaactgaagtgatggcgagcagtgctggtgttaggctgggaaagctggatgaggctatgagagttattgagttagggcctaacacctcaaacagatcaatattagaagacaaaagtaatgtgcttttctggtctcgcagtagggcttcagattcagttcaaaagcaacttgaaaatatggatttatggttggttgactcagattcgtcttgtagttctgttgtttgtcaccaaaagcagaagtagccaggttgttttggcacatcacttttgcttccctgagaacaaaaatggtgccatcataggggatctatggtaaccagctaagtggcacttatatattttccaaaaatcatataatgacatgtctttagacgcatgagggg

SEQ ID NO: 41072 - DNA, 227 bp, Zea mays
  Clone ID: MRT4577_13745C.1
tacgaggctgcaagtgcagccgatacgccacctgccgcggcataaggtagttatgggcctgcccgttaataggcaggtgcggacgcggttgcagactggtcaccactacagcagcagccttagcctgtgtgtcggccgtcagctttcgctgacactaccggtgttccccggactggcctccgactagggttggcgacctttggttatgttggagatgaggtggggtc

SEQ ID NO: 41073 - DNA, 652 bp, Zea mays
  Clone ID: MRT4577_137460C.1
actcaaaacatcgctactatagctgctctagctcgctttagtcatccgttctttctactcacacacacactgtagtttgatctccggcctatgtacggtagatagaacgtatgctagtcgtattacctcctctaaccgtaccgtgttggcgagtcgattacggaactacagttagcgacctcaaaatggaggatgccgtgtgaggcagctggcggctgtgcgggcatgccgaaaaaggcgcagctgcatcgtagcgtgctgtcgctgaatccgggttacgccgccttacacgtggcgtagcggctggcgctgaacatgggcatcatggaagcacgtcttcctcgtctaccgaacatcatcgctctctgcctgctcgtgcccttcagctacattctacataagaaagacaggccgaacatgaccctaaactatcagcggccaggtctatgtttctcgtgctatgtggcataacggacgaaccaagggttctacctacctggtgcctggacaacacgtatgccgagcgttcgcgtccattcatccataactcgggcccggctcatcaccgttctgcatggctcgcggcgctgccggatcgagaaggcgccgggctggaccgccgcgaccgacgtaccaaggtggcgggcacgct

SEQ ID NO: 41074 - DNA, 476 bp, Zea mays
  Clone ID: MRT4577_137461C.1
cgcctgctgtacctgtccttattcccgttcgtccccgcgtccgcccggtttggctgtagcatgttgtgagatgagaaggctattttgtcaaaaaaaaggggggggaaaataaaaaaggagggggggaaaaatataaaaaataaaaatattattaaatggggggggttttaatattatccaatatttatttaacggtaattcaaaattatttactttcttttttaaacccttaattctattaattccccctctttttccaactttttggcctcggatttccttgtgtttcccacctttttcccctttcaacactttcccttttttttttttttccctttaatctaattcccccccccggttttttattaccaacttttttgaaacccctttttccccccttatttatccttttttacccctttttccttttccgtttttgttttttttacataattttccccctttttttttctttt

SEQ ID NO: 41075 - DNA, 246 bp, Zea mays
  Clone ID: MRT4577_137462C.1
gtcatcagcgaaacattattggcatactataatgaataagcatgaacatgatcaaggtatgtttgcaccttcagcttgatagaaagtcaaaatacatgagatgacgggtgattgaataacggccaaagtgagcaatacagggttactgagcacctattcataggcgcacattggaacacggagaaaggtgcatctatgtacatcatgacaaacgacaaatggtacacacactattacggactaaac

SEQ ID NO: 41076 - DNA, 951 bp, Zea mays
  Clone ID: MRT4577_137463C.1
gcggcgctcgaggcggccgtttcgggagtaggtgcggagaggaagaggaagcgaagcagcagcagcaccaccactgcgcggcattgcagcgagcaagcgggagggatctggggcatggtggcggtcgctgccgctgccgctcggatctagagggccgcacgggctgattgccctccgccggcctcgtcggtgtcggtggagtgtgaatcggtgtgtgtaggaggagcgcggagatggcggccaacaaggggatggtggcagggtctcacaaccgcaacgagttcgtcatgatccgccacgacggcgacgcgcctgtcccggctaagcccacgaagagtgcgaatgggcaggtctgccagatttgtggcgacactgttggcgtttcagccactggtgatgtctttgttgcctgcaatgagtgtgccttccctgtctgccgcccttgctatgagtacgagcgcaaggaagggaaccaatgctgccctcagtgcaagactagatacaagagacagaaaggtagccctcgagttcatggtgatgatgaggaggaagatgttgatgacctggacaatgaattcaactataagcaaggcaatgggaagggcccagagtggcagcttcaaggagatgacgctgatctgtcttcatctgctcgccatgaccccttcctcaagggtctcatgggcaggcagaaccgcacgccaacaatcgtcatcgtttggtccatcctccttgcgtctatcttctccttgctgtgggtgaagatcgatcctttcatctccccgacacagaaaactgctgccctggggcaatgtggcgtcaactgctgatcgagaccgtgactcttatttgaagaggctcaatcaagatctgccccctcgtgtaaatccctgaggaggctagatgggaattctttttgttgtaggtgaggatggatttgcataagttatg

SEQ ID NO: 41077 - DNA, 528 bp, Zea mays
  Clone ID: MRT4577_137465C.1
aagcttttttttttttttttttgtacagctttttatttttttttttttttttttttttttttaatttttttttttttttttttttttttttttttttttttttttttttttttttttttttttttttttttttttttttttttttttgtttttttttttttttttttttttttttttttttttttttttttttttaattttttttttttttttatttttaattataaacccggggggcttttggggcgaataaaaaaacaaaaaaaaaataatagtggggggctaattaccaaattttaaacaggaaaaaaaagtgggcaaactaaattaattaattggccaacaaaggccgataagaaaatggaaaaatatgggctccccctctaattaaataaataactacttgcggtaaaaaggtgttttgctaataagggcattttccgcttccaaagcggttattcgggggtccacgaaattatggtttaatgaagtaggaaacatcttccaaaaagggggcaagaggttttc

SEQ ID NO: 41078 - DNA, 335 bp, Zea mays
  Clone ID: MRT4577_137466C.1
gggggcctgacaattgcgtttttttcccaaattcagggttccccaaaaccccttttcaacagggggtttctttacaaaaaattcactttcggtttggcctgacaagaactttacccccccggttttttatttaaagctttcccccttgctttaacaagggccatggaactttttttcgatcaggtcattttctttattagggaggggttgcgcaacggcaacttcaaactcaactttttgctggtggtggatggccatatcaatttgcacttccgggggtttcagagcaacggttttaacaaagtgaaggtttttttcccctgccagtttttttt

SEQ ID NO: 41079 - DNA, 434 bp, Zea mays
  Clone ID: MRT4577_137467C.1
atcgtgcgcgcgcggttcggaggctgcggacatgtcggtgagatgggggcctgactggggggtgagccagagctgtacgctgagggcactgaagcggctcacctacgacaatcgccaaacaacacgacgagactgtggcctccggctgttacacgacgagactggagccgacacacgctgccatctgacgggcagctgctcatagaacgacgacgaggagagctgcagcccaaagttcaagactactgagcacgtgtacgtctacatcggcccgaaggccgatgctaagcggactaccatcaaggaggtggaaagctctggcccgccgaacctggtctaaaacgacgaggctcacaacgagaccatgctgctgagcgccggcctgaccgcactggcgacgtcgaccgcgaggagctcatggacatcaaactcgg

SEQ ID NO: 41080 - DNA, 1074 bp, Zea mays
  Clone ID: MRT4577_137468C.1
ccggcaggggttctacgactctacaaggagagtgcacatgggtggtggccgtgcgtcgtgcctgtctgccctgagggctgcctgatttgctcggatctgcggtctgcctgcctgtgcgtacaacagacagggccagtgccgccggcagagtggtagacaacagactgccatgcgtgcctcacgttgtatccatggagatgaggacgacattgcctccaagtctgctccaccggcatccatcgacggtgcaagaagcaacaggtgagctcattgagccctcaatggtaggtggctggacctggtggaccgaagatcctgagccattctgcataccagcacatggataaacaatgctccatagatcatgaagcagatgctcccgccacctaaggatttggagattgctatagtgcaagtagagtgtagtgattatgtagctatagtgcaagcagatgcccccgccacctaagtagcttctttggtgtacacaaaataatgttcaaaggctacaagcattagccgggacatagtccaagcctgatacaagaaaagtgtcacttaacgttatgcccaacattgttttgtttgtgctacgagctgtataactatttaagcctttatgcaagatgggtcataactctaccctgtgaattgagatagatgatcatgtggtgcaagatattgagtccctcatctttgacgacacacataacaaatggtaagcgtctccgtggatggagcctgaagtatattcaaattcaaggcatgccacaaagcatctcgcgtgtgggatgctccggcgtgtggaaaggagaaaagccaaataaatgggtacatgtccagcaggcgtgagttcttaaatactcagattccttgtccataggcaaatgcatagttcatacgaatcagggcttcacatacatatccatttttgtgttggtagcaatataatgtttgatctcaagcttaccacaaccaagctcaattttatatgtgtgcacaccaattggattgatgaaacaaaatgtagatgacacaatacttctttagcattttatatattgagattggatt

SEQ ID NO: 41081 - DNA, 489 bp, Zea mays
  Clone ID: MRT4577_13746C.1
ttggcttggaacctttgggctgatttatgtgcttgtatgtttagtccagtctagtctaggcagtcacagccagtcagagagtcggatgatttttgtgtgattctagacagacccccaacggaggtgttagtagtgttattcttgctgcatgatggtggtggtggtcatgcttctgctgattcgctttcgatgtcgggtttgattgtgatgttatatttcgttgttcttcttctcttcgagttcgattatatattagttgttgttgttgttggccttagccttgttggtgcgtggtcgcctttgcgttctcctcgtaataagaagccttctaagctgtaggtgtctggtggttattagaatgtgtataagaaggagaggagtgcggggcggaatgtttattctcattctttgttgttggttgtggatatggtgctggtgctggctgttggtgttgctgctgtctgcgttgtgatgatgtttgctggtagt

SEQ ID NO: 41082 - DNA, 733 bp, Zea mays
  unsure (1)..(733): unsure at all n locations
  Clone ID: MRT4577_137471C.1
caggcggcgggttttgttaaaaaaactgctttacaactctatccctgtgttgatggggggatgatttctatcatgtgtactgtgtatgtttgcgtgattgaatgtttctgattacctgttttgctagtatcactcagtacagcagtgaccacatgatatctaagcctttttaatttcatatttgcagataaccatattggttgctgctgagggagtacataagctgccggttataaatagcagcaatgacttaaagacagctctacaaaagatgggtgccataccatcaagcaaaatactggtatttcttgttcgtttctttttttctcttgtaatatcatcaagtttaaattctagtcctaccatccctactcaggagtcattccatgttgattgtattggggtaaaataattttaactgacagaacctggttttcaccaacatctacagttcggtaaaatggtatttgctccaaaatttgatccagccttgtccaaaaatagttccgtagtccatttctgttgtatgaggctgtcagatctaatcagcaaatttaaaattgcagcanatcaatgttgtgttgtagtgacatactgacatttaatanacatcttgctagagtacaaaacgtttagtccaagtaagatgtagtaacttagagatggaaccacaagagcctcacgaattcactctaaaaaacaagggaaaataanaaaagggaaaagagagcta

SEQ ID NO: 41083 - DNA, 409 bp, Zea mays
  Clone ID: MRT4577_137472C.1
ccggccgggattaatccgtccgttaccgagtcgcaaggggcaagagaacgagccacgtcgaagttattacgtgctgtcgccaagctagtgcctatggcgagggtggcggcgatgcatcagaggccctgactcctgtcgctcgatcagtggcagaggtcaaacgcaggccacgcttggattcaccagaatcacacccattgcttgtcgccccggcgcccgcgcgaccatatttcggccgccgccaattcgggcctgttcgtaaggcctgcccccgcgtgattcgcgctaatatccgctgccctcgtgcgcgactcctagtgattttatgatgagcccttggcttttccagaccctcactttgtttccagtcttcgagctgatgtggtgccgcgctatcttcaagcttgcg

SEQ ID NO: 41084 - DNA, 290 bp, Zea mays
  Clone ID: MRT4577_137473C.1
gggggggaaaaattccaatcttttgattatagcgggcccaacaagcccaaaggacccctcaaaactttaacaaggcgggtttaacccatgagtcccaaggtttgaacaaaaagctaaagggcataaattaggccctctaatgaaggacccatttttttgatggaggaaggtccccccaaaagcccaggggcccttccaacggtccctggggaaaccaatgcccttggcctattcgggaaagcacctcctgcagaaaaaaggcccctgcttcccggccaaacccggagggg

SEQ ID NO: 41085 - DNA, 411 bp, Zea mays
  Clone ID: MRT4577_137474C.1
gctttctttcgtccgctgacctgcttgcggcggcggcccatctaaagccaaattccccaagccacaccacctgcacactacaagttagggcttgctgccggcgatgtcggatcggctgacgtcggaggtgccggtggtgcacgtggacctggagggggacgacgacggcatggacgtctacaacaccaaggaccgtcgcacctgcatcctgcacgactcggccgagccctcggaggatgacgacaatgacctgcgccacggggacaccaacaacaacgccctgatggtgccggtgccggccaggagtaaacgcggggatgacacggtcatagggcccgacatctccggttgttgaccccaagacaaggaagacaggagcaagttggatgacatgctaagcctgccgtccca

SEQ ID NO: 41086 - DNA, 649 bp, Zea mays
  unsure (1)..(649): unsure at all n locations
  Clone ID: MRT4577_137475C.1
gccggccgggtccggatttcacgctgctattttntctcccgccgtcgtcgtgctcgtatctatgacgtctcaccagaccttccggatcaacaagaacatggctgagaatataggccaggaacgcccttatacctaatgcatccatgtgcttcctgactataacctgaagtagaaccccgagggcaggcacgggcgccttcttctctacggatgcggaccggcggaagtgtgcgactgctgagaagcaagggtagggcacgagagtgatcttctccgttgtacattgtctctgggtcggagaactcgccgtgatgctgtgatgcttgttngaagattctgatgggtgatgacgtgaacagaaaacaggtggtgcggtgcgtgacgcccgacttgcttgccaacttgattatgcgtagaccgatggagcctcgtcccttcaagaaaagacagacacatgccgtggacgagcagctgctcatgagcaagtgcgtcccccacgttggagggattgaggagcgacgttattgacacggtatcctggcagcggaccccgcggacgtggtgctgcacatagtgagccggattatgagcgcgaccgagccggagctggtaatcttggagattcgcaccaccctgggggacgaggaac

SEQ ID NO: 41087 - DNA, 336 bp, Zea mays
  unsure (1)..(336): unsure at all n locations
  Clone ID: MRT4577_137476C.1
gctgttttggctctataattacaatcatagggggcccaggaatcaagtgtttcggataacccncacacgcaacatatcaggaattctctgtacgcatgcatgctgatctacacattaatccttactatgggaagactttatctaaaggaattatctctctttatgaggttgatctcgcgatcgctactaacatgatctactacgtgctatctagcagcgcccaatatatccacgctgaagttattctagccattgatggctacacaaacatgtcgaacgtcatcgaatgtgttgtgcacgcgaacgctaagcacttcgctgacgatggcataacaa

SEQ ID NO: 41088 - DNA, 818 bp, Zea mays
  Clone ID: MRT4577_137477C.1
gcacacgcttccacttcccgaacaaagcaaagcaaagcactgacggacggacggacgggctctgcacgcgggcgtcgcgtcgcctccgcccgccggacacatccccggcaataatgaggccccccggtcggcgccgcgtcctcgccgccggcgcctgcgcgctgctgctggccgcgaccttcctggcggccggcctgttgacgacgtcctccctggcgccgtacctgctgccaccgctggccctgtcgcttccgtgcctgccggcggtgaccgcgccggcggggtccgggtacggcgcggcgccgggcgtggcggcgctggcggaggcggccgttgcgtacgccacctcggagaccgtgccgcagcagtcggtcgacgagatctcgctgtcgctggccgtgctgcggcggcgcgcgccgctgcggctgctggtgttcgggctgggccacgactcgaggctgtggcacgcgctgaacccgggcggcgccacggtgttcctggaggaggacccggcgtggtaccgcgtggtgcgggcgcagtcgccgttcctgcgcgcgcacctggtggcctaccgcacgcgcctcgaccaggcggaccggctcctggccacgtacaggcggcacccggcctgcctccccggcggcggcggcggcaacgacaccctgcagctgccgcgcgtgcgcggcaactgggcgtgcccgctggcgctgtacaacctgccgcccgaggtgtacgagaccgagtgggacttggtcatgatcgacgcgcccaaggggtacttcgcggcggcgcccgggaggatggccgcgatatggacc

SEQ ID NO: 41089 - DNA, 176 bp, Zea mays
  Clone ID: MRT4577_137478C.1
tgcacgctaggtcggcggaagatatgggcgccgaggtggacgccgctgcacgtcgcggacactccgcgccctccgatgcaccaaggacctccactccacccccgacggcgccccaacccctatccaccgacggagaacaccaaaatggacaaccatgagatggcagaagcgccaga

SEQ ID NO: 41090 - DNA, 312 bp, Zea mays
  Clone ID: MRT4577_137479C.1
ggggcgggcacattttaaaaaatccaaacgggaaagggggaacattattcggatacttttaattcaggcaaaacgacggggccgtgattttaaccagcaacttaaaggaacgagggaagcacacacacatccattattgggggacggacagggccccaggggatggccgagtcattcatttgggagattaaaaccccacccgggggggggggcccccgggacggggtcgacaaaaatgcggccccgggggggggggaaatccagggtcaccggggggcccccgggccgccccacaatgtcggggttgggctt

SEQ ID NO: 41091 - DNA, 755 bp, Zea mays
  Clone ID: MRT4577_13747C.1
acctccttgcgctctagcacatcaaaccatgccgagcgcagctgccagcggcgcttcggttgaccacgccaatgacaacgaaggatcatacgccaggcgatagacctacttatacacgactcttctcctccccacgcgatgctgtactacgcagaactagtcgagcaaagcgaggataggattggtgagcttggctcacatctgttccttctcgcgaatgaggtctcacctatgacctcgaagaaaatgccaaatcagaaactgtgatcagacgagacgcgagattgctgttgccgatatcttgcgacgttccacagctctccactgatcttacgattgaaacaaagttgttagttctacagacaaggcaaaaacaaattaagttatagatcaaatggactctcacgaacagccgctggatgacgcgattccttagaatgtgctgatgaagctacaagctaaccctttttatgtctacgtgacaccccttgtagtgtgagcttacctctacgtgctatcagacaagagaaatttgctgcgctactgatatgcgagcctgctcggaacaatatgtggacataaggggaactatgagaaaaatttcattattgctgagccatacctgttctgaagaccaaagtcactactgactccccattcacatatgactaaactgtgcatagagtgatatctgaaataatatcatactgccagagagatttcgagggcactgtatatcgaagtctcatcctaat

SEQ ID NO: 41092 - DNA, 188 bp, Zea mays
  Clone ID: MRT4577_137480C.1
ggaaaaccggggaattcctacggggaatccaaacccccaggggcaaatggaaggggaggaatataacacacgctttccttggaacgggggaaaatagagggccccacaagaaaggggggccgtcgcaaggggcccaaacaagggtgacccaaggcttgtgggggaaaaaaaaagggggtcccccccca

SEQ ID NO: 41093 - DNA, 126 bp, Zea mays
  Clone ID: MRT4577_137481C.1
ttttaggcatggatagataccaaagggtagagaagcctcggaatgcacgcccatcaacccgaatgggatcaaaatcacttcttaagggagggtgagggaccatatcaactattggatggcccttct

SEQ ID NO: 41094 - DNA, 711 bp, Zea mays
  Clone ID: MRT4577_137482C.1
cattgggtacctcgaggccggccgggatgtgccattctcctcgatcctatagttagctgccgctacccaagatgcagtctcagttctccctctcctctcacttaatacacaacaatggggtagctctagtgtgccgccatcaccaacccatctttcttcaattataaacctataaaatatgatcattgacccaagcctcagcgagtatggctcattgatttttgcagtggcacatccaggaggggcggtaggggcataactttgattgaaccagttcattgctggttctgctaggaggaggttggatttcacaagcagaagctctcactcagacgcactcaggtgagcgcacaccaatgggtgaccatcaaattctccacacaagtgaaggattacgcgaaacatgcatgttagatcatcacgaccagaaacagggaaaggcaagactaagatatctcgcaagagtatcaactatgcgtaccatctgatgaatactacatctaattctccaatgcaggattatatagtgtcatatgaccgacaagatgatgaacatgatttaggattgatagctatattcgatggacactctgtatcacactgatgcatacttatttggatgccatcttttcaatagaatcatgagcgatccagaactacttgagtgatccacaatgctgctatccttaatgcataccttcttccagatca

SEQ ID NO: 41095 - DNA, 926 bp, Zea mays
  unsure (1)..(926): unsure at all n locations
  Clone ID: MRT4577_137483C.1
cgttgctgtcgattttgcaaggatcgaggctggccgggccgggaaccaaccccggccgtcagctggcaaaatggaggactcgagcctgttcctgcagtgggcgatgagcacgctgcggcatgagcaacaacccgcggcagccgtcaacgacgactgcagcagcgaggcaacgttcccctcactccaagcgctccgcgaggcctcgcatgcggccgagatggtccaggagctgatcggagaagccccagcgaacagctggagctcgggcgacaccaccgacggcagcataggaggcaacagcaactcggtccctggccctgctgcggcggccatggagcacgatgtctggcctgctgcgtcgtcgaagacctctccggccaggcgcgccttgagcaggagcagcagcgacaccaaccctcccgtgagctggaacttcagcgccgcagcctcggcacagctggccggcagcgccgacggcatgctgccggaattcgcccccaagagcgccctaccgccggaccaagcgtacggatcaccgcgggcaaggagagccggcttgaagagcctggcgggatccatgtcgtcggcggcgtacgctcaagaccacatcatcgcggagcggaagcggagggagaagatcaaccagcggttcatcgagctctccaccgtgatcccaggcctcaagaagatggacaaggcaacgatcctttcagacgcgaccaagtatgtgaaagaactccatggaaagctcaaggacctggaggctggcggcagcaaccggcgcaagagcantcgagacggtggtgctcgtcaaaaggccgtgccctcatgctgcgcccgcgccggacgacgatgccctcccattgtcagcgtcgtcaggcacgccggctgagacgaagacgcagctgccggagatcgaggcccgg

SEQ ID NO: 41096 - DNA, 520 bp, Zea mays
  Clone ID: MRT4577_137484C.1
aagaatacacattgtatttttttttacggggagtttggtacatatgcccagagctcattgtctcctcttaggagaaccgcgctcttgagacttgagagccatgtcgaaaatacgtactagttgagaaattaagcagtagctacgctcattagcaaccctcgaatgtgtagcgcgtggatgaaataatccggcccttttcttcccctcatctagaatcttctagaacgtagaggcaaggacaagaaagaaatgtaagaggagagaacatgggtcacaactcacataggtcatttcgcgtgaaaatttcattgcggttttcaaaagtggcaaatcagcttttatctataaaccagtgaattctaagttttatctggatgtctccttccataaaattcttttcgcctctcttattataatacccgcgtcatgtcatcaaatatcgggatgtatcatcttgttaaaaaaaataaaattatgatgaaactctcactggcaatgacgttaatgggtaagtaggtgc

SEQ ID NO: 41097 - DNA, 419 bp, Zea mays
  Clone ID: MRT4577_137485C.1
tttttgggtttttttttgtttcttttgctttttttccctttttcttttttttttttttgtttgtttttttttaacaaaaaaacaaatcggtgcagttatatcccggggggccccctaaaggtcccagggcccaccaagggggccaagcaaagcaccccctgggtttttgggccccccccccccggcgggcaattaccggacagcccacttcgggccccccctcgacgacccgggcccgggggaacccaatcgaagatcctgggtgccaccgccgcggcgacccccgcgatgggggctccccttcccaggggggccgccccggggggatcaaccggcgccgggccctcagaaggcccctcagcggggggggacgcccccccggcgggggaggccccccgggaagggcccaaccccccgcc

SEQ ID NO: 41098 - DNA, 347 bp, Zea mays
  Clone ID: MRT4577_137486C.1
ccgtgcaatctgatggagctaatctggactgccgcaaattaacactgcatatttgcatagctaggactattaagactaggagtattaagactcttctgaaactcttctgaaaattaacaggattgatggatcaatcaataggcagcgaccagagtaggagtagctaggagtgatggatcaatcaataggccaacaatctggccgtcttggcgaggcacttgtcgggctccctgacgatgtagaccttgtcggcggcgacgttggtaagctattgcctccctgtacgcgctgtactccggctggcggtcccagcagaagcggcccgcggcggggcccgacgtgaagtt

SEQ ID NO: 41099 - DNA, 197 bp, Zea mays
  Clone ID: MRT4577_137487C.1
ttggtctaatatggtaaagggctcgggaaatgatgaaatgttgttaggggtagcggacgaagattagagcattccataacgttaagtctgaaaaaattaataaaagactttcttgatgcaaaaactaagataacggcaagtccaaaggcctaaacactaattcattttaaaatgacttagcagaagaaggattagat

SEQ ID NO: 41100 - DNA, 779 bp, Zea mays
  unsure (1)..(779): unsure at all n locations
  Clone ID: MRT4577_137488C.1
gtacgcctgcaggttccggtccggaattcccgggtcgacccacgcgtccgcagagattaagaagttgctctctgagtcgtgtttgtggtggcactgatgtgattcactatggctggtatcacacgtacagtggtagctgctctggaataaaacttacagtaattttttaaaaggcatcaattgtatatgacaagatgacagttactgctaaaccatcatgtctacagtgttctgtattcaggaacgctttgactgtaaacactcagtttatgttcaccacatgaaagaaagctggtttataaacagatgcttcagctgggttaatttatgttgggcagttcagtgtatattcagtgaaagaaacatccaccctccattgccagcttagaaactcgccttggaagccaaccgcagcagcgtgcagtccatcgctgcttttgcgccctgtatccgtgtgcacttagttcagtttgaatattgtgtgctctcagtcaggctttctggaacagtaggtctctcctggtgacacagccattgaattatgacccacgctggagaagactaaagaccaccagttgacgaatttcatttagagtgctatcaaatgtctgaactaggcgtcaggnaaaagggttcacaatagccctcanacactattttaaagaanaattattctaacaagggaaaaaatgttgacccactcccacttaaagctgaaaattctggttaattcaattgcagntatagtaataaccttcataatattttcatgcgcttta

SEQ ID NO: 41101 - DNA, 619 bp, Zea mays
  Clone ID: MRT4577_137489C.1
gagggtggagatggaggagctcctctacgcctacggtgtcgacgtcgtcttcaccggccacgtgcacgcgtacgagcggtcgaaccgggtgttcaaccgcgagaagatggcgacggcgcacgcggacgaggccggccactgcccggacccggcgtcgacgccggaccccttcatggggggccgcctctgcgccgccaacttcacgtcgggccccgccgcgggccgcttctgctgggaccgccagccggagtacagcgcgtacagggagagcagcttcgggcacggcgtcctggaggtcaggaacgacacgcacgcgctctggcggtggcaccgcaaccaggacctccatgccgccgccgccgccaacgtcgccgccgacgaggtctacatcgtcagggagcccgacaagtgcctcgccaagacggccagattgttggcctattgattgatccatcactcctagctactcctactctggtcgctgcctattgattgatccatcaatcctgttaattttcagaagagtttcagaagagtcttaatactcctagtcttaatagtcctagctatgcaaatatgcagtgttaatttgcggcagtaccagattaagcttccatcc

SEQ ID NO: 41102 - DNA, 609 bp, Zea mays
  unsure (1)..(609): unsure at all n locations
  Clone ID: MRT4577_13748C.1
gccggccgggccgggatcctcttcctctccctgtctctcacctttcatcttccctgcaagatggatctgccggcggtggctgccatggtgaggtcatctccctcatacgaccgtggctgctacaacacaagctcgggtgctccgtcgcctaaggagatcccgctgccaggcgcccgcccgccattcatccatggtggttcggccgccggggaacgccgcccgccattcatccatggtggtttggccaccggggaacgccgcccgttttgcaatactttctgctggtgtattcagttcagtttatgcacattctgctggtatattcagttcagtttgacagtttctatgccaatactttctgttctgttcagttctagcatcactggtgcattcagttcaatttttatgccaatagtttctgttcagttaagttctagcttcactgaactggtgtattcagttcagtttttatgccaataatttctgtttggttcagttctagcatcactgagctgntgtattcagttcagtttatttggtgtatactgaaaaggaactctgtcagatagcatacgtttatattccaaaaaaaaaaaaaaaaaagcccta

SEQ ID NO: 41103 - DNA, 1105 bp, Zea mays
  Clone ID: MRT4577_137490C.1
ggccgcttttttttttttttttttcggtttcatgcttgcagccgtctctgcaatcccaacgacgttggccctacgcgtgcgtgccctccgacccgacttgcctagtgcgctccctcggcgtacacctgcttgaaacttttcctctcgaacaagttttcgacccatcgttccgtcttggcgccgactttggccccgtcggcaaagttcgactcgagttgcttgagcgctttcgtgaggtcggaaaggtcagtcactccggcgcacgcgaggatgcgagcgaaccaagcgccgacgtgtaggtctgcgagggaaacttggtcaccgaggaggtaaggcgccgtctcttcgagtttttgctcgacgagggcgagggttttcgggacctgggcccacatcgtctcggacgcttgttgccacgccgccgaatcagctttaccctcgtacatggcgatcaagctgccattctccaagagcttcttctcgtaaaacgccttcaacttggcgtccgaatcgcccacttcctttgcgtaccgctcgagcgcgctttgtcgacccttcaagaagcctccgaccaacccattgaatttcgtgtccctctcttgctcgttgcggaacgagagcaggagcttgttgggatcgggagcttcctccttgtggacgtgagcgataagttccttcgagtcgcccgaacgctgaacggtcgccggcgagagggccggggcgtggtgggtcgcggaccgagtcgaagagaggtcgaggaagtcgcagatgtccttcgtgccactgagcgcgcgaaacttggtcgggatggtgtcatcgagcgtgtgttcgtacggtacgacgaggacggggacgtgtcccgtgggagaaagtttgaggaacgcaggggaaaagttctctcccttgccgaggtctaccgtcttctcgtccaactcttcgtccgtgtagttcttctcgagagctaccagtcgggggacactggcccatacggaacccccgaacgtgtagagggtcgctcgaggttgacgcgcagttgtagttgccatattgttcgttctcggttggtaggcgaatgaaacgagtcccggccggcctcgagggtccc

SEQ ID NO: 41104 - DNA, 2229 bp, Zea mays
  unsure (1)..(2229): unsure at all n locations
  Clone ID: MRT4577_137491C.1
tcggacgcgggggcccctgggcaaattgcggtggccggggcccgccgccgcgacagctccgtccgtcctcggttccgctcttccgtccgatccatacgtttccgttccctataaattctttaaattcccgcaagtcccgtaccgctcagccaacccaacacgacggcgagtcgacggcgagtgggagggaacaccgcagcagcgatgcgtcggggctcgctttcgctgctgctgcttgcggcggtggcggcggtagcggccaccgcggttcccgccgagccggcgtcgacgctgtccgggccgtcgcggccggtgacggtggcgatcggagacaggggccacgcggtggacctgccggacacggacccgcgggtgcagcgccgcgtcacgggctgggcgcccgagcagatcgccgtcgcgctctccgcctcgcccacctccgcctgggtctcctggatcacaggggactaccagatgggcggcgccgtggagccgctggaccccggcgcggtgggcagcgtcgtgcggtacggcctcgccgccgacgccctcgaccacgaggccaccggggagtcgctcgtgtacagccagctgtacccgttcgagggcctccagaactacacctccggcatcatccaccacgtccgcctccagggcctggagcctgggaccaggtacttgtaccggtgcggcgacccggccatcccggacgccatgagcggcgtgcacgcgttccgcacgatgccggccgtcgggccggggagctacccggggcggatcgccgtggtcggggacctcgggctcacctacaacaccacctcgacggtggaccacttggtgcgcaaccgccccgacctggtgctcctcctcggcgacgtctgctacgccaacctgtacctgaccaacggcaccggggcggactgctactcctgcgccttcgccaagtccacgcccatccacgagacgtaccagccgcgctgggattactggggaaggtacatggagcccgtgacgtcgagcatcccgatgatggtggtggagggcaaccatgagatcgagcagcagatccacaacaggacgttcgcggcctacagctcccggttcgcgttcccgtcggaggagagcgggtcctcctcgccgttctactactcgttcgacgccggcggcatccacttcgtcatgcttgcgtcctacgccgactacagcagatcaggtgcgcagtacaagtggctggaggcggacctggagaaggtggacaggtcggtgacgccatggctgatcgcgggctggcacgcgccctggtacaccacctacaaggctcactacagggaagccgagtgcatgagggtggagatggaggagctcctctacgcctacggtgtcgacgtcgtcttcaccggccacgtgcacgcgtacgagcggtcgaaccgggtgttcaactacacgctggacgcgtgcggccccgtgcacatctcggtgggcgacggcggcaaccgcgagaagatggcgacggcgcacgcggacgaggccggccactgaccggacccggcgtccacgccggaccccttcatggggggccgcctctgcgccgccaacttcacgtcgggccccgccgcgggccgcttctgctgggaccgccagccggagtacagcgcgtacagggagagcagcttcgggcacggcgtcctggaggtcaggaacgacacgcacgcgctctggcggtggcaccgcaaccaggacctccatgccgccaacgtcgccgccgacgaggtctacatcgtcagggagcccgacaagtgcctcgccaagacggccagattgttggcctattgattgatccatcactcctagctactcctactctagtcggtttcggaagagttttattctcatttaatgcagcaaatctgcagtgttaatttgcggcagtaccaaaaaaaaaaaaaaaaaaaaaaaaaaaaaaaaaaaaaaaaaaaaaaaaaaaaaaaaaaaaaaaaaaaaaaaaaaaaaatttccccgccgcctcgggcccccgttggtttaatttttttaggggcgcaccgatcaaaaggggcctgcctcctcctcgtcggcaaaaagatggcggtgccgttgctgacaaaaaaaatcgtgaagaagcgggtcaagcagttcaagaggccccacctngaccgttacaagtgccttaagccaagctggcgcaggccaaagggtattgactcccgtgtc

SEQ ID NO: 41105 - DNA, 287 bp, Zea mays
  Clone ID: MRT4577_137492C.1
gaacaagggcagggtccaaaaggaccccaaactttatttgatgttacaatacggtagtacaagccagagcaacaggacacacaacaaactgaaaattacaacgcagtccctgaaatatgcagaaaggaccccaaagatctgaagaggaacgcaatcaggtccaagccactcccgatcgactccaaactcgccggcgccggggacatcaccacttggtccgacgagttcttcaccgcagcaagccgtgaacatcgagctagagtagcactgcctcccatatagcttca

SEQ ID NO: 41106 - DNA, 296 bp, Zea mays
  Clone ID: MRT4577_137493C.1
cttttgtctttgtttttttttcttgtttcatttaatctactctcaatcccttccttcatttctactaggataatcgccgtcatcaacctccttatcaactcttccaccacaggaggagaacaacaccgaccccccaactataacaaggatcgaaccaccacacaatggcaacaaaaggcaacaccccagaccatggatcacagatctattcccccaggccccaaaaaaaaaccaaccagggccctgccaagggggagccgcaaacaaagcctgaaaaaacaaaagcagggccatac

SEQ ID NO: 41107 - DNA, 512 bp, Zea mays
  unsure (1)..(512): unsure at all n locations
  Clone ID: MRT4577_137494C.1
atccgatcgcacatgnacacctccgtcgctccgtcgcgtcgcgcagtgtctctgtgagcctactacagtgcgtcgcgccaacggttggtgtggtgtgccgcagcagggacgcaggacgtgcctcgatcaggcgcgtgcatcagcccatgctgacccgcctccacgagccatggaggccgaggaggctggccgggcgtgcgctcccgtcccgcgcgcacagcctgccgccgaagccgctgctcctcgcccgaccaggcgagactggggagtacccggtgatcctgttccaacacggctacctcgcctgcaactccttctactccccactgttctagcacggccccatcccttggctttgtcgtcgtaccgcctcacctgtacaccatatctgggggcgaccccaccgatgagatcaacgcatagtcctccgccatcgactggctagcccccgccctgtccgtaactctgccactcggcgaccgctcgaacctaacccaggtgtccatctccgg

SEQ ID NO: 41108 - DNA, 474 bp, Zea mays
  Clone ID: MRT4577_137495C.1
aaccggacacaagctctacaaagagtggcggtcaagggaatacccgccttcgcattaaaaaagcttaacctggccgagccctggaaattgggggaaaccagggccttcttgacataaaccaaaatggccttgaaggttccctttggcttggactttgccggaagctttattttattataagggggaaaatttttaaggctaaccggcagatccaccaccgaaaccttgaccggtgggacaacgaaagaaatttcaagcaatttttcattgaagaacagaagcactttggcaaccagcttaacaagttcagggctggtgggaatgaaggtgaaactaacaagcctttcaacccttcaagccttaaaagaagggccattaacaggcttctgggtaagaatgaagggatgaacagggggcattaaaaccttaacaattccgaacttggcattggtgaacttaaccagccgaacaagg

SEQ ID NO: 41109 - DNA, 414 bp, Zea mays
  Clone ID: MRT4577_137496C.1
tacaccacaagatgttcggttgcgagagaaatctcttacattcgagatcggagagacttaagagactgcctgaagagactgatacgcttcagggagctaagtgccctactatgagcacgacagagagagacttcaagctgcactgagggagagggccaatactctgaacgacagattgtcgctgtgctgggtgaagacggtacatggagaggtactttcatctcaatgctgggtgcgctgtagtggccaggcccggaggggggaactgtttgtgaaatgtctggcttcaatgtgtcgcacaggccccaagagattaggccctaattgcagaataccgcgaggcatctgttgcatcataaaatctcttactcctataggcatccgcaggttgtgtctgatgttgtgaaaccactg

SEQ ID NO: 41110 - DNA, 347 bp, Zea mays
  Clone ID: MRT4577_137497C.1
cgacccacgcgttccgttcctgctttttctcattttctcttaccttttcttcttctctacccctatcctatcctcgggcagggatctcatagagtgccataccatcccatttaagaaacccatgaaccacaataatgctgcgtaccagtcccccgaagcacccatcctctgcatcaataactgtggcttattctgcacagcttcgaccatgaacatatgctccaagtgccacaaagagatgataactaatcaggatcaggccaagctggctgcctcctctatcgacagcatcctaaacggcatctacgccttcatgtatccgttttttgctagcaacaacaccttat

SEQ ID NO: 41111 - DNA, 767 bp, Zea mays
  Clone ID: MRT4577_137498C.1
tgtttccggagcactcatcagcagctatcagctctatcaaaacacttgccatctaccgaccgccgcattacaaacagcccgacgagctagcagagcgttaggaacctcctccaggaacatggcccgcacgcatcaggtggcagtactggacacagacgtgccggccttggcgctcctcgcgcgctccgttcgcaatcgctgcctccatctcctacaggtgcggccatcctgtcacccccaaaaatctcagaatcgtagctattagggtttctacctgtcgatctagaaataaaccatccgtccgaacgcgctgcggaggttggtggcacggcgaggctgtggctattcgtgtccggagacgagcagcgtgagataacacggctccacctcctacccctcccaatcgacgcaagcctctactgcgaacccgtgaagaaatgcgcggacgacaccgaagccacgccgccgcgctcatgcacccgcacgaccgacgatggccgcttgatgcaatatccgacgacaaagaaaaaggtccagagacacaattgaattgccgtccaaaagatcacattctgcaacaatatctcctacattaattattttatgctttccatgatatcgtcattccagttttccttcttaattactgagaccatatacctgatcttctttgtactacatttcaatgacatatgtttttatcttcatgtacaacatgttatacaatgttctctattctattcaaaaaaaaaaaaaaaaaagcggcc

SEQ ID NO: 41112 - DNA, 756 bp, Zea mays
  Clone ID: MRT4577_137499C.1
cattgggtacctcgaggccggccgggacttttctgcgccgccgcctccgactcgtctcttcgttctccaagcgagcgataatccgaacggtgctgagatgttggtttatcaagacctcctatctggggacgagctcctgttggattcattcacctacaaggagctcgagaacggcgtcctgtggcacgcctagggaaagagggtcgcccaaggtcctgttgatgtagacattggggcctatccatccgccgagggaggagaggatgaaagtgttgcatgacacacccgcgtaaggtgattgatattgctgacacattccgtcctacaggagccacctccttttgacaagaaatcatttgtctcttacataaaataatacatgctgattctcactgctgtgttgaatgcagagaaagtggatcgagatcagaaaggctgtcaagggtgcgaccaagtgtctccttatgaagctgtaggaccttcgattttttgctggtgagagtcatgatacgacgaaccgtacgacgagattcgcctattacaaggatggtgccactaatgccgagattcctctatttctctcatggacttactgagatcgagtgctagattaactacccatgatgggcactatatatgttctattgttatagccacatatatagctgccctgtctgtgctgaactcaaaggttttttttaagaaaaaactgtccaagattggattgcttgttaaagctaaatattgttattgacg

SEQ ID NO: 41113 - DNA, 401 bp, Zea mays
  Clone ID: MRT4577_13749C.1
ttttcttcttcggcacggacagatatatatcatatgggccattttaaaatgcggccagggcaaaatcggaattgcatttataggagatacataggctacacaattttcgggatgtggtttggcacagtcctcatatccctcgtatgaaatgaacaggcgagaggtctaggtctatcaagcgcgccgttggatgcctattacacagcgcgttccgtatatgcggcggtgtcggccgtgctggggtctcacccggcggggattacatgtccttagacggccttagagcctcactccgtggtgacttggacagtgattggtcccttgatcggattgtcgctgtgcttactccacatggctccccacgagtgctttagaggctcgtaccagtgtgagcccttctc

SEQ ID NO: 41114 - DNA, 632 bp, Zea mays
  Clone ID: MRT4577_1374C.1
cgcggggaacgaccatctgacggctacccgcctgcatcatacagagaccagtaatccagcgcactaggagcagcaatgcgggccaacacatggtccatgcttaggctgcctgctctttctgcgtgcgctgcctacgcgaccatgtgttcctcaatactcgcaagctactatggctgcccttcttccgcccatacctttcctgaatgaccgctacaggacgggcaaacccagccctttaacgctacagggtacagcaagcgaccgcatcctgctacttacctttatcacccctgctgtttcaacaagctgccagccctatcgttggtgcagccgttggtactagccgtcagggctcaacagctgcagaagctcatgctaccggggatcaggcagacaacttgggctaacctctgtccctacgctgagacacaacaatccattccatatcaccaactgtctgcactgaaccctgctgcttatttgcagcaacagcaactactaccatgctgccagctagttactgcctactctcagcagcgacggttgcttccatgtaaccaattcgtcggactgaacggctgtggttatttgcagcagccaatactactaccatttggccagctagctacaac

SEQ ID NO: 41115 - DNA, 848 bp, Zea mays
  unsure (1)..(848): unsure at all n locations
  Clone ID: MRT4577_137500C.1
cctctaggtttcaccgccgccgcctccctctactcctcgctctcggccacgctccgcctcctttcctctaccgtcctccgcgccgcctcgccgcctcgccggacctccgccgcctcctcctccggagctacatagaggtttgattgagcgagatggggttgagggacaagaagaggaaccagaggcgcgtgctctcgcgccgctcggccggccccaagaccggcgagggcaaggatttcctgccgctggaggggaaagagcagagggtccgggagaagaagcagcccgaggagccggagagcacggccaccgtcctgtacatcggccacatcccccacggtttctacgaggaccagatgcaaggtttctttcagcagtttggggctgttaagagggtcagggttgcccggaaccgcaagacagggaagtccaagcattatggattcattgagtttgagaaccctgaggtggcgaagattgtggctgatgagatgaataactacctgttgtttgagcacactctgcaaattgcgcctgtcccaccggagaaagttcatgccaaattatggaaaggtgtgcggaagggatttataccagtcgaccgtgtagcaattgaacggaagcggcttagtaaggataaaacagtggaagagcacaagaagatgctcgaaggaattgtaaagcgggatgagaagcgtcgcaaaagaatcaaggctgctggtatcgattacgagtgtccggcccttatcggaagcgttcagccttcagctaagaagatcaagtttgatgaggattagctatagagaaggcagatggatttttatctggtgggagcgacggnactctga

SEQ ID NO: 41116 - DNA, 486 bp, Zea mays
  Clone ID: MRT4577_137501C.1
ccggccgggtgctcacaggctcctcctgccacaacaacggcactgctccccaccctcccgtttacactcaccctgcccagcccaacgttcccgttgttccaccaagcccgctggccagccccctgtctacggccagcctacccctactcccgtccctgtctccggtgctgcccgtttcggtgctcccgttgccctggtcgctggtctcgtcatggccgctttcgctctgtaagcggagtcacgcacttgatctttggttctagcgtggcgtcatgacttcatgactgcattttagagggttttctcatttcttctgggtatggagcagactgggtatattaggactctgttgcgcacatacattgcttcttttgttggtatttatgagacggaaggttttctggattgttaatgtattgaggaaaaaactataaaacccaatttgggttatttgtcttgaaaaaaaaaaaaaaaaaacccgcggcc

SEQ ID NO: 41117 - DNA, 926 bp, Zea mays
  Clone ID: MRT4577_137502C.1
aaaaaaaaaaaaaaaaaaaaaaaaaagaaaaaaaaaaaataaaaaaaaaaaaaaaaaaaaaaaaaaaaaaaaaaagggggacctcgaggccggccgggaagcgaaagctcaagcaaatacaagctctcagttagaccacactcaaaccagccacggacagcctcaaaatcccgagcaggagctcgctcgtagccccgagaacccgaaagctctgcagcgagatgtctcccgagctgaccggcaagatggccgccaaggccgccgccgccgctgcggcggtgaagcccgcgacgagggcgtacgtgacgttcctggcgggcgacggcgactactggaagggcgtggtgggcctggccaagggcctgcgcaaggtcggctcggcctatcccctggtggtggcccttctgcccgacgtgccggagtcccaccgccgcatcctcgtctcgcagggctgcatcctccgcgagatcgagcccgtgtacccgcctgagaaccagacgcagttcgccatggcgtactacgtcatcaactactccaagctccgcatctgggagttcgtggagtacgagaggatggtgtacctggacgcggacatccaggtgttcgagaacatcgacgagctgttcgagctcgagaaggggtacttctacgcggtgatggactgcttctgcgagaagacgtggagccacaccccgcagtacaggatcggctactgccaacagtgcccggacaaggtggcgtggccgaccaccgagctgggccctccgcccccgctctacttcaacgccggcatgttcgcgcacgagcccagcatggccaccgccaagggactcctcgacaccctccgcgtcactccgcccacccccttcgcagagcaggacttcctgaacatgttcttcagggaccagtacaggccgatccctaac

SEQ ID NO: 41118 - DNA, 1644 bp, Zea mays
  Clone ID: MRT4577_137503C.1
ggccggccgggaaaaaaaaaaaaaaaaaaaaaaaaaaaaaaaaaaccaagggacctcgagctgccgggaaacggggggttggggacctcgaccccggccgggaaccgcaagctcaagcaaaaacacaaagcgcttaaaccacactcaaaccaaccgccagccaacaaacaggcctcctagtcccgaccagaactcgctcgtagccccgagaacccgacagcgcgagatggctcccgagctgatgacagccaagatgaccgccaaggccgccgcggcggcggcggcggcggcggcgaagcctgccacgagggcgtacgtgacgttccttgcgggcgacggcgactactggaagggcgtggtggggctggccaagggcctgcgcaaggtccgctcggcctaccccctggtggtggccgtgctgcccgacgtgcccgagtcccaccgccgcatcctcgtctcgcagggctgcgtcgtccgcgagatcgagcccgtgtacccgcctgagaaccagacgcagttcgccatggcgtactacgtcatcaactactccaagctccgcatctgggagttcgtggagtacgagaggatggtgtacctggacgcggacatccaggtgttcgagaacatcgacggcctgttcgagctcgagaaggggtacttctacgcggtgatggactgcttctgcgagaagacgtggagccacaccccgcagtacaggatcggctactgccagcagtgcccggacaaggtggcgtggccagcggcgaccgccgagctgggccctccgccgtcgctctacttcaacgccggcatgttcgtgcacgagcccagcgtggccaccgccaaggcgctcctcgacaccctccgcgtgactccgcccacccccttcgcagagcaggacttcctgaacatgttcttcagggatcagtacaggccgatccccaacgtgtacaacctcgtgctggccatgctctggaggcaccccgagaacgtgcagctggagaaggtgaaggtcgtgcactactgcgcggcggggtccaagccgtggaggttcacgggcaaggaggcgaacatggacagggaggacatcaacgccctggtgaacaagtggtgggacatctacaacgacgagacgctggacttgaagggcctgccctcgctctcgcccgacgacgacgacgaggtggaggcggtggccaagaagccgcttcgcgcggccctggcggaggccggcacggtcaagtacgtcaccgcgccctcggccgcgtgatcccgtgctctggccttcccccaccgcgcaccgtaccggtggccgcgcgctatagcttgtgtgtgtgtggccatcgcggaacataagaagaatctctcactataaaggccttcgttctgtgtttgcattttggttttggattagggtgtctaatttttcaccagttccttttccccttgtgtaagtgtggagcttactatatagctagcgcccatttcaaggtgctgcaagcgttggtcaggaattgggctagagtgtttgtcctgtaccgagggattatgtgtatttttgctatttcgctcggtaaattaatacaataataaaaaatagggagccgcaaaattatggccaaaaaaaaaaaaaaaaaagcggcc

SEQ ID NO: 41119 - DNA, 323 bp, Zea mays
  Clone ID: MRT4577_137505C.1
tgataataataataataatattatcattttcaacaatcggcagctcccctcaggcaacgaccacttcttcaccatgagcacctacgaccctctcacaccacactccccaaccgccagcttctacccactgtccatcaccaacttccccacggcaatgcaacagggctcctactgctactttccgctccgacaactaccacctctgcaactacggcagcggcggcttcaacgtggtctcggacgccgccacggcgtacagcgccccctacacagtcagcatcgtcaacatttacaacttcagcaacaacaacggcacctgcacc

SEQ ID NO: 41120 - DNA, 206 bp, Zea mays
  Clone ID: MRT4577_137506C.1
cgggacgaccgcacgcgtgcgcccacgcgtacggcggcagtgcgtatagaggtatcgttaacagaacagcatgaaaatggtcagcgttgtcttcatgtgcctggctctgtcaactgccaacgcctctgcaatgcatatgccctgcccctgcacggggctgcagggcttgtactgtgctggctccggactgacgactatgatgggcg

SEQ ID NO: 41121 - DNA, 408 bp, Zea mays
  Clone ID: MRT4577_137507C.1
tgcaggtaccggtcaccaattcccaattccccccacgccgccacgacttacaacaaaatctgctgtggatgatcaacacaggctcacggaccgggtgctgtactgaggcaggactctatgcgagcgcacctttgctcctgaactccaatggcttactttctggacttatgcaaagctggccttgaattgctgctgcacagagtgacattgagcaaaatggatcaaaagcggcagagaatcttggtaacagggttaagaagtcggacccaatgcgctcaattcttgacgaggtacatgttgcaaggtgggccaggatttaactagaatctggagcgagggaagtgaaccctgtcttcaaatcagaaaatcactactaggcaaccattattactttcactttgccagaaa

SEQ ID NO: 41122 - DNA, 464 bp, Zea mays
  Clone ID: MRT4577_137508C.1
gaaaccaaaaaacacaccgactcgttagttattaagagaacacgaattatagacacatgctggagcaactcaacagtgaactggaaaccaggaagcacgcctttgactaagttcccaccaacgcaccatgtattgactataagggttaaactgtcattcacaacaaaactcgactagctgagcccgtgagcaggggcccaaacttagaaaccgatctctaaaacacgctggaagccaaaatgtaacaactctggacgttctcatgcgctgggctctatgtatatggtgggccccacttacagtactactggacacacgatcggcggcgagtgctaacattatacgcatgtcttctatgccgtcttcaacaggttcatgctttgatgctgcccaaggcataccctccatctggacactgaggacagcctgctacagattctttatatgaatctcatcctgccatg

SEQ ID NO: 41123 - DNA, 146 bp, Zea mays
  Clone ID: MRT4577_137509C.1
gtcgggggcaaaagagtgaactgatttgtttaaaagtttgacggggggacatggacctgtcaaaatatgggccattaatgctcaaccaaccacttgggtgcccccaacattgtttcagacattccgatggaaaaaaatttattttt

SEQ ID NO: 41124 - DNA, 503 bp, Zea mays
  Clone ID: MRT4577_13750C.1
ttttttttttttttttttttttttttttttttttttttttttttttttttttttttttttttttttttttttttttttttttttttttttttttttaaaaagggcggggacagtactacagcccaaattgcatcccaacggggaaatttagttacaaacccgggggccaatctctacccatcgccaaaatcacagggtcagcttcacccgggggtacaacaaacaagttttccacgggggccccccggagacagacatccaaaatcgggcagatttcaaaaaaatacagggtctaaaaccccccaagggaaccgaagggcccaaggcgcttaaaaccacccctgaaacgggccctgccgggggcccaaaccccctcccggcttggggtccccccttcctcccgggccccccggggttcccctttttcccaagccttccccttcttttaaagcccttaaaagggccccttttaagcccccttatttggaggaaaagtttcatct

SEQ ID NO: 41125 - DNA, 193 bp, Zea mays
  Clone ID: MRT4577_137510C.1
attccttgttacacggggaaaaacaaagcggccccaaaaaaacccccggaaatgggggtgctcaatggggtgaaaccccccatggaccccaaaagagggggccaggggaccccctccttccactgacccaactattcccctaggaacagggattcgggtttttcaaaacacaacgccgggggtccatgccccc

SEQ ID NO: 41126 - DNA, 754 bp, Zea mays
  Clone ID: MRT4577_137511C.1
ccggccgggacattgccccggcatttgtagttcttcactttttaacccaaccaagtcaaacagaaaaattgcccaccatgtcgtcggagaacaaggaagtcgattactctctggctaacccagataccctcactaagtacaagaccgctgctcagatctctgagaaggttcttgccgaggtttccaagctcgtcgttcctggagccaaaattgtcgatatctgccagcagggagacaagctcatcgaggaagagatctccaaggtctaccgaggaaagaagatcaacaagggtttctctcaccccaccaccgtctccccttcgtcctacgtcaccccctacactcctctcacatccgacgaggctgaggccggcgccgagatcaaggatggcgaggctatcaagatccagcttggtgcccaaatcgatggtttcggttccatcgtctgtgacactatcatcgccacccccgaagacaaggctggcgacaagatcactggccgcactgccgatctgatccttgccaactactacatcaacgaggtcctcctgcgattgatgatcccccctggcactctggcccaaggctccgacgaggagaaggccaaggctgctgcccagaaagcccctacacagggcaagatcaccagccttctcgagaaggttgccaagacatacgaggtcaacatcgtcgagagcaccacctcgtggctcttcgaccacaatgagatcgaaggcagcaagaagattgtcct

SEQ ID NO: 41127 - DNA, 249 bp, Zea mays
  unsure (1)..(249): unsure at all n locations
  Clone ID: MRT4577_137512C.1
ggacggcagaatgcaacgtgagtatttcatcagtagtgtgtggagctcaggacctatcatggagcgattcattgcggcttcgtcctgccgctgacgaatagcaactgactcgctggtaacgcttctaccagtttatgtacctccctcctnacctataaacgtgtgcccggttacattttccttatatcccgaagaccctgatgccagaggatagatacgccgaccacgtggtgcctgacaatatgactg

SEQ ID NO: 41128 - DNA, 106 bp, Zea mays
  Clone ID: MRT4577_137513C.1
aaccccgggagcaaaaaccccacgtggggttgttaccattaaaaggcgggcggggacaaacagccaaacccgggcacaaacctgttaggggagaaacaaacaaccg

SEQ ID NO: 41129 - DNA, 770 bp, Zea mays
  Clone ID: MRT4577_137514C.1
ccggccggggaagagctttttgttgtcagttagtaaaaaaaaaaaaaaaaaaaaaaaaatcctttggtctactctcgactctagtactatacagtagtactgcctcaccactagacacacgcagtccaatcggtaaagtgggagcaatggaacaaccgcaacacgtcaattcgccatcccacatgccgacatggcacgagaacaaaagcgaaaaggcgaccgctatgccttctcggcctcaattctcatcgtcgtcaaagtgtcttgaaccacttgacgcagacagaatggatctgcgatacatctttgccaacagacttatgcctgtcgcttttgccctgccatgggttgcgagcatggtcatatcctgtatcccattcaccaggatcagtttaattgacgccccagactttcttattttggctgcgcttatcagcgtcatcgaagtccttagcatcgtcgcagtctttatctacgcttccctccgctccgacgacgacacaaacagcacctttaaagagaaatgtctccgggtttggttctggtttctgtttatcagccctttcgtcactggtaccatggttgttctcatggctagcgacatttcgtgcgacccagaggatgatctggacatgcaccagccaatctgccaggttggcatccgtctcattaaagccacagcattatgccgagctggaataatcgcatcattccttttcgcgacatcatcatggcttgagcgccgtccagacagcccaccactactacta

SEQ ID NO: 41130 - DNA, 330 bp, Zea mays
  Clone ID: MRT4577_137515C.1
ctgcggtgcaccggtccggtaccggggtggccccacgcgtcttattctagaccggacccaattcctggaccctagccagtccctggacggggccctaaccccgcaccacagtcagacccaaaacctggaccacaaccggccccagagccagacccgaaccctacaccatagtcagagccatgaccattaccacaaccagtcccagaggcaataccaaagccagcgccacagactgatccaaagccggaacccaagcctacagcacaaccagacccaaatcctggaccacaaccagacccaaatccagaatcgaaacctacaccacatcca

SEQ ID NO: 41131 - DNA, 316 bp, Zea mays
  Clone ID: MRT4577_137516C.1
gcccccaaacgcggattactcccttaacaatcattcttatataataacctgacacacacctatccccactatataataatgcacaccattcactaatcaacaccgttgccctctttctatatacaacattacatattcttatagcccctcacaccaaacaaaaacacttagcttgccgatccgcaccatataacaatttgttcaccattgttcacatacctccagaaggcttttggttcttgaagaacacaaagtccacgatctccaccccgagcatatcgctattcatcttgtacaatcccaccccctccttgtt

SEQ ID NO: 41132 - DNA, 837 bp, Zea mays
  Clone ID: MRT4577_137517C.1
atggtcgcgtcgcgtacgggccggccatgtccaggtcttcctcgcgccgacagtcgcgccagagggttgcccagcacgtcgtgcgccgcgagggcggtgctcatgttctggggtggcctcggcgagggcgggagcaaggaccggccggtgcgctttggggcggccggcgcccgctgttgcggtgttgaggtggcagcagccagagaaggtttctctgccgacgagattgccaactccgcctgcacttctggacctccgtccccctggcttgaatggctggttctcgtcctttgtgggcgagagcctttctgccacagcgtctgcccggaagccgttgctgcagctgtcttgccgcccgggatggaggtcgttgccgctgctgtcagagcgggcggcgttaaaggaaaccctcggccgctcttcgatgagccggagccggaggcagcggtatcagcgtggacagaggcagagttggctcggaaagaagacttcgtcggccagagcctgaccgggctgtccactggcgggaccggcactggagtcaagttgccgaggccatgggccgggctgatgtcctcgggggacagctggctgaggcttcggggcgaccggccgagctgtctgctcgagccggacttctggaggagaccctggcggcgatggcccgggcgtggtgctgacgtcgtccttcggagcggagatcctccgactgtgtcgccattcgaggctcggtcggacttcgccgaaggtggtgttgacgtcgtccttcggagcggagatcctccgactgtgttgccgttcgaggctcggtcggacttcgccgaaggtggtgtttga

SEQ ID NO: 41133 - DNA, 354 bp, Zea mays
  Clone ID: MRT4577_137518C.1
tttgtcctttttttttataccatttatttttattgttgcaaaaaagagcacgtacacagaccgtcaagagtttactattatggtccgtcaggccgatgcataaaaggcacgggctaagaggccaaaagcccaggcataataaggtcttacacacttgccaattgacatgcccacaaaagggtgaacgaaggcttaccgtccagggggaaaatcgagcccacagtgaatgcggcgcgcaaacaaaagaatactacggatagcggacagagcacctcggtcagaatagtacatagggccacggcgcgaagaataggaagatcatgtaggaacaccatcagcccaaataatttttcc

SEQ ID NO: 41134 - DNA, 290 bp, Zea mays
  unsure (1)..(290): unsure at all n locations
  Clone ID: MRT4577_137519C.1
tcacttaataaccctnaggccttcccgcccatggccacacctcccccttgccgttctcgcccctcactccgctcccgcaccgcatcgcgcggntggcttgcggcataccgatggcttgttagacggtcaccgtacgggctcggtcgctcagcgtcactatctgaagcgtgctccgcgtcactgacggcaagcaagtcacagaccgatatcaccgcactatggnagtgagatcacctcgcgcgcgcggccaagaacccctcacacacgagcagcaaggaaggagaggtcct

SEQ ID NO: 41135 - DNA, 245 bp, Zea mays
  Clone ID: MRT4577_13751C.1
gcccgagcaaaccgcacgcacactctggacgctcgctggctggctgcaactgcaaggcgccggcaccaaccgcagctataataggtgtcttgaacaggcaggcagagcacggcaggcagggtaggctccatcatatccaacgccaccagctagcagcagcagaagcaggatggccacacaccagcacacctcgactcgccaccctactggggctacaggcggcgcgcgtcaccgctgttgagcgc

SEQ ID NO: 41136 - DNA, 606 bp, Zea mays
  Clone ID: MRT4577_137520C.1
aaaaaaaaaaaaaaaaaaaaaaaaaaaaaaaaaaaaaaaaaaaaaaaaaaaaaaaaaaggggcgggccgcttcgcgatctaaaaactagtcaccggttgcgacaccccttggcgagcttctccagattccccacgacgaccaaaaaacctccgttgcggcctctgatttttatcctcggatcgactcgaatcggaaaaatcagtcaaaatggtggttggacgtttgacacactatgcttttgacgccgttcttctctcggcttttctcgctggcgtgaagcgatcgaccggcttgactttcaagagcgacaaagttgctggcgagaacaaggaagtctccaaatggatcgacaagtacctcggcgtcggcaaatgggtgatggaccagtctgttgccatcgccggctccagcggtttttttgagcgcaagcgatgatttctcgcaactcgatcagaccacctccttttgagttgccgaattcagataccgggttggtgacatcgcggcgagggtagttgccaaaccatttcgctccaaccggtctggtttcatggaactctgaggttgcaatttttttttccttgccaaaggagtgcaagtgcgtt

SEQ ID NO: 41137 - DNA, 293 bp, Zea mays
  Clone ID: MRT4577_137521C.1
caaagtgtaggttttgaatacaatcccagcgatgcgctagaactgcaagagctccgtactgcaaagaatcaagcgggggcctatgggaccaggtggatcatgaaaaaaaaacaacttacggtggcagcacacataagctcagggttaacacaacacaatgttccggaccaggctactcaaaaacctaccgacagaagctgcctgctaaaacgaactcaggatgaaccacactggagttacaaggagtcgatgtatgaaaacaaacttcagtgatccttttcttcaatgagaat

SEQ ID NO: 41138 - DNA, 470 bp, Zea mays
  unsure (1)..(470): unsure at all n locations
  Clone ID: MRT4577_137522C.1
agtcacttacctcggncgtcttcacaaacgcctgctcgctccccatccttttccgtgctccgcctccccgccccgcgccctccgtcgtgagagcccgtcgagccccccgcgcccccgcgccaaagatgacggagggcatctcgatccacatcgggcaggccggcatccactccggcgaacgcgtgctgggaactttactgcctcgagcacggtatccagtctgatggccacacgaacggtgacaagaccatcggagggggtgacgacgccttaacaccttcgtcacgtgagacctgagccgtcaagtacgcggcccgtgcggacattcgatgatctctcaggccaccgtgattggcgaggtacgaaccagagactaccgccacttcgtccaccccgaggagctcatgctcgggaaggaagacgacgccaacaactgcgcccgaggtcactacacaatcgggaaggagatt

SEQ ID NO: 41139 - DNA, 934 bp, Zea mays
  Clone ID: MRT4577_137523C.1
cattgggtacctcgaggcggtaaacgaagccggccggcggcggccgggaaaggcccaaaaggcaggcagccatcacgatggcgcttgcccacctccccttcgtcctcctcttggtgtcgtccgtcgccgctttcgccgccgccgaccacggcctcacgcacatccacctgtacgtgcacgagacgtacaccggggcgaacgccacggccgccgccgtgctgcagtccccgctgggcgccaactcgtcgttcgggagcatgggcgtggtggacgacgagatacgcgtgggcccggaccggtcgtcgcagctcgtcggccggtaccagggcgtcttcttcggcacgagcgtgcagctgggcgccggctacctgtcgtccatcacgctggtgttcaccgccggcgagtacaacgggagcaccctgtccgtgcaggggcccctgctcgggttcacgggcaccatcgagcgcgccgtggtcggcggcaccggcaagttcaggctggcgcgcgggtacatgcttttcaagatgataagcaagccgacgccggagacggacgtcaacgagatcaacctgttcgtgctcatgcaccccgctggcaagtactagcgcacacaccttgagactcgagtgagtggctactaccgcattgttgttgggcagaggttgggtgaagtgtctatgtccaatccaactctttcagatttatttctcttgttgaaacccaataaacatgcaatttctttgacctctgagcaaaaatgtagaccattttcttggccttacccgtttcttggccaatgacttgtttgggagtgagaataccgaagttaattggaggaattaatttttcttttgctatttaaaattaaatagctaggagattttagccactccagtcttccaaaaaaaaaaaaaaaaaaaaaactcgaggaagg

SEQ ID NO: 41140 - DNA, 518 bp, Zea mays
  Clone ID: MRT4577_137524C.1
cggacgcgtgggtttttgatggtgacttgctttggttttcgatcggcaaacaaatacagtgtaggcagacttttgcctagccgagcaagcaaatttcttccacgacaacagatccatgttcaacgcaagaaggaaccaaagaatgaatgtcagcattcttatttgcattggatcgaactatactatactaacaaggtggcaatgcctattcgtggccaatcatatgctatgctaccattcaaggcacaatgccttcacatctcgaatgctctactcctcgcacagggctcctcccccttctcttctagaggcaagaggatgctccattggagatggcagtactccattgtttctgggtggcgtgttggctgcttgaacctctgctactgcaggaacagggcacttatgtctccacgaactccccaaaaatgtggaggcacccatcccagaagcccctctctcttgtttcccagtatccacctttgtagcaatacgtcccgtcctcggtgtcttgctcg

SEQ ID NO: 41141 - DNA, 401 bp, Zea mays
  Clone ID: MRT4577_137525C.1
actctagaggagctatgacgtctgatgcccgcggacggctggtagcctcctgtgcggcggccgtcctttttttttttttttttttttttgcatcaagtaaggttagggggaagaacaacaagtaccctatctagctcattgccagatttgactggatccaggctcgaggcgcagcatacgtgccgtaaacaactatatactgacttacacggacagagggtgactgacaccatgcagctaatacaaccaggcttctagatgtacaatgtggtggcagcggattccatccatgtccagagacggacggccgatgatttcatccctagcggacgttaattacctgtgtcctgaggtgtaacttcttcattaaaatccgtgaggtggtaggaattacaaaggct

SEQ ID NO: 41142 - DNA, 331 bp, Zea mays
  Clone ID: MRT4577_137526C.1
ggaaccaaaggaggcgattctggccccctaaaacccaataaataaattacatcccccccccaaaacggggttatctaacttgcccaacaaaaacaacccaaagggctaaaaaccacccttttggcccaccccccaaaaaagggggaatacaaagcttaaaggggcccttaatttcacaaattaccggaaagccccctaaaaaacaaaaacaacatcccatgaacccatttgccattgttgccccaaaaaaaatagcccatggtctaaaaacccaaccccgacactttttacatttcaaaaccacggaaaaagaaagggaaaccccccacct

SEQ ID NO: 41143 - DNA, 1229 bp, Zea mays
  Clone ID: MRT4577_137527C.1
aaagactcgacttcaatcctgagagcacatataaaggtgaaacaaagaaacaggcatggagtaatatgccacctgatgatttggtcgtcaccgatggtatttcagaaaacagtggctactatgtttctggcgaatgtcccaggaccaaagtgcctcaaacatgtcatgtaacttgcaatacaaaaaaagaccctaaacgagttgaacgtgtggttggatctggaccagtggcacaagatatcagtggtaatttgattggtccacagtgcaaaacaaagggtactccactgtgcagcaaaggaaaaacagtaattatgattatagattctgaagattctgaaccttccgcgcatgaaaaagaggatacaatgaagctagccacattaggaccagattcagatataagtcttgtggagcatcatagcaatgaggacccaacaggatctgaaattggcattgggaagtggaccctcaactgatctagctgacgagaaggggaatttccctgaaattgagtgtggaaccaagtgcatttcagcaacatgcagtgaagtaaaaacagtatctcaaattataagtgctacagctctcttagatttacatgattcagatgaaaatttaggcagaaaacaaagaacaaatgccattcctttagattctaggacaaccgttgaagattatcataattatagcaagatgatcattatccaaaactttaatagaaaatatgaagctcctggaggtttccgatgcttggagaagtggaggaaggatgttgtgaacaatcaaacagctcttgattgcactgcaccgattaaacatgaaaacccacaaaaaactgacggcatgttggttgatggttacggtttgattgaactgaacccagtagatgagtacatttgttccgagggaaatcatgaatgtgtccaaccagtattcacaatgcccatcaaagaaccatcaagtgctgacagagtaatcgattgcggacgtgatgggacagagatcaactatagcatcaatgagaaagatggagggtccattgagaaaacctcaagtcctgacgaaatatctaaatgcaagaatagcatgatggagactgcacataatgtcaatggaaaaggaactactgctcaatttgaaaccaaaatggatcaagcggagccagcgaggagcggtgtacgcagcaaaatttgcaacagtgttgtacctgccaacgagtcagaaca

SEQ ID NO: 41144 - DNA, 734 bp, Zea mays
  Clone ID: MRT4577_137528C.1
cccctcctcgagttttttttttttttttttttttttttttttttttttttttttttttttttggggaacaacaccaggaagcagtgtgaatttacatgggaggcaggggggaaccattcatcacaaactgcctgagctacacaaaaacaggcttcggcccctgctgcttgctggtttctaggcttctacatactgaaactacattactatactatagtacattttataacctaacaggcaaatgtacatgcccagtgctacaagtcttactgcccgcctgccatcttggtgctcgggtgccgtgccctgccatgtgatgacccttgtgcgccgagttgttgcctgaccatttcggatttcagggagcactggggaaaaaaaaattcgcctgtattacctgactcattgggtggctggcactgctgggagcaacacgatgctgcacatttcaggccttcacctttatctggagaaagagataaattgtaccgatccaagatatcctgcttaacctgcccaaaatgataccttatttggcatggacaaaatatagcaatggctgtccagggagaattagtgtaaaatgcaaaagacctgccaccggtttttggtaaactcagcaatctccccaactttgttcttaagtcgtgccttggagactatggaaatgtctcatgtaacaactccaccagtttgactctcccttgagggcatgatgcaacaagtttggtctg

SEQ ID NO: 41145 - DNA, 185 bp, Zea mays
  Clone ID: MRT4577_137529C.1
attttatggttgatataaaaataccctctagacatacagctggtaataattgaaggtaagatttagtgtaaccgtgtgctgtaatcagaagttagattttgatggcttgggtttctgtggcattttaatctaccagttctactggtaactctacgggtttaatctattagctctctcaacttggg

SEQ ID NO: 41146 - DNA, 289 bp, Zea mays
  unsure (1)..(289): unsure at all n locations
  Clone ID: MRT4577_13752C.1
ctttttttnaaaatggttgcttactnaaagantgcaacatcnagcattctttaattggagtctgctcacgtttaagctctggatgtaaactcaaggactccgtaatgatggnagctgncatctataaaactaaagangaagcttcaaagctactgtaagctgggaaggtcccngttggaataggaaggancacaaagntaagganctgtttcattgncatgattgcaaggtttggaaagaccgtggtgttcncaanccgtaagggcatccatgnggctgntcncccgga

SEQ ID NO: 41147 - DNA, 668 bp, Zea mays
  unsure (1)..(668): unsure at all n locations
  Clone ID: MRT4577_137530C.1
ttgggtacctcgaggccggccgggcnnnnnnnntannaaaaaaaaaaaaaaaaaaaaaaaaaaaaaaaaaaaaaaaagggtcctaaaaaaaaaaaaaaaaaaaaaaaaaaaaaaaaaaaaaaaaaaaaaaaaaaaaaaccctaggggaaagcggacatggggggggcaaaaatagcgccgccaatgctctcgtcggattttgccaacctcgtttcggaggttgagcgcagggcccgccaaggcgccgacgggttacatagggacatcagggaggggcacttcgttccaaaccggactatgggggctccggggatccaaagtttgaggaaacataccaaagcatatttggactgccatcttatggccacaaagccttcaaattacgaaaaaccatttggaaaggctggcgcttcgggattcacattccatataaaagttgctaaaaacaactggcaagatctcttccaaagcattaaatcaaagggtatgcggccgggggaatcattgaggccaggaactccgggggaggaagtttttccccggggggaagcaaaaaatccggaaaaattggttcttgggatgacagccaagcctggttttgggggccaaaaatttatgccaaaaatgatggataaggtgcgcacactgaaaaagaagaacccttccct

SEQ ID NO: 41148 - DNA, 359 bp, Zea mays
  Clone ID: MRT4577_137531C.1
attcggctcgagggctgctgcggctgtagctgcgaccgtgggttcccggcggaggcgtgggaagtgttgaggcagcacttgtataagaacctgtccgaggacgtgaggcgtgtcaaccccactgtgcccaaggaggaggcgcgcaacattttcggccgtctgctcaagactctttcagaccatggtccccttaccttcataaacacctgactccacgccactgacgctggcatggctggtctgaacagcaagacgaacatgaagatcctgctgcaatggatgacggtggagaaatgtatccatactgaccttagtgcacgtgggcaacgcagataacatgctctactccaacgatcact

SEQ ID NO: 41149 - DNA, 292 bp, Zea mays
  Clone ID: MRT4577_137532C.1
gcgggcgtccctttgattgaatggttatcccgtgtgcttgtaggattttatttactattacactattggctacaacttacaacagcagtcgccaccgacggcttgcatgaacagcagggcggaaccaggcaaaaaaaaaaaccccgccatttacatgaagaatcgtcaccacccagccggagcgtcatcgggcgggcctggcgttgtggccgttggcggcgggcctggacgcgggacgggcaccggcaccgacgctcggagaccggtggtgcggcgcggtaccggctcggcc

SEQ ID NO: 41150 - DNA, 528 bp, Zea mays
  Clone ID: MRT4577_137533C.1
ctgggatggtgacgggactcatgatgctacgctttgtaacatctttgctactacctgtctcttaatgtgtacctcacacctgtattgtacttgatgaaaaggattgacaatggatgtgataccaattcacaggtcggacttatgaccgggctggtggctgacgcctgaggcctgaatagattcgcccccgtaataatctcgctgcattatcttacgccgaggccgtgctccacagtgactgactacttgcactgtgcatctgacaaccagatcgtcccttgtcttcgggctctgtacatactatcctcttatcatagtgcgaggattatgccaggagacagaaatagagtccaggacgccaggaagggagtcgagcccgacggctcgctccttgcatctacaaatgatgaagccctgggattgacggactacgataacaggttgattaatacagtccagcttgaggacgcttgcgtgatccttctactgctctagagaaccaagacaagcgagagtctccgttccgcg

SEQ ID NO: 41151 - DNA, 1346 bp, Zea mays
  Clone ID: MRT4577_137534C.1
gtaccgggcccctttggagttttttttttttttttttttttttttttttttttttttttaaaactacaacttcagtcacattactttgacaatgtcaaaccgggtttcgtgaactctgcaaaacatccctagttggacaacagcgtagaataataaagcctagagtctatgcatttcctctctctctctctctctctctctctctctctctctctctctctctctctctctctctctctctctctctacacaaacaaggatatctctggtggttggacaaaggagaagatggcttccccgaagacctcgttcagagaccccaagagatgaccggtgtcctggtcctccttccaggcttgcctaagcactgcagaaactctctgcgcgagatcactgccctgatccctccggaccgcagctgatgggatgctctccaccgtctgcccagaggacgaggcctgcatcatgccagggttgcctaactggttgggaaagccatccatggcaccttgcatgtttcctcccatggaagctgaggccatggagttggctgttgcgtccgttgccatcttcttcagaggtggctgagttgcagagagatctgtgctagattttcgcttatttgggttgttggttaagacccttttgttgctctgtaaaagaggccgcatcgacggagaaagcaaaccaggaaatagtttcaaccgatcatacaagcatttgcctgcagcacacagcaaggcaccataaacacgccaagcttccttccttttcatctcgtttttctgcttctcaagctgcagttccggctccagaagttgcatatatgtcacaaggttgggcaaaagaaggagtctaatcgcgctgggccccagtgcagatatcccttggacagcaccataatgttgtgtcagtgatttggcaggatcaagaaatgcatggatcaatgttttagttaaccgattttgaaggttgtgatagacatgaccaaacctctgacataccaaggcaaccaaattggcagagaagtccctaagttcccagtggttatctgagagcctatgccctagccttttcgcaacaatgcaagtgatcattgatggcatcagctggtgcaaataaggttcaatatgaatatgtggattacggagaagactttggactactctcattagagcaagtaaaacaggaagatcacccaaactccgggtaacctcgtctgcaatgaagtaggaaaagtaaggaactaaaggatgaagaccagaatcttttgccaagctccctaaagcttctttaaaaagggacgtatcagatctcctcatagtaagttcagctattttatgcgt

SEQ ID NO: 41152 - DNA, 212 bp, Zea mays
  Clone ID: MRT4577_137535C.1
taccaaatttgatttttgccaatgggatacactaacagttacagtaacagggttccacaatagcagtataacaacaaaacaaaaggtcgacgtttgaaggaaaggacccacgaaaatggtccttgtacaagcatggcatggcatggcatgatccatggagatgtttggctactactgttccttgtcaggcttgtttgcatcccgaatttaat

SEQ ID NO: 41153 - DNA, 280 bp, Zea mays
  Clone ID: MRT4577_137536C.1
ggcctaacggggggcagaatcatgcgtatccaaggatttattcacccatcaaatagccgattttgaaacacattcacggtatcaaacagcatggagaccaaaatatttgagggggctctattttgagcccccaaaaaaaaccagaaacacagtcttgatggaaggtggatctcactatgactgaacagaacactaggggctgcaaagtatggcggttaaacttccagtgtctcttggggggcctaaatgaaaataccttgggggcaccgaggcaattatt

SEQ ID NO: 41154 - DNA, 368 bp, Zea mays
  Clone ID: MRT4577_137537C.1
tttattttttttttttttttttttttttttttttttttttttttttttttttcaaaaaaaaaaactttttttttgaactttaactcataagcaatctaaaaaagggccccaccaatgatgggttgtgggtaaaaccctgttgggtttgtaaaaacatgtgggttgaatggcaacaattgttgcacttgtaaaagggggccaacgttaggcccagggtccaggtaaaacggcaccaactgttgctgggtaaaaaaggcagcagggctcacagaagttacctggctaaatggaactattggttgttgcacataagcaggaaagttcaatgctgccagtgggttaaatggaaaaaatggctggggggaggc

SEQ ID NO: 41155 - DNA, 562 bp, Zea mays
  Clone ID: MRT4577_137538C.1
gttggttttttttttctagagaggtctcgtttttttttttttttttttttttttttttttttaacgttggaccacaagacttttactaaagggaaaaaaaacgtttataaggccaaaaagtggccatggtacagaacgaaaaaaaaaaagtttggtgtttacaaggggcccgggtttgggggggggcaaaaaaaggcgagtgcagacgatcctgccggtctggggggggggagggacaatttacattccggggccccgggaaatggaaaaaaccgcgggagcctttaagaagccatggccgagcaaaccgccaaaaacaaagaaaacctttttgggcccttggtcaaagaaacacctggggacaaacacaaccatgttgtgccctttttcgaacgtggacccagcaagaacctcaaaaaccttggggaaagattggagcggggccccacctgaaccctcaaaaccctggggaagaaaattgatcacgggtaaagacaaacccaaagttcatcggaaaaggctcaacctaagtcgatcaagagggccattgacggagaggaaa

SEQ ID NO: 41156 - DNA, 251 bp, Zea mays
  Clone ID: MRT4577_137539C.1
aaacccaacacagaaacacagactagaaaaagaaaaaaaaactataaccacaaaataaaaaaaaaatccaaagacagcagcagaaaggggcaaccccccaagggatcacatccatctcaacatgtccgtgttcgctaacactccttcaatcttgtcccctaaattcacttcacgggccttcgtttaaaactttcgtgctggggaaaactctgtagttccccaatttagtccctttggagaacacccccttt

SEQ ID NO: 41157 - DNA, 1439 bp, Zea mays
  Clone ID: MRT4577_13753C.1
gcacaccgcacacccaatacggaaagaccaccgcaaacgccaccacgcccacgcctcgccgcgcaccacatctgaaacctccagcccgacgccggcgccggcgccgctgctcgcctgctcgtcacatttcctggtgcccgccaagccccgcgacctgggctccccagctccatccatcaaccgcctgcagccgcggaaatggcagcgccgacgacgctgcgctcggcggcggcgcgggcgcgcgcgcgcgcagcggagctcgtgagagggcggtggccgcagcggcgtctggggacgacgtccgcggcggagacggagagcaaaaagaataaggatgaggaggaggagggggccgggtgggagctctcggcggcgcgggagtactacgactaccgcaagtctatctacggcgacgtcacgcaccgcgccctcctcgtcgacgccgtcggcaccctcgtcgtccccgcccagcccaccgcgcaggtgtataagagcattggtgagaagtatggagtgaagtactcggaagacgagatcctgatgagataccggcgggcatacgagcaaccatggggtggatcacgtctcaggtatgtggatgatgggagaaccttttggcagcacatagtcacttcttctacaggatgttcagatgcacagtactttgaggaactctatcaatactttatgacagaaaaggcctggaagctttgtgaccccgatgccgaaagtgtatttaaagctttgaggaaagctggcgttaaaactgcagtcgtctccaatttcgatacccgtctacggccactcctgcaggccttgaaatgtgaccactggtttgatgcagttgcagtctctgcagaggttgcagcagagaagccgaatccaataatattcttgaaggcctgtgagttactgggcgtgaagcctgaagaagctgtgcacgttggcgacgatcgtagaaatgatatatggggagcgagagatgcaggctgcgatgcttggctctggggcagcgacgttcgctctttcaaggaggttgccgagcggatcggtgttgaggtgacgaagtgactaagtgagctaggatggtgaatatacggaggcagaggtagtacccaggatcgcggtcgtcaaggaagccagtgaccccatccttgtggtgaaattcctgtgctggtttgtaggcttgtagctgtatgtatgacaacttattagggttccgttgaacctgctatgcatgcatgcttgctgccctgacagtgacaggcgaatgcgtcccatgcacttgaatatgagggtctgggttctggacttctgggactcttgagttattgaattattgtcgcctagttagacacaaagttatctgccatgcacttaaaaattgaaggtctggaattctggattgttgtctaatcagacaaagttatctgagcaac

SEQ ID NO: 41158 - DNA, 140 bp, Zea mays
  Clone ID: MRT4577_137540C.1
aatacagttgcatgcacaggagcttatataacaccaatcctcatattcttatatcatatgcgacactcacatatccagacatatcattcattttatctatgcaacttcaaagaactaatgttaagcccgccactaaaggc

SEQ ID NO: 41159 - DNA, 201 bp, Zea mays
  unsure (1)..(201): unsure at all n locations
  Clone ID: MRT4577_137541C.1
gtcaaggttaatacgctgtactgactcgcttttctacatctgttcgttggtctctgcngtcatacggtgctactcgagttatcactgtgttgagagctggttggacgaaagctcccagtcatgcagtgctgtagcaaaaatcgggtacgctgatggatctagcatgatctaccacgttgcaaccaagataacatataagta

SEQ ID NO: 41160 - DNA, 223 bp, Zea mays
  Clone ID: MRT4577_137542C.1
gaagatgggggccacaaatcacccccgggttttttttttgggaattttttaggaccccccgggggggggccctcttccggggggggcccggctccctttttttttagaggaatttttggcccccctttaagggtttgtctttggtttgcacagagggcaaagggcatttatctagagccatttatcaacacagtgcttgtgggaacagtgttcacatggaagt

SEQ ID NO: 41161 - DNA, 356 bp, Zea mays
  Clone ID: MRT4577_137543C.1
cggcccggaagaattggttggacccacccgaccgatgaggcggccgcccacgcggccggggacggcagccatcttaccgaggcggcctagcgcaccatagccgacagctggctcaagggccacaacagcagccccaccacgcagcacagaccgagctagctgggccgggggactgaatagctaattaagctagcagaatatcattcatgagtgacattactgtgcttggattgtctaccgctaattgccatgtgcatcatactaacgctctagcaggttcatgaatgatgggtgtgctatatggattgtcaacaaaaacaaaagaagaagaaagggcggatgttttaaaggatcca

SEQ ID NO: 41162 - DNA, 430 bp, Zea mays
  Clone ID: MRT4577_137544C.1
aataagagcaaggctttacatgccaagtgcagtatgaatcaaattttcctcgtacacttgttgagcactgataacaaataaaagaaacaccagtcgcatgattgatcagattgtaaaaaccaagaaaaagaagaaaaaaaaaagacgagaactcgcaagaacacatgaaaacgcattcttattgctaattacccttccaaaggtctcgtcgtcttgttggcatttccagtggagcttgctgatcggtcctcgccagtcaccacctcctttgcaacaaggccagccggtcgttctcgccgccggcaacctccaacgagcggtctatgcgaccaacgacggccgtccggaagctgaacgcctcctgcgccccggtgctgcacccgcgctgcatgcccacgacgccgctcaggctggcgcgggaggaatccac

SEQ ID NO: 41163 - DNA, 378 bp, Zea mays
  Clone ID: MRT4577_137545C.1
gaccaaacacacgagttatatatctgccacataaaaccacagcatccatcataaatgacgccagttggtccatgtcgcgaacaacatcacccagtcagtcaggccaaacataacctgctgctgccactaccgctgacctgctgatctatccctcaacatcctgtctagttgctacttcatatcgtacgcaatctcacttaccttaggacactgcaaacggtccacgacatcctgctttttctgcgcctgtattccctccaaggcactcgcacatggatactgctgcgtgttcctcgctgcgctacagccgatacttatgaagtacttgaacactgtcttctctgccttcatgcctgtgcggcactcgttacttgctac

SEQ ID NO: 41164 - DNA, 438 bp, Zea mays
  Clone ID: MRT4577_137546C.1
cggttccggatttccgcggtgcggccccaccctccctataaaactggggcggccgccccaaatttttttagcctaagttcccttccctgcgagggggaagttttttattattgtgggcgaaacccaattcacgggccggggttttccatctacaagcctgggaaaaccttatccttccccaaccaaaactcttggcagtacatccccattccccctgttgccgtaattgtaaaaaggccgggcccgttcccctttcccaacagtatccaatcctaattggtaatgggaactggccctgtcccggtcctttaaccccaagggctgtggtggtaacccctaccgtaccctttccatttgcaatggccttatccccggttcctttactttatttcctttacttttccgcacattcacccgttttcccctttaaagtttaaa

SEQ ID NO: 41165 - DNA, 634 bp, Zea mays
  Clone ID: MRT4577_137547C.1
tctggcggtatagcgacgccatcattccccgaacaaaatcccctcaagctagagatggcctgggggattttccttgatagttttgcggtttgattgcagttttttattagtaataattgccgactttgcgatggtgtacggcggttaacccttctgctttagctacccgaccattggttacttggctgtaaacaatccagtgatcactacattccatccgactagctacttcacactccaaataggctagcgcatcggtcaaaataggcgatcgccgcttacccctggccccattggaacggcgaggctatggctacctgttggattttgtcgtgatttggttattcagcagtttagctacgggttgggtccagctactaatttttttggttggttggtttgccctgagggtagttttagtgtccgctaaccaggggcaaagtttggggggctgggctttcgacactagggtggtacacctgaaaatgaaacgtttaccgggcattttggaactgagtcaacgggaaggtattttgggggctgcctcctacctagccatggtgggtttaaacatcaactttgccaatggggtaagttttttgcttttggtggctcccctgtttggagatttaat

SEQ ID NO: 41166 - DNA, 1080 bp, Zea mays
  Clone ID: MRT4577_137548C.1
aaattcggcacgagaactcggcacgaggccaaatcgccgtcgccgtcgcatcgcagcagcgggagtcccagggtcccggaccgaatccatttccagacacccaaggccaagatccatcgctcgttccaacctgcctcctccttcttctgcttggtcgtctgatctcgttttccattcgtgtccaatccgatccagccaaccgctgtgaatgatggcgctcaacctgtcccaccagaccggcgcggccgtggcggcggcaccggcggcgccacgagcggccgtcgtcgcggcggcggccacggcgccacgctcggccgtcgtcgctgcggcggccaccgtggcgccgccgcccgcgtcggcgcccgcccccgctccggcgctccagctgcagacgatgacggtggacccggcccccgcgcaggcgcccgacgcggtgaagccggacctcgccatggcgtgccaggcgctggtggaggccgcgcccgaggcggagcacgccgacgtcgccgccgagctccggagcagggccggggtgcccgtcttcgtcatgatgccgctcgacaccgtgcgcacggaccgacgctcgctcgcccgacgcggtggtggcgactgccgccgacaggggctccgaggaccgcatggtggccttcacgtacctgcgcatggggcccgacctgttccagcccgacaactggcgccgcttcgccgcgttcgtcaagcgcatgacggagccgggcgcgcgggaggcgtgccgggagcaggtggagcgggaggccgagggcgtcgcgcacgccacccagcccctcgtgcacgaggccgccgtgtcgtcggtgcgtgcaccgcgcagtagtgtgcgtacagcggaagctgcgactgcgagcgaggtagggtgtggggtgggtgactgggtaccaggagtggggtacggtacgtaggtgccacgttggaggctttggcgtttgctcagagcctggcaggagatgggtttgatgttctgctgctgtgttactgtatcctacacctacagaatgtgctatgatttgtactgctataatttttaacgaagatacaaacttctac

SEQ ID NO: 41167 - DNA, 2569 bp, Zea mays
  Clone ID: MRT4577_137549C.1
accgaatccccataccaaatcgccgtcgccgtcgccgtcgcatcgcagcagcgggagtcccagggtcccggaccgaatccatttccagacacccaaggccaagatccatcgctcgttccaaccagccttcttcttcttctgcttggtcgtctgatctcgttttccattcgtgtccaatccgatccagccaaccgctgtgaatgatggcgctcaacctgtcggcgcccgcccccgctccggcgctccagctgcagacgatgacggtggacccggcccccgcgcatgcgcccgacgcggtgaagccggacctcgccatggcgtgccaggcgctggtggaggccgcgcccgaggcggagcacgccgacgtggccgccgagctccggagcagggccggggtgcccgtcttcgtcatgatgccgctcgacaccgtgcgcaaggacggcaactcgctcaaccggcgcaaggccgtgcccacgcgtccggcggcgctcaagagcgccggggtggagggcatcatggtggacgtctggtggggcatcgccgaggccgacgggcccgggcagtacaacttcaacgggtacatggagctcatggagatggccaggaagaccgggctcaaggtccaggccgtcatgtccttccaccagtgcggcggcaacgtcggcgattcagtcaccataccacttccgggatgggtcttggaggagatggacaaggaccaggacctggcctacaccgaccggagtggccgccggaactacgagtacgtctccctgggctgcgacgcgatgcccgtgctcaagggccgcacccccatccagtgctacgccgacttcatgcgcgccttccgcgaccacttcgccaccttcatgggcaacaccatcgtggagatccaggtcggcatgggccctgccggcgagctgcgctacccgtcctacccggagagcgacggcacctggtcgttccctggcatcggcgagttccagtgctacgacaggttcatgctgagtagcttgaaggcggctgctgaggcagtgggcaagccggagtggggcaacgcgggtccgggcgactccggcagctacaaggactggccggaggacacgggcttcttccggcgcgagggcggctggagcacggagtacggggagttcttcatgagctggtactcgcagatgctcctggagcacggcgagcgcatcctgtcggcggcgacgggcgtgttcacggggtcccccggcgtgaagatctcggtgaaggtggccgggatccactggcactacggcacccggtcccacgcggcggagctgacggcggggtactacaacacccggtcgcacgacgggtacgcgcccatcgcgcgcatgctggcgcgccacggcgccgtgctcaacttcacgtgcgtggagatgcgcgaccacgagcagccgcaggacgcgcagtgccgccccgaggcgctggtgcagcaggtggccgccgcggcgcgggaggccggcgtgggcctggccggcgagaacgcgctgccgcgctacgacgacacggcgcacgaccaggtggtggccacggccgccgacagggccgccgaggaccgcatggtggccttcacgtacctgcgcatggggcccgacctgttccagcccgacaactggcgccgcttcgccgcgttcgtcaagcgcatgacggagccgggcgcgcgggaggcgtgccgggagcaggtggagcgggaggccgagggcgtcgcgcacgccacccagcccctcgtgcacgaggccgccgtcgcgctcccggccgggccggaccggccggcgttccccgtcgcctgtgttcgatcgctagacggggcggcacgctgcgacgactacctgtatggcgagtcctccctatacttactcatacataagctgcgccgccgtgtcgtcggtgcgcgcgtgcaccgcgcagtagtgtgcgtacagcggaagctgcgactgcgagcgaggtagggtgtggggtgggtgactggggtacggtacgtaggtgccacgttggaggctttggcgtttgctcagagcctggcaggagatgggtttgatgttctgctgctgtgttactgtatcctacacctacagaatgtgctatcatttgtactgctataatttttaacgaagatacaaacttctaataaaaaaaaaacatcaagcagtatggccaaaaaaaaaaaaaaaaaaaaaaaaaaaaaaaaaaaaaaaaaaaaaaaaaaaaaaaaaaaaaaaaaaaaaaaaaaaaaaaaaaaaaaaaaaaaaaaaaaaaaaaaaaaaaaaaaaaaaaaaaaaaaagggggggggcccttttaaaggatccaagtttacttccccgggcttgcaaggtaaaaatttttttttggggcccccaaaattaaattcatgggccgcggttttaaaacgtgggaactggaaaaacccgggggttcccaaatttattcgctttgaaacaaatccccttttgcccaggtggggtaaaagaaaaaaggcccccccctatggcctttccaaaaatttgccaacccttaatgggaaatgggaccccccct

SEQ ID NO: 41168 - DNA, 312 bp, Zea mays
  Clone ID: MRT4577_13754C.1
cactcattattcctctctcctatttgggggggaatttttgagccatctgggcttgtatccctatagcatgaagtccgggttttaaacatattcctacgagtctgttaaagccgcaaacccaaacctcgtttgggccagaacataacgtttttttgattttaaggctgtaacgagccttacaaaacactaaagacaaggcacattttgtggaacaccacttacagcattgcagaacaaggataaaaacgtaatgtttgcaagctcacgttgggtccgacctaaagccacagctgggttcaacccttccaaaaa

SEQ ID NO: 41169 - DNA, 412 bp, Zea mays
  unsure (1)..(412): unsure at all n locations
  Clone ID: MRT4577_137550C.1
gggagaaaaaaaaccttcaagctttggcaagtgtatgcaacaaaaaagaagaaaaagaaaaagatcaatcatcaatctcagtatacgcatttcgatcgaactccaaacagcatgagcttgagataatctggattacagacgctgctgcacgcaggagaggcctttactaatggttgaaggcagtgcagacttttntgatctctccgtncttccccgtctttacccctagccttcccagcttgagcatggcggggacgaaagcattgaagaagttcttttggctggcggngaacatgttgacaatgggcctggtggtcttgttggcgtaaagcacctggttggaggtgaagagacccaaaccgttctggaggttggggtaataagcgttgttgaacctgatgggggtgacggg

SEQ ID NO: 41170 - DNA, 1369 bp, Zea mays
  unsure (1)..(1369): unsure at all n locations
  Clone ID: MRT4577_137551C.1
gggtcgagcacgcgtccgcccacgacgtccgcccacgcgtccggcgcgaccacgagcagccgcaggacgcgcagtgccgccccgaggcgctggtgcagcaggtggccgccgcggcgcgggaggccggcgtgggcctggccggcgagaacgcgctgccgcgctacgacgacacggcgcacgaccaggtggtggccactgccgccgacagggccgccgaggaccgcatggtggccttcacgtacctgcgcatggggcccgacctgttccagcccgacaactggcgccgcttcgccgcgttcgtcaagcgcatgacggagccgggcgcgcgggaggcgtgccgggagcaggtggagcgggaggccgagggcgtcgcgcacgccacccagcccctcgtgcacgaggccgccgtcgcgctcaccaactgaccggaccggccggcgttccccgtcgactgtgttcgatcgctagacggggtggcacgctgcgacgactacctgtatggcgagtccctatacttactcatacataagctgcgccgccgtgtcgtcggtgcgtgcaccgcgcagtagtgtgcgtacagcggaagctgcgactgcgagcgaggtagggtgtggggtgggtgactgggtaccaggagtggggtacggtacgtaggtgccacgttggaggctttggcgtttgctcagagcctggcaggagatgggtttgatgttctgctgctgtgttactgtatcctacacctacagaatgtgctatgatttgtactgctataatttttaacgaagatacaaacttctacaaaaaaaaaaaaaaaaaaaaaaactcaaaaaaaaaaaaaaaaaaaaaaaaaaaaaaaaaaaaaaaaaaaaaaaaagggaacaaaggagggggggaagcggaaaaaaggaaattggggggggggtctttaggttcatttggtggggtctgcggggntggagggttttggggcgggggttcttgtttggggttcctttgggtgagggtggggggagccgactcccctgccagccggcagtctctcgtgcagtgcagtgcagtacagtgcagctccggcgtagatgagattgtattgtgcccaagccgggagggaaagcagggaggggaggacaaagatgttttgtcacgtttcaggctccggccatcgccggagtttgtccggggaatatatcgatttcctattagaaatccgcagaaaatgatgtgttcctgcactgcctgattctgtgccgcgcttctggtcttctcttgtcctctcgcctgctcaactgatgtggtctcgatcttagaattgtccatccatgtacaagtgggcgagttatctaacattccaagcgcttgtttgcaatgg

SEQ ID NO: 41171 - DNA, 2491 bp, Zea mays
  Clone ID: MRT4577_137552C.1
atttcgacacgaaaccgaatccccagaccaaatcgccgtcgccgtcgccgtcgcatcgcagcagcgggagtcccagggtcccggaccgaatccatttccagacacccaaggccaagatccatcgctcgttccaaccagccttcttcttcttctgcttggtcgtctgatctcgttttccattcgtgtccaatccgatccagccaaccgctgtgaatgatggcgctcaacctgtcccaccagaccggcgcggccgtggcggcggcaccggcggcgccacgcgcggccgtcgtcgcggcggcggccacggcgccacgctcggccgtcgtcgccgcggcggccagccgtggcgccgccgcccgcgtcggcgcccgcccccgctccggcgctccagctgcagacgatgacggtggacccggcccccgcgcaggcgcccgacgcggtgaagccggacctcgccatggcgtgccaggcgctggtggaggccgcgcccgaggcggagcacgccgacgtggccgccgagctccggagcagggccggggtgcccgtcttcgtcatgatgccgctcgacaccgtgcgcaaggacggcaactcgctcaaccggcgcaaggccgtggaggccagcctggcggcgctcaagagcgccggggtggagggcatcatggtggacgtctggtggggcatcgccgaggccgacgggcccgggcagtacaacttcaacgggtacatggagctcatggagatggccaagaagaccgggctcaaggtccaggccgtcatgtccttccaccagtgcggcggcaacgtcggtgattcagtcaccataccacttccgggatgggtcttggaggagatggacaaggaccaggacctggcctacacggaccggagcggccgccggaactacgagtacgtctccctgggctgcgacgcgatgcccgtgctcaagggccgcacccccatccagtgctacgccgacttcatgcgcgccttccgcgaccacttcgccaccttcatgggcaacaccatcgtggagatccaggtcggcatgggccctgccggcgagctgcgctacccgtcctacccggagagcgacggcacctggtcgttccctggcatcggcgagttccagtgctacgacaggttcatgctgagtagcttgaaggcggctgctgaggccgtgggcaagccggagtggggcaacgcgggtccgggcgactccggcagctacaaggactggccggaggacacgggcttcttccggcgcgagggcgggtggagcacggagtacggggagttcttcatgagctggtactcgcagatgctcctggagcacggcgagcgcatcctgtcggcggcgacgggcgtgttcacgggttcccccggcgtgaagatctcggtgaaggtggccgggatccactggcactacggcacccggtcccacgcggcggagctgacggcggggtactacaacacccggtcgcacgacgggtacgcgcccatcgcgcgcatgctggcgcgccacggcgccgtgctcaacttcacgtgcgtggagatgcgcgaccacgagcagccgcaggacgcgcagtgccgccccgaggcgctggtgcagcaggtggccgccgcggcgcgggaggccggcgtgggcctggccggcgagaacgcgctgccgcgctacgacgacacggcgcacgaccaggtggtggccacggccgccgacagggccgccgaggaccgcatggtggccttcacgtacctgcgcatggggcccgacctgttccagcccgacaactggcgccgcttcgccgcgttcgtcaagcgcatgacggagccgggcgcgcgggaggcgtgccgggagcaggtggagcgggaggccgagggcgtcgcgcacgccacccagcccctcgtgcacgaggccgccgtcgcgctcaccaactgaccggaccggccggcgttccccgtcgactgtgttcgatcgctagacggggtggcacgctgcgatgactacctgtatggcgagtccctatacttactcatacataagctgcgccgccgtgtcgtcggtgcgtgcaccgcgcagtagtgtgcgtacagcggaagctgcgactgcgagcgaggtagggtgtggggtgggtgactggggtacggtacgtaggtgccacgttggaggctttggcgtttgctcagagcctggcaggagatgggtttgatgttctgctgctgtgttactgtatcctacacctacagaatgtgctatgatttgtactgctataatttttaacgaagatacaaacttctacaaaaaaaaaaaaaaaaagcatttggtttttccagttatagcgaccaggttccagtgtcacgtccgaatatcaactatgtggtatttgctaccttaactcgtatggctatgttttcaagtcaggtgttaactgtggctatcgtgatatatacagcatggttatgagccaaggaatgctgtcctgtttcctcttgg

SEQ ID NO: 41172 - DNA, 420 bp, Zea mays
  Clone ID: MRT4577_137553C.1
cactagttgctgcttcaattctttgagcttatgcttccttttgccatcattggtgaataatggctgaaactgccactctggggaattacaagttgcacattttggaatctactatcggattctcctgccatttttatgaccatgctttcttttgtatgacctattaccttgttgacgatggccctatctatgctttctgcctatggactgtgcgcccatgcacgggtatgcggttctatagctgaagggacgtgtagggaacaatctccttctaactctaccacatgtatctagcccttaaagatgcaccgtgactgatggtatacactctcaaaatgtgaatctctccctgctgaatatccaaccatccttctatctggccaaccctttgtgacatcacaggtcgtgttctgttctact

SEQ ID NO: 41173 - DNA, 598 bp, Zea mays
  Clone ID: MRT4577_137554C.1
gcgtgcgttctttctagctcgctagcggtcctcctttgtgttttgttgtcgtcatgttcagaacacacgttatatgccaacttccattattagtttatgtatgggccaaaggaccttcctccaaacaatgacagggtttgaaagattggtcgacattgttccacgcactgtcataaacatgttacgttgcgcgggcctctgctgacagggttctgagtgccctgtgcgacttgaaacttcgaaaaaggatgctgactttctacgtccacacccttgtcatatggggcttgttgtttggtggggaataacaggccgcaactttgttctccaccagaactattatgctcatgttgctggcatccgtcttcgcattcacatggtatccttctgcgcttgagcatgccattaaacgcacttgctcttttgaaattgaagttactgcttgtcctacacacccatgcactgaccactcttttcctgtgtatgacatcgcgaaaactagctctcttacacttctgtccttatcctccacaaaattgttgtcatgacctctctgcttaatgtacgctgctaattcctttgttggtttcccatgcct

SEQ ID NO: 41174 - DNA, 991 bp, Zea mays
  Clone ID: MRT4577_137555C.1
tggtcgggcacttgctgagccgacttcagccagggctgataagcttccttgcgatgttcatgtcgtcccgacggcagcgccacctcttcctgcaacaaagccaaggaacatgcggagtccaagtccagaggacgttgaagcataaccactgctctaatgtcggtacgtagaccatctacaaagcgagtagcaaaaaacacgggatctggcactgactcataaacagccaactgatcaactaatgtgacaaaacgatcctggtaatcagttacgctactctgctgatggatacgaaacagctgccgcaacaatgactggtactggtctcgaccgaaccgctcgtgtagtaatctgcagagcagcggccaagacaatcggggttgtttgcgctcaacagactggaaccagcatgctacatgtggcgcgaggtacatggaagccaccttcacccaggcttcgggttcgacttcgtacatgtcgaagtaactctcacagcgatagatccacaaacgtggattatccccgtcaaaaatagggaatggcaattttggtaacttgcccagagagctcattggcatatcagaatttcgtgtgcgactacccatatgatcaaacacaggaccatgataacgaggagaaggcggtagatggggcacatgatgcatacccttgaccgggccaggggtgaaggtcaccgacccatacccctgctcccggtggcgtgattcatcgcggtgcccaatggggccgtcatgagtcggagcttgctgtcgaggatcaagcagtggatccggcttgccgaggatgccagaatccgcccccgccatataccgcgctgcgtgatcccactgcttgttcatcttgtggagctccagcttgacatcttccatggcggcgtcgaccttgggacgccaattgtcgaactcggcgcacgagttctccagggccgtcaggcgatcctccttagcgcggttgaagtccgacagcaacg

SEQ ID NO: 41175 - DNA, 318 bp, Zea mays
  Clone ID: MRT4577_137556C.1
aaaaaaaaaatccccttgctttttgcctgtttcgccttttggggatgtaacatgtccccgggccccaaaaaaaacttgttgacaaaaatgccaaccccggttgttcccatcggggggttttggagcaccctcccccagtttctttcccaacccctggaccaggaacaagcctttttgggggttttgggtttttttgccgtttttttttgagctgggatgccttgttaaacatgtccggggcgtcgttttggatgttcagttttgggggcgccacagtttgtttgaaaaacccggttggccagtccgggtaccccccct

SEQ ID NO: 41176 - DNA, 180 bp, Zea mays
  Clone ID: MRT4577_137557C.1
cggcggtacctcattccgtcctcgcacttctctcgcgctgcgctcgcttacatcgcttcgcataccggtcgagcagtggagcggccatgagaacggaacggagggaattaatgcaagatgttcatcgagagcatgcgcgtcgagagaacccacgttcggtagagcccgacggagatcgag

SEQ ID NO: 41177 - DNA, 427 bp, Zea mays
  Clone ID: MRT4577_137558C.1
cgggaacgcagaagttcgagatgccgaagcaggggatgaagatctccgtggttttcggggccatggagcaggcgaagagcagcctgcacatcctcgcctggggcctcgctgatacgacgctggaagacgtcttcgtcagagtggccaagcagagtgacatgtccactgtgacctgatgacagactgatccgtccctggtgtgctgcatatgcgttgtctgaattctctgaaaccggtagtatatgatcaatcatgcacgaacatatagtctgtagctagctacaaaatatatactaatttacgataatatgtatacatatttacgatagtcgggttacataacacatggagatatttaccgtaattgtatagtaaattacttagtaagagttactataatcttataaattaatatagtaattatcgt

SEQ ID NO: 41178 - DNA, 1255 bp, Zea mays
  Clone ID: MRT4577_137559C.1
gcgaccccaggtcagtcgggactacccgctgagtttaagcatataaataagcggaggagaagaaacttacgaggattccccactggcttcctctgccgctcgcagtctcgctccacaaccacaactatccatccactaccggctccctccctcctcctgaaaaccccgaccgcgggcgaaccaaaccctagcgagcgaggcgatcagcgtccggcgaccggcgacagagcgcaatggagacgcgcccggcgccttgcgacctcgaggcggccgtgcccgcgggctccggggctgcaacggcggcggcggcgcagcaggaggcacccgcggcgaagaaagtggcggaggaggaggatccgcgcctgcgctgggccttcgtgcggaaggtgtacgccattctctccctccagttcgcgctcaccgcggccgtcgcggccaccgcgtgcctcgtccgcccgatcccgcgcttcttcgcctccggcccccccgccgccgtctggtccacgtacatcgcgatcctcctgtccccgctcatcgtcatgttccccatgctcaagtacagggagaagcaccccaggaacctcgtcctgctcgccgtattcactctctgctgcagtctcagcatcgccgtctccgcctccaccaccctcggcacagtggtcctgcaagctaccatcctcacagctgctgctgtcctggggctcaccctcttcaccttctggggcgtcaagaggggctacgacttcaccttcacgttccccttcctgttcgcctgcctcgtcgtgctgctggtgtacatcatcatccaggtctgcttcccgctgggaagggtagccatgaccatctacggcgtcctggccaccgtggtgttctcgggcttcatcgtctatgacaccaacaagctgctgaagcgccacgcctacaaccagtacgtggtggcagccatctccctctacctggacgtcatcaacctcttcatggcccagatggccatctccttccagtgatggattgcgggtctcacctgtacggctgtaccccatgcatgacggcgcctcgcccgtctggtacatggtggatcacacatccacatagcttcgcaagtcgagctgtctttcattatccttatcctaatactggtagtaccaatagcattacagtcctacagatctgtaattggctggccacccttcagctgagacagtatatatatcgtatatggcacctcaccataaatgacgttggaaaccaaaaa

SEQ ID NO: 41179 - DNA, 283 bp, Zea mays
  Clone ID: MRT4577_13755C.1
ttttgtgtgcaggaagcgcacacggggcccccggcgggggattaagcaaggtctccccgaaatcccgcccgggaaaagaagccgaggacagcaacgaccgacaggccctatgaaaccgatgagagaggcgccgaacacaaaaggtgggaggcaagaaaaggaggggcaaggagcacaaccaagacccgccctagactgggggcgaagaggcaagggcaaagaagccgccggaaaccgcaggggaaaaggacctgaaaggggaggctgcacaaaagggcgctgc

SEQ ID NO: 41180 - DNA, 329 bp, Zea mays
  Clone ID: MRT4577_137560C.1
ccgttccctttttaaaaaaaaaaattgaaggccccattgggggggtttagctgaaatccacattaactttggaaatttagccccctttcaataaacctttttttatcacagggaaatggctcactccatactttacaaatctataggggatcatatatttgtcccttggaggggaagagcttaaagggaacaatccaattccagatccataatcccattttacatgacacctggccaagaagagttccccgatggggggctctttacagaagcccaatgggatgctgcccaaactttttgagaacatgtcctcattttctcaaagtttg

SEQ ID NO: 41181 - DNA, 338 bp, Zea mays
  unsure (1)..(338): unsure at all n locations
  Clone ID: MRT4577_137561C.1
ggtntttttttttttttttttttttttttttttttttttttttttttttttttttttttttttttcggggaaaaggaaattttttttttggggggggccccttcctttttccaaaaaatttttttttggaatcccctttaaaaagccccttaaaaggggccccnaaattccggccgggaccctgggggggtcccattttttcttaaaggggggcttataaaagcggggcaaaatcagggcaaaagttgtttcctggggaaaattgttaccccctcaaaattcccccaaaaattcgggccggaaaaaaaaagggaaaacccgggggggcctaagggggg

SEQ ID NO: 41182 - DNA, 368 bp, Zea mays
  Clone ID: MRT4577_137562C.1
ggaactcgaacaaggaacgatcggctaatcgatatggctggatgtgttgccagcggcgtggccgttccgcctttgatgaagctagttgttgtttctactgcctgaggtgaacaaaccttatacgacacactacaggacgcctacaccatgagacaatactacaagatgtgtgtgaacggactggacatatagtcagacagccagaaggcgaagtacttccacataggcacgcatgtcttgaacatcaggaaccacaagggatcccagatgaccaagctcatgcacagtaatgaccgcatccacgacgacaataatgcgcgcacgtattatcaccgctattacgtgcacctgcaggaggacgaagcaca

SEQ ID NO: 41183 - DNA, 1973 bp, Zea mays
  Clone ID: MRT4577_137563C.1
ctgaattataagggagtttacatgtaaagatagatataagtattcccatttattggagggggtcagttaggctgatctctacccttatcaagctaacgactagataaactttctataaccaatgacacctccttggactataaaagggggtagtatcgcccatcaagggcagatcatctgatcatattgcataggcaatagacaccgcaacacacaagacgcatagtattatcttacattgatagcccgaacctatctaaatcttcgagtcccttgtgcattttccttaaactcttgatctaccccataaattcactatcgaatatttctcgacaacctttagctttatatcaaattcatacgcctcttatatattttttctagcctcatgcatgcaactagcagtatactatttttcgtccacccagtgcaggtgccaattgcgctgccaaccatttttctgccagcaggtaaactcgtgggcatggcatgtcgaaaacagagctccaattctttgttgtgtgcttgtacccttgtgggcttgtggtagtcactctgctattcatcatgtcttgcgacagtgctgcatgctggtcatcactctcatgtggcatgtggcatacttctgaaacaaatcattgagatggtgtctccaaaaattaatctacgtactcgtcactgtgtgccaagcatgtcattctgaccaccgaagatctcataaagccctaatatcattagagtcaaataatgtctgatagatgagttagcatgtgaatatattgattctaacatgatcagcatgcgattgattcaatgcaagtgcaaggatcataaacattcttccactgtcccacgacttaacccattgtcgtggtggcactgaacgtggtgtccttgggtgacccacttagaaaatttagagtttagtgatgggtttgctcattttatagtgcagtgacctatttgcacatacaagagaagtctggtgacctcggatgcaatttacccgatatattattttgtttcatggtttatttataatttacttcatccagctcttagctcaagtaatctggacaagtttctcatctccattgggaagcaaccagcatatgtggacttggaggctgcaccagctgtgggtaaggataatcctcctgatctagcacatttggttccaactggtgtgccaaattcttcagaacaaccagttgagaacacggcacctactaatgttcttaaagagacagaagtgaaggctaaacccaaagttcagagcaagggtgcagaaacatcgagcaaagtagataaacctactatcgataccagtgttgacaaatttgtaaatgacgtgttcgagatcatctccccattgttcttgtctgaggcattgaagaaattggacattaagaaggaagatctttctttgatcttagaaggcctcaggggacgggcagatccagatttgaagagtatagcgatgactctgaagaatgcatcatatacctcagggtttcacgctggttacaaaaccatgcagaatcgtggtctaaacggctgacccacttaggttccagtctctcaattgaatggtttgatacaagaaacaggaatctgattttacatatttgtatgctgttgaatgaagtcaacatattatgtttgatgctctcgttctatctatgacgtattctcttttttttttgtgtgtgtggatttgccttttttctctctgagagatcaatgggaattttcaccataccgtgcagtgttccatagaatatgtatttacaagattctgctactcgctctaccaacatcagagtttcagtgtatcagatacatcacatagaaatgtcttcggcgcgttccagaaaaaactgttaacatgggaaatcacccaaacagccgttttacgggccctttaacaatgtggaaatcccccccctttacaggggggggatttcattttt

SEQ ID NO: 41184 - DNA, 270 bp, Zea mays
  Clone ID: MRT4577_137564C.1
cttaaatgccggcttgacgaatcacaccatggcacaccgaatacagttcccacgctgatcggggtgacaagtagggcccgagcaaggggaaataatcctcctactgcgggtggtacagaactgggtgacatgggactcgggatgatgtatcatcaagaactgggatgtcggttgcgctgattcggcagctgtcgctcgttgctgcgggaaagactagctgatgtagactactaactgggcacggtggttgctgggcggggtgggttacac

SEQ ID NO: 41185 - DNA, 1858 bp, Zea mays
  Clone ID: MRT4577_137565C.1
gcacgagagaagtcgtaacagtaacagttcggatcggctagcctgctatcgctagcatccgctacccttcgcagcctaacactagcagaggagaaccgtaggatttggcggggacgggcgattgcacgcccgtgacttcgaccccgacgtcccttcccaactcgtccaccgccgccgcccgccgtcgcaaaactcgccagcggccagccatggggtacacgaaggaccagcttctcgcgcacctccagaagcttaagattgatttcacgtgctacgatcacccggttgtgttgacagtggaggaacaggccaaacatgttggccatttaggaggtgctttgagcaaaaatttactcttgaaggacaagaagcatcggttatatgttatttctgcccttgctggcaccaaagttgacatgaaaattctttcccaacgtcttgggttgggaaaaggtggtctacgaatggctcctgaggaaaatcttctagaagtacttcaggtgcccttagggtgtgttactccttttgctttaataaacgagtctgcgagtgctgtttcacttttacttgatcaaggtttcaagtctaaacagagctgctacttccatccactgacaaatgatgtgacaattgctcttagctcaagtaatctggacaagtttctcatctccattgggaagcaaccagcatatgtggacttggaggctgcaccagctgtgggtaaggataatcctcctgatctagcacatttggttccaactggcgtgccaaattcttcagaacaaccagttgagaacacggcacctactaatgttcttaaagagacagaagtgaaggctaaacccaaagttcagagcaagggtgcagaaacatcgagcaaagtagataaacctactaccgataccagtgttgacaaatttgtaaatgatgtgttcgagatcatctccccattgttcttgtctgaggcattgaagaaattggacattaagaaggaagatctttctttgatcttagaaggcctcaggggacgggcagatccagatttgaagagtatagcgatgactctgaagaatgcatcatatacctcagggtttcacgctggttacaaaaccatgcagaatcgtggtctaaacggctgacccacttaggtcccagtctctcaattgcatggtttgatacaagaaacaggaatctgattttacatatttgtatgctgttgaatgaagtcaacatattatgtttgatgctctcgttctatctatgacgtatgctctttttttgggtatgagtgtaataaatttgttctctccctgagaaattcatggaaattttgttcttgccggacgcatttaagaaatatgtgattatgaaggatgatctttctttgatcttagaaggcatcaggggacgggcagatccagatttgaagagtatagcgatgactttgaagaatgcatcatatacctcagggtttcacgctggttacaaaaccatgcagaatcgtggtctaaacggctgacccacttaggtcccagtctctcaattgcatggtttgatacaagaaacaggaatctgattttacatatttgtatgctgttgaatgaagtcaacatattatgtttgatgctctcgttctatctatgacgtatgctctttttttgtgtatgtgtggatttgcctttttctctctctgagagatcaatgggaaattttcaccataccgtgcagtgttccatagaatatgtatttacaagattctgctactcgctctaccaacatcagagtttcagtgtatcagatacatcacatagaaatgtcttcggtgcgttccaggaaaaaaaaaaaaaaaaaagcggcc

SEQ ID NO: 41186 - DNA, 1002 bp, Zea mays
  Clone ID: MRT4577_137566C.1
atatactacatttatgttatagaggcacaagtagaataatgtgctataagttgtacatcggaaaaataacatgtaaatatatagaatcaatttccatctctcacctcatgaatttgagataggcttatataataactttggaaagtggtggaatgtcatattctaaaaaaatagcctattgcattagtaagattccaattcttcgaaatcaattgtttttttcttttgtataagagaaaagtattatattatattatattggatttgtattcagggcagataatgcgtgagggcgtatgcgacggtcgctccgtagaagatgaggccaccgacgacgagcgcggagagggcgaaggtggcggcgacggcgagcgggatgccgcaggagaggatgccgaacttgagctggatggcgtcgaccatggagagcagcaggaagaaggtgcccatggtggagcacccggcggcgagcagcatcatgggcgatcatctccccattgttcttgtctgaggcattgaagaaattggacattaagaaggaagatctttctttgatcttagaaggcctcaggggacgggcagatccagatttgaagagtatagcgatgactctgaagaatgcatcatatacctcagggtttcacgctggttacaaaaccatgcagaatcgtggtctaaacggctgacccacttaggttccagtctctcaattgaatggtttgatacaagaaacaggaatctgattttacatatttatatgctgttgaatgaagtcaaaatattatgtttgatgctctcgttctatctatgacgtattctcttttttttttgtgtgtggatttgcctttttttcccctctgccctgccaacataccgtgcagtgttccatagaatatgtatttacaagattctgctactagctctgccctgccaacatcagagtttcagtgtatcagatacatcacagagaaatgtcttcggtgcgttccagaaattactgtt

SEQ ID NO: 41187 - DNA, 265 bp, Zea mays
  unsure (1)..(265): unsure at all n locations
  Clone ID: MRT4577_137567C.1
gcggccgncctttnnnnaaatttttttttttngacaagaacaaaaatccagcagtcaggatttgtttcaaccacccagttacatttttgttttcctttcctttctcagttacatattatcaatccaattgaagaagatttgtggtttaaagccatccattctgttacgacagatgtcggtcctcaaccacgtgctattacatatcaatcgtcgcccacaattttctattactcatcgtcgtctatcttccgattccaaccgtttt

SEQ ID NO: 41188 - DNA, 187 bp, Zea mays
  Clone ID: MRT4577_137568C.1
tggataatgataatagggataataattgaatcattttagaagtagctaatttcttttctcaaaagagtgtcccttcttcacacctactcactttacaactttgctcctaactgtgggttgaaaactctagctagagaatattatcaaatcttaacatgcattcctactattatgatagtttttaagg

SEQ ID NO: 41189 - DNA, 483 bp, Zea mays
  Clone ID: MRT4577_137569C.1
acctcatccaacaattatcttgcaatggatcttacggtagtatattagcggtgaggacttgaggtcattgttcttcttattattttgcagaatggatacattttccaagaggtccgtaaagacttccaagtggaaagtttattccagggaataacaacagttatgacaaatgtcgtcgaagatttgacctggtaaactttctttgattgtgcaaaagtgcaagattgtatttacttttaccactgatccagtgctctaatcagccaggtgccattataatagttccttctttattcatattagcatgttccagaagtaaaaatattactacctttgtaaaagctttctttaatatatgacgctttgtttggtcaataattcgtcattatcggaattgtgttatttttacattgtcagggcgatgcacactatcttaggtatcatggtatgcacgagtttgatcaggcaatgcaacatcttgag

SEQ ID NO: 41190 - DNA, 1353 bp, Zea mays
  Clone ID: MRT4577_13756C.1
gatgccgaaagtgtatttaaagctttgaggaaagctggcgttaaaactgcagtcgtctccaatttcgatacccgtctacggccactcctgcaggccttgaaatgtgaccactggtttgatgcagttgcagtctctgcagaggttgcagcagagaagccgaacccaataatattcttgaaggcctgtgagttactgggcgtgaagcctgaagaagctgtgcacgttggcgacgatcgtagaaatgatatatggggagcgagagatgcaggctgcgatgcttggctctggggcagcgacgttcgctctttcaaggaggtatttctatattttttcttgacacctcgttttagaggtctatcttgacaccaagctaatagattccagcaacagagcgcagccatcaccgattattggattggactagtgacagtaggataattgtggacacgctgcgctgcattgctgcactctttactctttctgcgtgggagctgaatgaaggaaagaccaagttgcttgcttcaaaaatggattctgcatagtcaagatgaaagaaaatgtgtaactctacgacaattcctttttctccgtgtggtcgcatagattttcgttgctcaatcgaccgcaccctaccatcgctcactctgaactgaagttagtcctgtgggtggcagcattgattgctggtgcggtacggcaggtctgtcatgcgccaccgggggaaatggttttgtggtccagtccccgtttgtctgcgcaaagaatagtccagaatggaccgacacgtcacgatataattatgttagaattagcggacatttgtcgcctatctccaccacctgaaacggaagcttctcggcgttgttcttgggtgtggactgcagatctgtagctttaggtttggataagaccagctgcagcaacgcagcatgtcaagagcagctttgtgttgtgtcccccaccccacccagtattttgttctctgggagggaagttcacagactccattctgacctctgtttttcgccggtgcgctcttcttgatgcaggttgccgaccggatcggtgttgaggtgacgaagtgactaagtgagctaggatggtgaatatacggaggcagaggtagtacccaggatcgcggtcgtcaaggaagccagtgaccccacccttgtggtgaaattcctgtgctggttcgccgcccctgtacctgtatgtatgacaacttattagggttccgttgaacctgctatgcatgcatgcttgctgccctgacagtgacaggcgaatgcgtcccatgcacttgaatatgagggtctgggttctggactaaaaaaaaaaccccccccccccccc

SEQ ID NO: 41191 - DNA, 276 bp, Zea mays
  Clone ID: MRT4577_137570C.1
gcacacaccccacctaccccgggcgggccggtgggtagcgcatcatggtacctctccctgctagagaaggggctggtgtgcctgtgctcgcggggatgggggggcagcgcctcgggcgagctggccgggcagcggtacacgactacgaccggggcccccgggcgcccctcaggagggaaactgacttgctagaggtctgcagactctggaccacctgagccttgatgtcatggaaaagcggttcaggcacatcttcctgctgatcatgggctagcg

SEQ ID NO: 41192 - DNA, 320 bp, Zea mays
  Clone ID: MRT4577_137571C.1
acgacgggtcatgatggaaatggacaaggccaattcccggtcctacagcgacgtgcatagacacctgatctagaagtacgtcacacggggcggcaaacccatccgcatgcgcaagggccgcacagtcatcgagtatcacgacgactacacgctcaccatccgcgacaacttcaccaccttcacgggcaaggcaagccagcagatccatgaccggacgggcacgcacggcaagctgcacacttcatcacagtcagcgtgctactgaacctgatccctcactgccatctgagagatcaagtgcgcagacaggtccaagctca

SEQ ID NO: 41193 - DNA, 200 bp, Zea mays
  Clone ID: MRT4577_137572C.1
agcgttttttgccaaggcagaacgagcccggcaggagaggaaacagcagcgcaagcgctccgggaatcagaccaggggccgcaaggcggggaaaagagagagcgaagggagccgcatggcgaatcaccaagccgaagggccaaacacatagacgaaacgcaacgaggacagccagcaaaagaaacccaaacaacaacgcg

SEQ ID NO: 41194 - DNA, 815 bp, Zea mays
  unsure (1)..(815): unsure at all n locations
  Clone ID: MRT4577_137573C.1
agtttcgcttttcccctcatcttctccgcagatcaaacgccaaaaccctaggccactccatctccgacgccggcgacaaccaccaacccctgcggctgtccgcggtagcccaggcggaggaagccatggacagcgccctcgcaagcgcggcggcgatcgccgaccagcgccagaagatcgagcagtaccgccacatcctcgcctccgtcatctcgtcttccccgccggacatcccccaggcgaagcgcttcctcaaccacatggtgtcggatgaggtgcctctcgtggtgtcgcgtcagctgctgcagacgttcgcgcaggagctggggaagctggagccggactctcagaaggaggttgcccactacgcgctcacgcagatccagcctcgtgtggtctccttcgaggagcaggtagtggtgattagggagaagcttgcagaactgtatgaatctgaacaacaatggtcgagagcagcacaaatgcttagtggcattgacttggactcaggaatcaggatgcttgatgacacaaacaaattatccaagtgcgtccagattgcgcgactctatttggaggatgatgatgcagtgaatgctgaagcttttatcaacaaagcctcgtttttggtcacaaacagcaaccaggaagttctgaacttacnnatacaggtctgctatgcgagaaatttagatctaaagcgtanattcttgggagctgcacttcggtactatggtatctctcagattgagcaacgccaaatcggggatgaagagatttgatgaaatgctcttgagcaagctcttagtgctgct

SEQ ID NO: 41195 - DNA, 140 bp, Zea mays
  Clone ID: MRT4577_137574C.1
tctttctttttaagcagatccagccataactactagcggtatttctaatagcactggttacagtaacaatggaactgtacccctttttttgtgcctactaaatttatcattgtcgccttatggaacttatattgctcctt

SEQ ID NO: 41196 - DNA, 405 bp, Zea mays
  Clone ID: MRT4577_137575C.1
gcagaagttacacttactactccactacttttcatacgccgatcccctctcctaggccggggcgcatcacacgaatgtagcccactaacactcacactaacgacgtttccagtgcataactaagacatcgtcgccaacatcaacttcaacttcacccgctacctctgcatctagcacaactaccacattgtaaagaccgacctgaccgtcaatatggataatgaaaagctccgcgtacgccacgaccacgacgtacgtcaaagcaccatacacagcgataacgactgacatctggtatcgcagtacatttcacgcacacgtattctggctacatcgacgattcataccatctgctgctgattgtgcgatacactgctactatgcatacatgtatcgtgctactat

SEQ ID NO: 41197 - DNA, 270 bp, Zea mays
  Clone ID: MRT4577_137576C.1
atcgcctactatccttcacccgacaacctcggcgggtcagggcgtgtttcgcgcggagggtgtggcatgaggagcagcagcagcaacactccatggacccgtgcccgttcgtgcgggtgctgatcggcaacctcaccctcagaatgccggtggcgccgcccgccgtcggtgccggagcggacgtacacccgtgcacgtcggcgtgctactgcaagatccggctcatgaagatgccggtccatagcgtccaggcgccgctcgtggtctccg

SEQ ID NO: 41198 - DNA, 224 bp, Zea mays
  Clone ID: MRT4577_137577C.1
agagggaacgcgacagcgccttcatacacctccccaaaattcccgctcccaccttttttttctaacggatactcaatcaaattgtgattgttatacaactaacattgcccggcaacaaaaacacttcatcatgtctctttgttataatgaataagaaatatttcaagtgacaccttatcatttccactatttttcacacacacttaaactctctctgtaactca

SEQ ID NO: 41199 - DNA, 126 bp, Zea mays
  Clone ID: MRT4577_137578C.1
gggcgggtttcaaaaaatcacttcaaggtaagggttatcaaagattccctctcccggtctccccatctcccgaaccgcgtgagtcaaaccctcccaactcgcgcgtcctcgatggatgactccgcc

SEQ ID NO: 41200 - DNA, 110 bp, Zea mays
  Clone ID: MRT4577_137579C.1
ctgtcagaacagcgagcgagaccatagcgcgcaagcaaccagcgcgagaacaagtcgggcccacacagccccgtctcgcaacggagtgtgagattgcattattctaccat

SEQ ID NO: 41201 - DNA, 332 bp, Zea mays
  unsure (1)..(332): unsure at all n locations
  Clone ID: MRT4577_13757C.1
ggcatctacgggggggggttaatgtttcggggaacatgaccacctttttagcacattttgtgcctccacagccgtttgaatagaaacttgggttntgaggcacagaggtattacacagtcatgagtttgctagttaataaaacattcttcttttttaatcttgggctaaacaaacgtcattggcggggncacaagggggttccaacctgtcccttttgtgttgcactcgcacaactggaaccatttgccaaggggcattctttttgataatggcctggggccttaacactactactacttttgtagggccggaaacaccatggaggcctcaa

SEQ ID NO: 41202 - DNA, 734 bp, Zea mays
  Clone ID: MRT4577_137580C.1
ccatttcacctcacaacactacaacacttctcatcttggagctcagcagcacagcatccaagctttttcttcggcaagatgaacaggaagccaggagactgggactgcaggtcctgccagcacctcaacttcagtcgccgggacctatgccagcgctgcggcgagccacgcagtgccgctgaccgtggcagcgtcggtggcgctcttggtggtgactacgccaactttggcggccgtggcgtgggtggttcctcctttggtaccggctttggtgccggctctgacgtccgcccgggcgactggtactgcacctgcggggcgcacaacttcgccagccgctccagctgcttcaagtgtgctgccttcaaggaggaagctaccgtcaatggtggcgctggtggctttgatggtgacatgtcacgctcaaggggcttcggcttcggcgctgtcggtggcatgggtggcggcatgggagccggcgcggccggtggtcgtgccagccgccctggctggaagtctggcgactggatttgcaccaggtctggatgcaacgagcaaacaacttcgccagcaggcaggagtgcttcaggtgcaacgcaccgagggactccggcactgaggtgtaggaaggccgcggcgatgagcagaagcagcaaagggtgtccgtgtcccgcagtcgacatcatcatcataagaagaagaagaagaaagtagaatgcaaagaaatcctcctc

SEQ ID NO: 41203 - DNA, 434 bp, Zea mays
  Clone ID: MRT4577_137581C.1
aacaagggaagagccggacaaaggccggctgtgaacaagggaaaaaccggggaggggggccccgaacgaaaggggacagaaaggggaaaaggggccaagggggcacgaacaaggcgggggctgggaggagagccccacggggggacccgggagcaagggccgggccacaaggggggcaaaagggggccgggggggaagcgccaccaggggcccaggagggccagggaatgttggggacccagcgcaccccgggagctggggctaagagggaatagggaacccggttaaagcggggtaagggcgcctcaagggcgagggcacggggggggaaagggggattaagggcccggacccggggggggacccggggacccccgggggagtccgggcggggccccgggggggcacaaacttagccgaaacagggggggaaa

SEQ ID NO: 41204 - DNA, 292 bp, Zea mays
  Clone ID: MRT4577_137582C.1
atgctcctcaaaacacaaatcagctgagctccccaactacatcatcaagcatacctcccatgcagccacttgatactcaacctcaggaggctgagccaagcgactcgcaaagctcggttcagaagatcttgcaagatctgatgtcatcctgtgttggccactcaggtaatgatacgaagacaccaaatggactaacccatggtgttaatggggttaattgcttagttggcaatgctgtcacgaataactcgggaatgggaggaatgggatttggcgccatgaatgggttcgg

SEQ ID NO: 41205 - DNA, 527 bp, Zea mays
  unsure (1)..(527): unsure at all n locations
  Clone ID: MRT4577_137583C.1
gccttgcgagggctcacgcatgggggggctgctcttgtcggcctgtgggctcaggaatgacgttgctggtgcgcgcgcgtgctcatatagactgactgcacattgatcagggggagtgggtttggaatcgtttcagtacaatatagggaaaggaatctggatgcgtcgctgaactatcatggtatcgcaagatgaacatgcagccatccattatattncatatgactgaacacacactctatctggatatgatagactggaataagcaactggtaacgcttatagagaatatcaacggaccatgcttgaactagttaatgatcttgatgattgtgataattcaaacaaaaataatgtttgaatataatgcaaaatgatacaattaagatatcaagatattttgaggactattcgcttagacaggaagatcgaataacaaaatactaactaagtctaacaatcttgatattctacaatatccatgtcaaagaaaatgaactaggacacgtgaaatcttacatgaagct

SEQ ID NO: 41206 - DNA, 533 bp, Zea mays
  Clone ID: MRT4577_137584C.1
ttttttttttttttttttttttttttttttttttttttttttttttttttttttgtttttttttttctgttcctgtaggcgtggcacctcccgctataccgagtcggattagagcgaggcgtaagcaaggccagagcaggggcgggggggaaaggggaatgggggaacaagtccaccgcccacaaatccacaaaacataaaaagaaaaggcagaagggccaaaggagggagcgaaaaaaaagtaaaagaaaggagatcaaaggcggggggccaaccggaaaacgggaagggggaaaagcagaaaagaaaagggcaacaaacaaggagaggaagcgcggggaaagggggccagggcggggggggataggaccagtgagaagggcaacagagaaaggggcaacaccggaaggccctgaaacagttggagcagggggaccaggctgattcgccccagcaggggaaaacccaaaacgataaaggttaacggcagggtggaaaaagaacagaaataagaatagccgaattccaatacc

SEQ ID NO: 41207 - DNA, 461 bp, Zea mays
  Clone ID: MRT4577_137585C.1
gcggccgcccttgccgtttcttttttcaaggaagcaggcttaccaaggagtaccaaacatcgctcaatggagccttgaaccttaaacatgatctaacgaaagacagcctatgcgcctgaaacttattttgggccgcgagcagggggcatgacctccattgtgactttaaaactaaccggactttctgggcgatgtgctagcagatgataacgacattatacctcggagtcatagatatcgagactggcacacccagattctattgtgagcatgttcggggcatctgaacctacgaagtatgctctgcaacttcaccattacgttacacgtggagaattgatcacgagtccatattatatgtcagacaccggatgagaactacagctcgtccgatggacagaatgcgctgattagaccgactgacacttcacttggtcttgacagataactcatcctccaag

SEQ ID NO: 41208 - DNA, 1177 bp, Zea mays
  Clone ID: MRT4577_137586C.1
cgaccctcccccgcctctatataggccatgggtggcgcactcggtgccgggcatcagctgcgctgctcaccaggaaggccatctcatccatccttcattgtattgtagtggcatcaccaggaacagcccagccgcaagaagacagacgacagcagcgagtggggatcggaagaaagaggaagcggagacgaaggtgagagagagaggcaaaagggcagccatgacgatgaagcagtcgaggttcaagaggatctgcgtcttctgtggcagcagccaggggaagaaggcgagctaccatgacgccgccgttgagctcggcaaccagctggttgcccggagcatcgacctggtgtacggcggcggcagcatcgggctcatgggcctcgtctcccaggccgtctacggcggcggacggcacgtcatcggggtcattcccaagacgctcatgacaccagagataagcggcgagacagtcggggaggtgcgggcggtggccgacatgcaccagaggaaggcggagatggcgcggcagtccgacgcattcgtcgccctgcctggagggtatggcacgctggaggagctgctggaggtcatcacgtgggcgcagctgggcatccaccacaagccggtcgggctgctgaacgtggacggctactacaactcgctgctgaccttcatcgacaaggccgtggaggagggcttcatcaaccccagcgcccgccgcatcatcgtgctcgcgcccaccgcgcaggagctcatggacaagctcgaggagtacgagccttaccacgacagggtggcgtccacgctcaactgggagaccacgatggaccacctggcctactgacgcccacgctgccagagccgccagcaggcgactgggacgacatctctgatccatcgatgccattcaggaaacaagcttttagcttgccgtcagattggggcttttgtttcgtttttaactgcatgcagatcggttttatttggagtgccggagggagagagaaaaaaaaaacaggttgattattcggttcgcgtagcaggagtacgtagtacgtgcttgttttgtgtatatggtgccttgtgtttgcttcccaccaacggggatgattgatggcttgcagtgttgtctctgtaccagttcaaaaaaaaaaaaacccgaccggtttcccct

SEQ ID NO: 41209 - DNA, 254 bp, Zea mays
  Clone ID: MRT4577_137587C.1
gcacgcaaacttaaacttcgaatccagctctttatccttccactcctatctaccaactctatcggggacattccacattactccgcacctacaaaaactactacttaaacccaaaaactcctacctattttatctcttcaaaactaactaaacatccatattctaactcaaaaacaactatcaccatctataaaaacaacttaaatactaccatcatccactatccaaaattccattaacacctctttctactc

SEQ ID NO: 41210 - DNA, 293 bp, Zea mays
  Clone ID: MRT4577_137588C.1
acccactcgtccgcccactcgtccggctgtttatccaattgtttcttgcactccctccaacaagctagggagggtttgttcataccacggcgagctcgtttcattatccatggatgatgagaagcaccaccaccaccacctgatacaccacaagaaggacgaggagcacgccgcagccgcaggatacagatagtccgccgagtacacagacgccacagtgactgaggtcagctccacaggcgataacgattactacgagtacaataaggaagagaagcagcacaagcacaagc

SEQ ID NO: 41211 - DNA, 593 bp, Zea mays
  unsure (1)..(593): unsure at all n locations
  Clone ID: MRT4577_137589C.1
ccccgcgtccgcgaaaaggtggctcacaatcacaagatctttggagttcttcacagatggaagaagaggcttattggcttggaaggcggaggcttgctggatcggtgactatcgagagaccctgcgctcctgatggactgtgccttcttttgttcaaaaacggcgacgcaaggtgataacgaggctggagaaaaagcggctcacgatcaggaaggaggtttcgctgtgtgtgtgtgtgtgttttttctatcttgttcgttaaactacagcaagtgcggtttcaatgtgctactttgtgatctttatcttttgctcttaaatatgtctaagagtggcctcatggacgtcctcaaaacgatagacatgtataagagtatgactaaaccgctgaaaaattaaaaaaaaaaaaaaaaaaaaaaaaaaaaaaaaaaaaaaaaaaaaaaaaaaaaaaaaaaaaaaaaaaaaaaaaaaaaaaaaaaaaaaaaaaaaaaaaaaaaaaaaaaaaaaaaaaaaaangggggggcccccctttaaaaaacccaaatttttccccccggggtttggaaaaaaaaattttttttttttgggccccc

SEQ ID NO: 41212 - DNA, 402 bp, Zea mays
  Clone ID: MRT4577_13758C.1
taactcacaactaattcaacttctattctttgaattaatccccacccctttttgactttcttactccaaatacacgattttagtttgattaattcccaccccacaaccccccaccacaataactttttcaatctaattcttcttcaactaccctcctctttaacccaattaatgattcaaatcaaattcttctctcatattttccctttatcttcttcttcttctatctccattaacatcatcaatcattctcttatttacatcttcgtatccataatctccttctttctgtcttatcacacttccttctccttcaacttcatcaccttttccttccatttccttcataatcttccccccaacatcaccatatccacctactccttttacttccacaccttc

SEQ ID NO: 41213 - DNA, 786 bp, Zea mays
  Clone ID: MRT4577_137590C.1
gaggctcggccgggatggagataacgagcccctacacttttttctaaaaaaaagaagaagagtctttagaggagcgtggataaaaaaaagaccgagtggctgtttttttgtgcttgcagggtgactgacctaggcgtggtggaaaacccagatgatggctgggtttttctctaacgcgcctatcaaatcaccgaaaatggtggctcacaatcacaagatctttggatttcttcatagatggaaggagatggcttattggcttggaaggcggaggcttgctggatcggtgactatcgagagaccctgcgctcctgatgtactgtgccttcttttgttcaaaaacggcgacgcaagatgataacaaggcaggagaaaaagtggctcacgatgaggaaggtggtttcgctggtttttttttttttttttttttgggctatcttgttcgttaaactatagcaagtgcggtttcaatgtgctactttgggatctttatcttttgctcttaaatatgtctaagatagacatgtataagagaacgactaaaccactgattggtgatggtcgttctatgcaactatggtttgacagcttggggaacaaggtgcatcaagaactgtatccagaactattttcctatgcaatcaacaaaaacatcactattcagcaaacaaaaaagcctgggtttctgcggacctcttccactttgccgctatctgctgctgaagcgtttgcacgatttcagcttctaggcaatgagctccaaaataccccactgttggatggaaa

SEQ ID NO: 41214 - DNA, 254 bp, Zea mays
  Clone ID: MRT4577_137591C.1
ctcaaccaatccttccttagaacttattgatcttagttttcttcctttaatctttatgcttacatcaagtgaaatgttcaaacaatacttgctacctcaacagaatcacccaaaaaatttcctatagcataaagccctttctaaaccctctaagaaaactataacgctgtatttacttcccattcttccttttattaatacctaaattcagtcttcaaacaaatacgaaaaactgaacttaatctcaaccttcc

SEQ ID NO: 41215 - DNA, 366 bp, Zea mays
  unsure (1)..(366): unsure at all n locations
  Clone ID: MRT4577_137592C.1
aaattagcttcatcatgctatggggtgacagacagatatcaactgtcatcaataggttcaagtaggtaactttgtggcatttttatttcaccaggatcgtgagagtacatgcggtaacagtgcgctttagtaccagaaggacctcatgggtgtagtcaggaaaacgctatcccactagatnactgtgctacatttttccgcagacatcagttttcgcacgttaccggatatgatcgttgaattccatacagctgcgcaatctttactagactcaaataatccatctgctcatcagcgacaggtcttacatcgtttgagaaaagatattattcctctacttgcggtttcagaaccacctttgccaac

SEQ ID NO: 41216 - DNA, 323 bp, Zea mays
  unsure (1)..(323): unsure at all n locations
  Clone ID: MRT4577_137593C.1
gggcggggggcagctatccaggaagcgggggcccgcgcctggccgccgagggctgcacgagcacgggggcgaccatgtccgtcgccgcgcacagcgcgccggcggtgtcctcgggctgcccatgcagcagcaacttcggcgggggtggggggggcgacttttttttttttaacnnctacgtgaacaacaacgagcaaggggtgaccaactccgtgctggacgggagcaaggtcctcctgaggatgagggacgccaggacccgcgtggcccgcccgcaaccccanccncnncnaaaccgccnccntaaggggaaaccaanctct

SEQ ID NO: 41217 - DNA, 656 bp, Zea mays
  Clone ID: MRT4577_137594C.1
ggggaaggactcgataagcagcaacgcgaggagcaaagcaaggtcgcggtcgggcgaactctacggcgtggactgctccacggccaggacggctgccgcgacgcacacgacgtcgctacgccacaacaccaccacggccaggaacagaggcgcgcacagggagcttcacgacgctggagaccgacgtgcgcaacagggagaaatgccggcgagccagggagcggaagggagctccgagctgggcgagcagggagggagaagacccgggcgcgcgccagggaacatagccgggcgccggagctggaggccgagcgagaagacgtggctgcgtgccatgggcaagagagcaccgagtagagggagctccggggagagaggacggcgcgagtccggcaagcgctggccagcagggcgccaagagggagagggtcgcgagctggaggagctcaactggacgcagacgctagggcgcgtggccgagcaggagcctgggcacgcgacccagggcgcggcggccagggaggaaatgcacgcagggaagctctgagctgcggccagcgcgcatgagacaggaagtaggggcgcgcggcacacagggagaagcaggagataaggagataaggaagcaggaaccagggataggcgtgcgtgaagat

SEQ ID NO: 41218 - DNA, 371 bp, Zea mays
  Clone ID: MRT4577_137595C.1
atattctatttactcttccgtttgttttactcctcccccaccaaatcattttcgggttttttaaaaactccggggagcgccaacaacggttagcttatccaaatggcggccaaccaccccaaaaaaaaaaattttttggcggaaaagaaaaagacaaaaaaaaccactccgtacacaacacccccaacaactacggcgtccttctcgagtccaacaacatcctttatccctagaaacaaaacacccacatctttaagctacaacaatctttaaaataaaaaaaaaaacacggaacaaaaaaaatatcatgaaccgaaaaaaccaaaactttcgaaacatcaccaacaacttggtccaatcccaacaaaatt

SEQ ID NO: 41219 - DNA, 775 bp, Zea mays
  unsure (1)..(775): unsure at all n locations
  Clone ID: MRT4577_137596C.1
catagaaaatcagttcaattttcacaagaaaagtcaggattatgaagaaaccctgcattccaattgggtcctaaattgataagttgtcatatttggtggacttcgccacactaaaaaggaaaagaaccgaacaagctaacaacataagtttttcagtacacaacacaatgacaatgcaacattaccactacaattatccaatagccgaactgcataggtttcatgttatcaagtgcattagttggcctgtgcacgtttcacaagatcttctagcctcctatctgggtcgtgacattcttgagcttctgcgagcaacgatgaatgtggtatcgttgatgcccctgttaacaagtgtaccatttcaagagcttgcattctaagctttgttggataatccttcacacatccaattctgggcccagctccagtgctccatttgagggataacttgaggccaagctgataagattcagtctcactcttggatttaatcctctcaagaattgccttctggggggcatcagtgcctttggggttgtgcagaccacctgataaggttctatgatatgttacctttgctcgttctattggagcatcctttccttcatcgccttcctttgtgtctgaagagagaatcaattgtggaggattggtaccaacaatgatgttttngtgtttcattaggcattgaatcattatggtagtctcctttcttgaatggtcgcatctcaatttctttgagattaactccattttcttctagaaatttcatgaa

SEQ ID NO: 41220 - DNA, 484 bp, Zea mays
  Clone ID: MRT4577_137597C.1
cccaaacccaggggcccccaaataattggggggactggggggaactatcacaggagcggcaggccagccctacaaggaacaaatgggcaaaggcataagcggactggaaactggtccaaaggcccattgcccaaaacaaatcataggcaaacccgcccattacttttgggctagtttcagggacccaggcgggggacaaactggctttattctaaaaataaaaacaaggggggggaaaacacaaattcccaaacggacccatgggagcaacttatttacatcccaccccaggaggggaagcttcgcaaaccaaaaaaggggggcttaaaaaaaggcctaaataatctcatcccccccttgaaaaaaatttcacagttcacaatccaaaagggtgacaggcaatgccacgggaaaaattacaccgggggggcagggaaccaccatctagtctcctttggggaccccccggggggggaggtccaaa

SEQ ID NO: 41221 - DNA, 431 bp, Zea mays
  Clone ID: MRT4577_137598C.1
attcaatttattttgacatgcaccattttggatttaacatgttaataattgaacttgacaggagtggcaaacagctacagaggtggaggggtaacttaataacaagggctagcaggagggatcgagcttagttcgtgctcataggaatgctgatctacttcgctatcactactgacattgcttcttgcgattgcaaagcaatagagagaattagacaacaatttctagttaagagaatgaaggatgacataggcggacactgactcgtgtgacgaggaaagggtcgtcacctcctagagctcgtcggacttggtatttgaagtctactagagctatctcgagcactgcggatgaaatggcttctgctatgaaaaactgagtcaaagaaaccatgagctggtttacctatacaagctctagtcaaagcctag

SEQ ID NO: 41222 - DNA, 419 bp, Zea mays
  Clone ID: MRT4577_137599C.1
cattgcgtacctcgaggacggtcgggacgtatcttccataacggcgtgtgatctccgacttacacttggacgcctccagctcctccgacgacgacctctgcggagtctccctggacagccgtccgttgtggtccagcatattgacgccgagcaatatggagccttttcggaagctggtgattaaacggaactgtcgaggaatggcatgatcacctgcatgtcgcgtccccagtactgtctgcgcaggtatctgaacttttccgcttcgaatgtcgcgcatggatcgctccttccagatttccgcgacgtcatcttaacagactagcggggctcatcttctccagctcgtccagaacttggccggctttcacacgccatggagagtgacctgccaactctgggtatgactactgacacgg

SEQ ID NO: 41223 - DNA, 552 bp, Zea mays
  Clone ID: MRT4577_13759C.1
cttctccgttgtgctgattggggaagaccaacaggcatgcgcgctgagccaagctgctaatggcatatctatctcttgttattaccttgtattcgggatgaaacagcaaacacacgcataaatattgttgaatattaccgccttacacttgcgtcatcatgtaaccttatacactcagtggttaataacacatgctctaaaactgctgccttctatatactttggaacaggtaaaaagcgtatgtctggactaactgtatgggcctattagacttgacctgttcctattgaatatcaatgatcaacacagcaactggattactagcttctcctctgttgttccataaagcgattgctattcatgatctcacgtcacagacgatgaagatgactctgttgtaccaaatgcagttatgctcaaaacataaactaccattacgatgtggtctatttattggaaaacggcgatgatggtctaatctactgaagaaacatatgaaatccggctacaatgtaacaaatacaatgagattcttatttggctgcattacc

SEQ ID NO: 41224 - DNA, 373 bp, Zea mays
  Clone ID: MRT4577_1375C.1
cggggccgaccaacccgtccgaaaaaaaaaaaaaaaaaaaaaaaatttttaattttaaaaaaaaaaaaaaaaaaaaagagaaaaaggtgaataaaaaaaaaggggaggggtaaataaaaggggcccccctttttaaagaaccaaatttaccttccctgtctttgcaaattataatttttttttttgggcaccaaaaataaaataaattgcccgtgttttaaaaactttggacttgaaaaaaccttggtttacccaaattatatctttttgaataaaatccttttttttcaagttgggtaaaaacaaaaaagtccttacctatattctctttccaaaaatttgccaactttaaattggaaattggaacccccct

SEQ ID NO: 41225 - DNA, 589 bp, Zea mays
  Clone ID: MRT4577_137600C.1
cgctgctattaggactatgcgatgggagattcgtggaattcgttctaaaattggcagcaatgagtgtttgctatgttgtattgattttttgtttcatattgtggagacccttgttcgcttcttcaacaaatatgcatatgtacagatagcagttaatggacagagtttcaatcgctcagctagggatgcttgggagctgtttcaatccacaggcatcgaatcacttgttgcttatgactgttcaggtgctatccttctaatgagcaccattttaggtggattgattactggaacctgcatgggcgtttggacatatttcaaacaaagtgataaagctgttatggttggttcaacatccatgctgatgggtatgatactggttggactaactgttgtggttgtggaaagtgctgttacatcaatatacatatgctatgccgaggatccccttttgattcagagatgggatcccgaattttttgaacaaatgtcagaagcgctacaccagcggctgcagtaccgaagcgcgcgagctcgtcaaatattgaatggggcggtttgatcatttgccacatacgtcccagttttg

SEQ ID NO: 41226 - DNA, 1756 bp, Zea mays
  Clone ID: MRT4577_137601C.1
gaaagaacgataattataatttttttaaataaaacaagccggtcaaacttgatctcagaaaagtcaaatacattttttctgtggtacagggagtaaatctcgcgagattgaaacagggccttagtatatgagcactaagcaacactgttatgtacagccggccaagtagcgaccatgatgctgttcctctccatagtttgtcgtattgtagcgctaaggctacaaaaggaagacaaaaacctatcacattgccacactaacccgcattgatgttgaaaccggacacattctgcgtcacaaatctcgaaatggatttaatagtatctaccttaccagaaaagccttacacaaataaaaaaaacgatggtgcagtaccaaagaagcatgagcatccacattacggcttcatttggatttgaaaacattttgttcttgaaggcgtacaagattgctggggcactccagttctcggaacgtcaatggcttcgaatatcttccttggtctatatatttcaatggcagggagatccaaatcttctgtaaatgtctgcccacgtatcaatggattcacagagataatcaatatctggcacgcaattcattcaaatactggacgtatgtggcaaatgatcaagccgcccattcaatatttgacgagctcgcgcgcttcggtactgcagccgctggtgtagcgcttctgacatttgttcaaaaaattcgggatcccatctctgaatcaaaaggggatcctcggcatagcatatgtatattgatgtaacagcactttccacaaccacaacagttagtccaaccagtatcatacccatcagcatggatgttgaaccaaccataacagctttatcactttgtttgaaatatgtccaaacgcccatgcaggttccagtaatcaatccacctaaaatggtgctcattagaaggatagcacctgaacagtcataagcaacaagtgattcgatgcctgtggattgaaacagctcccaagcatccctagctgagcgattgaaactctgtccattaactgctatctgaaaatggcaaactatttttagggcattgattcgatagcatgatatcaacagtcaatatttcataccatgaaatatagacaaattgttacaataataagttttcacatttcaataaaagcagcgaatgggtcacaaatcacatgcatttgtgcaaaaatatccaggcaaactaaggtactttgattggcagaaactaaaccttatagcttaaaacaataagaaaaacactgtcagtgtcaacaaacaaatgagaaagagaaaacagctggaacatgtagttttttcaaataggcatggtctacatcttgaaaactactgaagagataaacatactcacctgtacatatgcatatttgttgaagaagcgaacaagggtctccacaatatgaaacaaaaaatcaatacaacatagcaaacactcattgctgccaattttagaacgaattccacgaatctgtaaggggtgaggcaaaaaagataaaagcgatgagaactataaaaaggaagctaaatgacagagaggcttttccacatgtgcaattataagtttgcaattctatacgagtcattaagagtgtgtttggtttgaggattgaagtgatccatcttcttctcactcctcattttttttatttggtttgtggaatagaatgagttgatccatcaccaccccattcctcataagctaataattagcggacgcgtgg

SEQ ID NO: 41227 - DNA, 394 bp, Zea mays
  Clone ID: MRT4577_137602C.1
cttggtcagtaaaaccatcaagccctgcatttatccatgccacgcctggagttcagatggtcgcaggaggagatgatcttgggcaacaatacaacactcccgaatctgtaagtacagtctgtttgtgtggccattggaatattggtgtttattcacgaatcttaatgcttttagtttgttatacctgtgtgcatacttgcagttttttgggtttggtcacgccactccactctacaatttttaaagcatcagtttgttggtagattggtttcctcttgaccatttggaaatatatttagatcataatggccacaaccattaaaaatctgccattttgtttggtaaacaaaattctactttacacatttgatatatattgtggcattggcagata

SEQ ID NO: 41228 - DNA, 249 bp, Zea mays
  Clone ID: MRT4577_137603C.1
atggttcacatcgtcgagcaccatgatttcatgcccgaggacttcatggtggaggaggtgactgcctcttccacaccgcgggccaccaacctccctgtgcctggtgccgctgttgcgcactctacgcgacaccacactcctgcgcaaacgttcagggcgtctagggctgcgcgtggggcgctgtctgcgaccagagaattgttgtgccaccctcctagctccacggcctcgccgggggccatgaagtag

SEQ ID NO: 41229 - DNA, 360 bp, Zea mays
  Clone ID: MRT4577_137604C.1
cgggcgcgtggcgaaatttccatttataagaccttctcgattgtgcccaatatttgatgtcgggtaattcctacggcctggggggaaaaaagggcattaacttattatagagattgagcgatttgactatttttttttttaaccgtacctatatctcattcttacaaaacttacacagggttcagcctagagagaacagctgttatcataggagactctgactagcctaaggctatgggaactactggtcttttctgtggaggatcctagttcgttgtgatccaaggtgtacctgtagttgatatactaagaaagataggcgctgcgggcattactatcgataagaccgccatgtacttg

SEQ ID NO: 41230 - DNA, 331 bp, Zea mays
  Clone ID: MRT4577_137605C.1
ctgtcgagtactgtcacgctcagctacagcattgggtgtctgcacgatggcgatctcctacacggcgatcgtcggcacccacggaaggtggcctccttcggcgagggccgcatcacgcatgcgcaagaccgtgggcaagcccaatgtggcggcgtgcggcagccgctgatacggtcccgaccgcgtcaagtacctaggacccttatacggcgagcccctgagctacctaaccggagagttaccaggatactacggatgggacaccgccgggctgtccgcccaccccgagaccttcggcaagaaccgagagctggaagtgatccactcccga

SEQ ID NO: 41231 - DNA, 254 bp, Zea mays
  Clone ID: MRT4577_137606C.1
tttcttttgtatctctacttgaataagggggttcatggtgattttacgggagacaatctcttgttttccagctcttcttgtgggaaaagtcggaatgccttcgttaagcatattattgacgatgaacaggatatgctgacaagacacttctggactcatggttatactgtcatatagatgctgtcgctgttcaagctaccagtgagtgagtatatgatacatcggcagatggcgctacactatatagtatggtc

SEQ ID NO: 41232 - DNA, 1091 bp, Zea mays
  unsure (1)..(1091): unsure at all n locations
  Clone ID: MRT4577_137607C.1
aaaccacccaccgttgctgctgctataccaccatcaccagtcaccaccaccggataaggacacggcagcactagctcgtagagggtcggccagagtcagcaaaacagaatacgggagaggatatgcggccgcgaccgtttcccgagcgcagcggagggcggcctcggcggcgaggcgctctactgcgcggtcatcctgtggctgtccgtcatgtcgtggatcatcttcacctgggccggcgacggcgggnaggannggcggcggggnnnnnnncggcggcgcagccgcgggagcccagcgttcgtcggcgcgtcggggatctgcgacggcaccgggcccgagtgcagcggcgggtacggcatctgcggcacctgcctcgactagcctgctctgctactagtaagtttgtgtgagcgtcaaaagcgcggccatgtttgtagctgtagcgtctacatgtcgtcgtcgatgcgtggcctcgatggagcagctggcgttgctctggtgatatgatgagcagagcagctcccctgtgtgaagacaataagagggaggagcctactcatcagcctacttccatcttgcttattaggctgctcaaactgagttgtcgttagctcttttttttatttctccttcctttaaagtttgatctcgatcctctgtaaatttaagctgcagaagaaccaaatacatgtctcgaacagtactatgtgagacgagatccttcttcgtccgcgaggtttgttagtttcctgctgcgtttagctgctgtggggggggaatttctctcgttgtctgaggagctctatcctatgacagatagttgggcacatgtccttttcaggtaggcaatctgcagtggttagtgggaagtctcaagacggctttcggcaagcaagccaaagcttatctcgcttcctcaccacaaaagccactgttggagcaggctgcacaggaaacgttaagcatcagttaggccctgttcggatggtgattacattggttatcgtttacacctataataagtggtttttgagttgtatattcttatatcttatgcacaagaataaatggtgaacatatagtttggg

SEQ ID NO: 41233 - DNA, 728 bp, Zea mays
  unsure (1)..(728): unsure at all n locations
  Clone ID: MRT4577_137608C.1
ccggccaaccagtgtatggatcccgagacggactcgttctttgacttcagccaacttccgtctcctaccccgtcgagtatatcgcgacaaccgtcaaatgctgggccatcgaccatcgctagcccaaccaattctgcgcttgaagaggaccagaagcccgcgaagcctagccacgaatatgaacgcttcaagcaacagaccggactcccctccggctcgatcaatggtctttaccaacccttcaatggaggtcagcagatgttctcgtccaccggcttagacgagatgagcatgatgggtgttgacggcatggactatgggatgaacagcggaattggaatgtcggatatggacatgtcgaccccgtctcaaccggcctacttctacccctctcaatcggatgaattcgtggaccccagcgccattcaagaggaggtccctcaggttcgtgtgtggcctggcatgcatcagcagcaggctgcgatggcaaaggctcaggcgcaagctcagcaacagaggcaacaacagctggctcagcagcaacagagacaggccgcacaacagcaacagcagaaccgccttcacccgaacaggaggaatggctcgagtccgatcagcgatgcccgcactgaggagacgatcgctcgcgttgtcaaccaaatccgncagaacagccagaacgggctccttggcctcccaggacaacaaccagggccttcttccccaca

SEQ ID NO: 41234 - DNA, 855 bp, Zea mays
  Clone ID: MRT4577_137609C.1
gccggccgggccgggacgcacccacaagttgagagctgagactgatctgtgccatccgtccgttcccgcgagcgagagaggccggccgcagcatatggcgtccgccgcccaccggtccatggggtctgccctcctgtccctcaacctcatcatgtacgtcgtcgtcgcggtcatcgctggctgggccatcaactacagcatcgacgagagcaggaactcgctgaagggcgcgacgccgccggtgcgcctgttcccgatctacttccccatcggcaacctggcgacggggttcttcgtcatcttcgcgctcgtcacgggcgtcgtcggcatctccacctcgctcgccggcctgcacgaggtcagccaggggtacccggccagcatgatgtccgccgccgcgtccgcccttgtcacctggaccctcaccgtcctcgccatggggctagcgtgcaaggagatcagcctcagcgtgaggcccgggagcctgcgcaccttggaggcgttcaccatcatcctgaccgccacgcagctgctctgcgccgtgtcgctccacgccggcgcgcacgcggtcatcctggagacgcctatcggcggcagagtctagctgaggtgcgcgatgacagctagcatgcgccatcttggcagagtgatcggtgttgtgtcgctttacaggtgccgtgtgtgtgctttctgggtacctaaaattcgtgtgagcctcattcatttgtaaaaaaaaaggcgtggactcataagtggtggtgaactatcggcgattcttcccatactactgcaagacaaaattattgcgctttgcacagttccactatatatatatactaagtgcatgtttgtatt

SEQ ID NO: 41235 - DNA, 632 bp, Zea mays
  Clone ID: MRT4577_13760C.1
gttctgatgcaaaaaacgctatctctcttcttcacttgcactgctcgttcaatgctgtgcaggatgatctgaggtcccgggcgaccgcgaagtggttttcatcgtcggcatggcgctcggatccgctagcggggctggaaacaacaatgacttcaaagcacttattagctgcactaatacacgtcgggatcaactgctgacttaaccatcgattttgtgatgcttgtctccatacacacccctgaccttcttaagatgaacccccttgggaagttcctgttctgcagactcctgatgtccctgcctttgagagtaatgatatcgcacactatgttgctctcttgaaggatgacaccccgtctgcttgggacttcccgtcattgaacaagaccatcctcaccaatggatggattatgccgccaccaaactcgatcctggagccgcatgaatcttgcatcccatgtctcagtacctccattatgccatgactactgctgaaacagctatatcttcatcgaaaacggcacttgatgctctgaacactcaccttgcctcacacacatacctttttggtcatgctgctactctaactgacattgtatacacatgctacctctaccatggaattgctc

SEQ ID NO: 41236 - DNA, 757 bp, Zea mays
  unsure (1)..(757): unsure at all n locations
  Clone ID: MRT4577_137610C.1
cccccctcgggtcgacccagcgtccgccaccaccaccaccaccggccaggnacacggacggcactagctcgaggagggtcggcaagccagagtcacagcagaaggtgaaagggagcggatatgggggcggatcgtttcctgagcgaggcgctctacttcgcggtcatcctgtggctgtccgtcatgtcgtggatcatcttcacctgggtcggcgacggcggggaggacgggaggcgggggaggaagcgccggggcagccgcggcagcccggtgttcgtcggcgcgtcggggatctgcgacggcaccgggcccgagtgcagcggcgggtacggcatctgcggcacctgcctcgactagcctgctctgctactagtaagtttgtgtgagcgtcaaaagcgcggccatgtttgtagctgtagcgtctacatgtcgtcgtcgatgcgtggcctcgatggagaagctggcgttgctctggtgatatgatgagcagagcagctcccctgtgtgaagacaataagagggaggagcctactcatcagcctacttccatcttgcttattaggctgctcaaactgagttgtcgttagctctttttttatatatctccttccttcaaagtttgatctcgatcctctgtaaatttaaggtgcagaagaaccaaatacatgtctcaaacagtactatatgagacgcgatccttcgtccgcgaggtttgttaaaaaaaaaaaaaaagaaaaaaaaaaaaaaaaaagcggcc

SEQ ID NO: 41237 - DNA, 792 bp, Zea mays
  Clone ID: MRT4577_137611C.1
tcgcctcggggccggccggggcagtgcttcacacccaccgcttccaccaccaccacccaccggacagggacacggacggcactagctcgaggagggtcggcccaagccagagtcacagccgaaggtgaaagggagcggatatgggggcggatcgtttcctgagcgtggcggagggcggcctcggcggcgaggcgctctacttcgcggtcatcctgtggctgtccgtcatgtcgtggatcatcttcacctgggtcggcgacggcggggaggacgggaggcgggggaggaagcgccggggcagccgcggcagcccggtgttcgtcggcgcgtcggggatctgcgacggcaccgggcccgagtgcagcggcgggtacggcatctgcggcacctgcctcgactagcctgctctgctactagtaagtttgtgtgagcgtcaaaagcgcggccatgtttgtagctgtagcgtctacatgtcgtcgtcgatgcgtggcctcgatggagaagctggcgttgctctggtgatatgatgagagcagagcagctcccctgtgtgaagacaataagagggaggagcctactcatcagcctacttccatcttgcttattaggctgctcaaactgagttgtcgttagctcttttttttatttctccttcctttaaagtttgatctcgatcctctgtaaatttaagctgcagaagaaccaaatacatgtctcgaacagtactatgtgagacgagaaaaaaaaaaaaaaacgggccctgtaaaaaaagaaaacaaaaaaaggccccta

SEQ ID NO: 41238 - DNA, 195 bp, Zea mays
  Clone ID: MRT4577_137612C.1
ctaacgcctttgtacatttaagattctgttttctttatggcacaacgacctcctccacatgcttaggcttcatagatacaatgcctatgccgtatcctttctaactctttcgatgctaccattaaacaacttgataatttatgcactcgtctaaatgtctcccatccaatccatatatctgctaacatttatctt

SEQ ID NO: 41239 - DNA, 416 bp, Zea mays
  Clone ID: MRT4577_137613C.1
gtttcaagttgttgcgcctgaaacgcatttaagagagaatcggggttcttgtatttcacccctgacaacgactgggctctattcattaaatgttaaccacaaaacccgctatacaataaagataattacgaggatgaaatcgatcaaaaaaattcaaggcaaaccaggtcattttcagaggtactcattggttcaggttctggagactcctatagaagaaagaaacacatcaacaaattctcgatgtgtgtcaagcctttgaagtggtggcgatggaagtctttgtgaatcatggatggtgatcaaatgcaagacttgagtgtggctagtggtattcatagtcacgatatttagttccatcaagttagcttcattattcaagcacctgttcattgagttaataattgacgtgtaat

SEQ ID NO: 41240 - DNA, 193 bp, Zea mays
  Clone ID: MRT4577_137614C.1
gggacggggattttgggaggcactcggattggtcaggtgaaactcgaataataacccaaccccggatatcctttctcccgcattctgttcagcagggaacctttctcaaaatggcctaaaccggacaggggatgtgtagtgatcttgttgtcaccatacaactgtcttttctggcccttgaaacttagaagac

SEQ ID NO: 41241 - DNA, 913 bp, Zea mays
  Clone ID: MRT4577_137615C.1
ggcgctgccgctgccgctgccgctgctgccgtgccaagtcgccgggcaagctccggatcggggggcgcgcgcgcggggccgccgccgccgccattatattgggttagttaggccagcttgtcattgcatcggagagatgtatccggccactacgccctacgatacggcgtccggggtgggcgtggcgccggtggccggcttgttccccgtcgccggagaggccagggagtggtcgtcgaggctcctggactgcttcgacgacttcgacatctgctgcatgacgttttggtgcccgtgcatcacgttcgggcggacggcggagatcgtggaccacggcatgacgtcgtgcgggacgagcgcggcgctgttcgcgctgatccagtggctgtcggggtcgcagtgcacgtgggccttctcctgcacgtaccgcaccaggctgcgcgcgcagcacgggctccccgaggcgccctgcgccgacttcctcgtccacctctgctgcctccactgcgcgctctgccaggagtacagggagctaaaggcgcgcggctacgagcccgtcctcggctgggacttcaacgcccagagggccgccgccggcgtcgccatgtgcccgccggcctcgcaggggatggggcgctgatcatccgtcgaccagccagccagcccgtcggggtttgattcatgtctccgatctgttggttcatgcatgcatgtctccatttaattcatctgttcatatattcatgtctccagatccagacggtacgtataatatattcagttgttttacgtactgttcatcgtccgacaacacagcaccattaattactgtcacctctttctctcagcgctgtacatttctggcgtgttaatcgcaagatacttctttcaagttatacggccttcatcactt

SEQ ID NO: 41242 - DNA, 219 bp, Zea mays
  Clone ID: MRT4577_137616C.1
agaaccacaaattggggtaaaaagtttgtcatgaaggggaaacagtaacacaggttcttaaaaacaggaaatgtttgaaaaaattaagccccgcaactaattccgaaacttaggtacatgaagcaccagctgctgttgttgatggaactgctccgcttgggcacgtgggtccctgactaggctttgggacaacatcctaggcggacccgtgggtagacc

SEQ ID NO: 41243 - DNA, 1629 bp, Zea mays
  Clone ID: MRT4577_137617C.1
atgtacaaccggctcaagacaatggtcaaccaagtccgcaacctcgggagcactaagtgggatgactatgaaatggtcaaggttattctaagatctcttgtttttcatagtcccactcaagtgcaactaatccgtggagattctagatataaacagatgtcttccaaggaggttattgacaagtttgtgagctttgaacttatgctcaaagactccaaacatattgtcaactcgaatcaaggtgccacctccacacccgatgtgcaacccgttgcgttcaaaccaacaaaagaaaagaaggaagagcctacaccaacaagtagattcccaatcgacgcctccaagctcgacaatgagaagatgactcttatcatcaagagcttctggcacgtcctcaaacaaaggaaggggaaggactacaaaccccgttccaagagggtttgctacaggtgtggtaagtccggtcattttatcgctaaatgtccatatacaagtgatagtgatagggacgatgacaagaaagggaagaaggagatgacaaagaaaagatattacaacaagaagaagggtggcgaggcacacatggggcgaaaatgggactccgacaagagctccaccgactcctccttcgacgaggacgccgccaacatcgtcatcaacaaaggccttctcttccccaacgtcggccacaaatgcctcatggttaaggatagcaaaaagaagaaggtacattctagagataccaccaagtacactacttccgatgatgagggtaactctagtgatgataatgatgatttgacttctctttttgcaaaccttagtaaagatcaaaagaagaaaattaatgaattgatagaaaccattaacgagaaggatgatatcttggaataccaagaggacttgctcattaaggaaaataaaaagtttgttaagctaaaagatgtttatgctcttgaagtagaaaaatgtgaaaatttgtctaaagagcttaatatttgcaatgattcaatttcttgtcttataactgaaaatgttagtttaatttataagattaaagaattgaacgcttgcaaaccctctacatctactattgagcatgttaccgtttgcactaaatgtagagatgttaatattgatgctatgaatgatcaccttgctatgattaaagaacaaaatgatcacataaacaaattaaatgctaaaattgtcgagcatgaactagagaatgaaaattttaaatttgctcgtagtatgctatataatgggagacgccctagcattaaggatgtcattggtttccaacaaggaagccaaagcaacgtcaaacttaatgcccctaagaacatgctttctaactttgttaagggcaaggcacccatggttcaggatagggaagaatcttcacaagcttctaaagcggagcacattttaggactaaccaatgttcattttgagaaagacaggatttgtagtgcatgtcaagcagggaagcaggttggagctcatcatccacacaaaaacatcatgatgaccgagaggccgcttgagctactccacatggatctcttcggcccgattgcttacataatcattggtgggagaaaatctcaaacccaagagacctaa

SEQ ID NO: 41244 - DNA, 373 bp, Zea mays
  Clone ID: MRT4577_137618C.1
gtcggatctggggttgggggttatcttgtttcttttttttttaaataaaaggatttggttcgcactgaatggcacattctgtgctgttggcacagcatgggatcattttttaggaatcttgcggactattttaccagtgagaaccggttgcttctacgagccacgtgccttgacaggagtttgcattgcactggttgattgtggccaaaatcaaaaaatttgtttctgaaacgcgggcggaattcaccctgggcggactgatgtttggaacacatcaccaccacttgggacccccaaaaagaatacatgggaccatgtgccatggttataattttgcgaaatcaaggtcctggagaggccttaactccatttg

SEQ ID NO: 41245 - DNA, 385 bp, Zea mays
  Clone ID: MRT4577_137619C.1
ggggagcctctagagcgaccgcccttccccaaccccacctttttttttttttacacccccccccaaccccaggaacggggttaattttttttcctttaaaaacccaaccccttcccccaaaatacaattcttccttagcatatcaaaaccccaaacttgttttttgcaaacccacaagaaaaatggccaaatttacaacaaaaaccctatgcccctccaaaaaaaaaaaaaatccccttttgtcaaaaatacaattttcaacccatacataacaccttttatacgccaaaaacatctacctgaccccaggttcaaaccccaaaatcctaacccggcccggggggcggcccacctttccccaaaaataaccctaataacaacttac

SEQ ID NO: 41246 - DNA, 406 bp, Zea mays
  unsure (1)..(406): unsure at all n locations
  Clone ID: MRT4577_13761C.1
nnccacncntccntatcaatagccatggtttaccctcttgggcaaacctatanagtacggcaatcncttacaggggcacgggacaacaaccctttncccaattacaacaacaactcttggcacatctaaccatacataacatcctaagccaacaacaacaacattttttgccatcactgaaccaactatccacctttaaccctttctcctactttcaacaataactactttcattcaacccactttctctagcaaacatagctgcttaccagcaacaactacaattgcaacaccttcttccatctctcaatcaactatccattaagaacctcttcacatacctactacaacaacaactcctttcatctaacccactctccttaaacaatgcggctacataccttca

SEQ ID NO: 41247 - DNA, 421 bp, Zea mays
  unsure (1)..(421): unsure at all n locations
  Clone ID: MRT4577_137620C.1
ggggaaaaggccccaatttttggcaaaaaggtttataatggaactaatttacaaaaaatccttgggggggggacaactccttgggggggaaatggggtcctttctttttacaagtaaacaacttttttttcccttttcaggggggtccaacacagggggggatttttgacagttccaagggaacgatttccccttacccaagggggggctccctttaaaaatgttttttaaaaaaaaaggggggtcactttttaccctttacacatgttttttggggcggggggtgctttcccaaaagaaaaaaggaaaaccctttttggattgagggttggggcaanttaaatttgcccatccaatttggtttcgggggttggggaacacaaccaaattggcgggcaaagaaaaattttctttttttatt

SEQ ID NO: 41248 - DNA, 1969 bp, Zea mays
  Clone ID: MRT4577_137621C.1
tccttcaacagccgctctcggagcttctcccgcgcccgcgtcgccatcgagggatcttaatctcacagccatccctcggtcatttcgtttgaactcggttctgaaattctgactgacgaacgcacgcaacgacctaccgtgatggacgccgccgccgcgggagccgttgtttctcttaacgggaaggtgggggccgaggagaggaaggcgcagaagagctactgggaggagcattccaagaacctcaccgtcgaggccatgatgctggactcccgcgccgctgatctcgacaaggaggagcgccctgaggtcctgtctttgcttccttcatatgaaggaaaatctgtactagagcttggtgctggaataggccgtttcactggagaactcgctaaaacagctgggaatgttcttgctctggattttattgaaagtgcaattaaaaagaatgaaagcattaatggtcactacaagaatgcatcctttatgtgtgctgatgtgacatcccaggacctagtgcttcaagctaactccatcgatctgatattttcaaattggttattgatgtatctttcagatgaagaggttgaacagctagttcagagaatggtaaaatggttgaaggttggtggctatatcttctttagggaatcttgcttccatcaatctggagattcaaaaaggaaagttaatccgacacactatagggaaccaagtttttatactaaggttttcaaagaatgccatacctttgatcaagatgggaattctttcgaactttctctggttacttgcaagtgtattggtgcttatgttaaaaacaagaaaaaccaaaaccagatatgttggctatggcaaaaggtccattctacagaagataaaggatttcaaagatttttggacaatgtgcagtacaaagccagtgggaatattacgttacgagcgcatttttggagaaggttatgtgagcactggtggagttgagactacaaaagaatttgtggacaagctggatctcaaacctggacataaggtgcttgatgttggatgtggaattgggggaggtgacttttatatggccgaaaaatatgatgctcatgttgttggtattgatctttccataaacatggtatcatttgcacttgagcgtgccattgggcgcagttgctcagtggagtttgaagttgctgattgcactacgaagacatacccagacaacacatttgatgtcatatacagccgtgatactatccttcacatacatgacaaaccctctttgttcaaaagttttttcaagtggctgaagcctgggggcaaggtccttatcagtgactactgcaggagtcctgggaaaccatcagaggaatttgcagcgtacattaagcagagaggttatgacctacatgctgtggaggcttatggacagatgttgaagagtgctggttttcgtgatgtcattgctgaggatcgaactgatcagttccttggtgttttagataaggagttagctgaatttgaaaagaacaaggacgatttcctgtctgacttcacccaggaggactacgatgatatcgtgaacggttggaaggcaaaactgcagaggagttctgctggtgaacagaggtgggggctgttcatcgccaccaaatgatgatgcagatgtgagatgtgcgtggacgtgaaaataaagcatccttttactataattgatgtcgcattagttattctgaacccaggtagcctgggtcagtacctactaccctgtttatcataggacgtggagagaactcgtccagttttacattcccgtcactgctttgccggagtgctgtggcaatccataaaatctaataaagtaacaataagctgtctgcaactgcaaaaaaaaaaaaaaaaaaaaaaaaaaaaaagaaaaagaaaaaaaataaaaaaatatttattttaatgtttatttaaatatattttttaa

SEQ ID NO: 41249 - DNA, 149 bp, Zea mays
  Clone ID: MRT4577_137622C.1
gttttacagacagacagcagcacctgctcctccgtctggactgactgactagtgactcagctccacccacatcacccttagtcgtcttctccctctctgctagctgacctccaatccacgataaggcaagataagctagctaggaaggc

SEQ ID NO: 41250 - DNA, 738 bp, Zea mays
  Clone ID: MRT4577_137623C.1
atgctgggcacgctgccgccgtcgtacctccggtgggtcgcggccgagctcgactacggggacaccgcgccctgggcaggcctcgcgcgcgccgtcctcgacgaccccgtgtacgtcgaccgcgtcgagtgggagcacgcgcaccgcttcctccgcggcgacgccgacggctacgactacgcctacgacgccgacggcgacgggccgctccaggagatggccgagcgcttcgggtgggacctctccgacgaggaagggtggggccgcctcgacctccgcctcctcggcacatcctacggcggccgcattccaaggaagggcgcccggacgaagcaaagcaacagcaatagcaacagctcccccggcggcgccaagaagggcggctccctgttcggcgccgccgccggggctgacccgggcggcgccgtggggaagcgcgacaagaggagggagcgggtgcggacgaggagggaggagcaggtgaggacggccaagatggacatgctcggggtgcatgctggcgtggcggacggcggcgtcctgggatcgtcgtcggccaggaagcaggctcagatcaggatggccagcaaggagattctggggctgggccagagtagccgcgccggcgagacgctcgacgagaagaggacgccggggaaaggcggaaagggcgccaatcctttccccggccgtcaagcattcctcgacaaggtcaggaagctcaaaggtgatgactga

SEQ ID NO: 41251 - DNA, 384 bp, Zea mays
  Clone ID: MRT4577_137624C.1
ccagccaaatcgatccggagccctccagcatgcacggacgagcgtgatcacaaagcgaccatgagccctaaatcttgcgctggtgctcgcgctcagcggggccaactggtagggagactcgctctcggcgctgagccggatctttagagaccctcgctgagtcctgcagaccatggaccccacgctcatgaaaccctgcacctgtctccacgtaacctgtgaccccgacaaccgcttcagccgcttaaatggttaggaatttgaacttatctgaccatttgggacctgaccttggtaacctgcaccatctaaagaatctccaactttataagaaaaacattcaacgaacactcccttctgagcttagcaattcgaagaatctaa

SEQ ID NO: 41252 - DNA, 787 bp, Zea mays
  unsure (1)..(787): unsure at all n locations
  Clone ID: MRT4577_137625C.1
aaaggcataataggctaaaatcaattntattgggcctctctttttaagccgaggcccaatagctatcttcggcttgcttcttccccatgtgccttctctctgtcaattgtcaagctgctgccacttcttgccttcttggcttcttctcgtatgcatgtgctcgtccaggtccaggcatccaggctcagcatctagggaccagccccagccctggcggccggcgtagcggcacacagtgcccggcgcctccgtccacttcccgacccggcgcgacgttggccccggcgcctcgcccatccgctttcgtcttccggtgcagcaaaggcgagtagcgcacccagctcgatgacccggcctgtcggtcgccgctcccaacttcaaattcgttgcaaggggagtggtgtaaatcaactgttgccgccttctttcgttatgcaccattgtcgtcaatggttcaaacgaaatcagatcttccatttggcctgatgtggcggagaaccttccatccaccattatatgcaggatgcgacacgatgggtcttggtgtgcagaccactggttcccccggatacgctattgttaagggctgaacatcaaatggtgcatcatttgcattttgaggtgctccttttcccttggcagttgtggtactcatgttcttcgcaatttcacctcttgattgccccaaaatcgagagctagctgctgaatcaccgatatgagacacctcttttcttggtaagctaaagcagcacttctcttgcccagcaccttcttcctaatcccgg

SEQ ID NO: 41253 - DNA, 285 bp, Zea mays
  Clone ID: MRT4577_137626C.1
gagaaagttcttaacaatttctgcagaaaggcgtttcaggattataaaaagaatgctttcttagaggctgacaagcagtgctcaaatgcgaacacaacatggagaagaagatccgagcggcatgcactgctcctggtgtcaaagtttctgcttgattcaggtcctggaaactgcacttgctgaatatgaaacatcttgtactggcccagccaaatggagaatgcttgctgcctttttaagacagtgtttggaaggacctatattggacctctgcttgaagttaat

SEQ ID NO: 41254 - DNA, 402 bp, Zea mays
  Clone ID: MRT4577_137627C.1
cagcaacttatggtccatgaggtgacaagtagaagttcagcttctaatgcagaattggagtactcctcagaggtgcatttgtttcccaatgcagtttttttacttctattctttttcatagttagatcatgagcctttcatcaactagggggttggggcatagtgagaaaacgttagcaaaagcatctcttataaaaggtggctgtagggagtgcaacatcttgtgatttttaactgaatactggctgcatacctgaaaccctttccccacggaaaattgaataaataaactggagcctatctgcatgtatattatttgggatgttttataatgtttgcaggtaaaattgtgtacctaaaaaaatgcaaagtgttttatggctttatctcgcgttatttcat

SEQ ID NO: 41255 - DNA, 2220 bp, Zea mays
  Clone ID: MRT4577_137628C.1
cattgggtacctcgaggccggccgggcagtcaagccgccgccacttcttgccttcttggcttctcgtctagggaccagccccagccctggcggccggcgtggcggcacacagtgcccggcgcctccgtccagttcccggcccggcgcgacgttggccccggcgcctcgctcatccgctttcgtcttccggtgcagcacaggcgagtagcgcttgcgacgacccggcccgtcggtcgccactcccttccatcaaggcaagcagtcaggaagacatctgaccgggccagacgatacagcccatatacgtacgtcgagtcctcaaagttcgattctacgaccatcgcacccatcttggcccaaagtacttccgcgccgcgctacgaacgaggccatccgccgccacacgccgtaggccatgccgctgaggtcggaggccggcactgctggggagggcgatgaggagcagcggctgcgggctgctctgcgtcacctgcaggcggaggcgggggtgctggagcgcctggtgtacaagcaccggaaccagcaccgtggcgccgcctatttccaatacctcctcaaggtgaggagggacctcaagcttctgctcggcgccggcctcgcggaggtcctcaacgccgtgttcccagttctcgcatgccgcaagccggccaacacgatcctcgtccccaacaagcagactaagaagaaacctggtgcaaaccacagccatcaccagaggcttttgggtgtagcccgcttgttatcccagatgtctgaacctgttatgaaggcagcaattcagataacatttttacttgctagatcattcttcgttgatctttgcacggctgtgctttctttgcttgcacgagtaagggtcctgatccaacagatgttacttgatgttgtgtctatatacaataaggtcactgatcttactgaaaggaagcaggctgttaagattagcatcagtggagtgcaggctttcagagagtactacccctctatgaatgatgcatgtacagttctggagtgtgtatggataaaagataaattcgttttgcatgaaaaggttaaagatatctctcaggagacccaagttgagaatcagaagtgctgcggtcctgaatctacagtccagtatgaaacgcttgcactgattagtgaagatatgaaaatcctagaagaaacgaacttgccagacagacagacagatactgctctagcggagcaaccggataaaatgattcattgcaatgatgctggagattctcagaaggggaggcaactagaaaatgaaagcagtgctcgttcagttcctgacacccttagtactcggaagcacctgaagcccgagtctaggaagagagtagcatttgtagcagttggaaattcgaaagttacgggtgcagcctcagaaataaaatcatcagaggtgaacaagaagcaaaggctagacatgatttctccttccaacatacaatctggactgtacaacaaattgctggattgtgagtttgcagaaaaatccttactttagtatgttcagaatttaatacttcaatactttttcaactggaaaagcaatagataggaaagtgcgcttgtgcgaaagtatctcaaggtacggcaaatgtcagtgttctgaagctgaggccctttatcatttctgtttcaaatttctaaggatgatctgcaacattgttttgtagtgtttgtattagggagatgcccatcttcacatcaatgttcagaagttatgtgcgctatgagatttaaattatgagctgccagattgttttgtagagtttgtatttggtcattgtcgtgtcaatgttcagaagcatgctcttatacaactgagttttgtttgcatcagcagatttctgccttgcagattttattattcgaaatcagatcttccatttggcctgatgtggcggagaaccttccatccaccattatatgcaggatgcgacacgatgggtcttggtgtgcagaccactggttcccccggatacgctattgttaagggctgaacatcgagtggtgcatcatttgcattttgaggtgctccttttcccttggcagttgtggtactcatgttcttcgcaatttcacctcttgattgccccaaaatcgagagctagctgttgaatcacccacctgagacacctcttttcttggtaagccaaagcagcacttctcttgtaaaaaaga

SEQ ID NO: 41256 - DNA, 425 bp, Zea mays
  Clone ID: MRT4577_137629C.1
tctctcctctatcatgtactactcggctactccctccgatgacatcgttgcctccctgcaaatcccatcgttctgctcgccgccggcctgaccagcctcacctcctccctctgcctctctctctccctcgtcctgtcgttgcagcgcgcatctctgctggctctttcgatcgccgcgacgtccctccgtcggttcccacacaaaccttttcgactgtgcgccgcctccatggtgccgctgcaagggccgtctcctccgtgaccacgcgtcgcccactctgtctcctctgtggccgccagattcgcccctacccatcgtagatctttgagaacaacgggtttgtcatggttgcgactatggggaagagcttcttcgcgataggccttggtcgcgcaggcggcgggcgcagcgtcggacttgacgac

SEQ ID NO: 41257 - DNA, 311 bp, Zea mays
  Clone ID: MRT4577_13762C.1
atccgatccggatcttgcaacccaggggcagcgatcgcctactatatgagcgcgctcaccctcggcgaggacgatctcaatgggaagaaggtgttcgtgctcgccgacgtgaacgtgccgctcgacgatgcccagaagatcaccgacgacaccctcatccgcgccttcgtccccaccatcaagctcctgctcgagaagggcgccaaggtcatcctcgtcagacacctgggtcctcgaaaaggtgtaaccccaaagtacagattgacgcctcttgttccacgcttgtctgagctccttggagtttcagtcgt

SEQ ID NO: 41258 - DNA, 491 bp, Zea mays
  Clone ID: MRT4577_137630C.1
gccgagctcagcttacctgcactccagctgccatcgcaggcgttaccagagcgcgagagctagctagagggccgggacaatgcccttcactaggatcgccctggggagccaccaggaggcggaccacccgagcgccctcaaggcggtgatcgctgagatgatctccaccctcatcatggggttaggcgtccagggctccagcatgggcttcagcaagctgaccgcgggtggccccgcgaccccgacggccctgatcgcggatgcggtggcgcacgcgttcctgctgttcttggcggcgtctgttggcgcgaacatctccagacggcacgtgaaccctgccgtgaccttcggggccttggtgggcggtagcatcaccctgctctggacgcttctgtactgagcggcgcatctgctgggattcaccgtggcgtgctttctgctcctgttctctacgggcgggcaggacactgacacctttcggcatgacggcg

SEQ ID NO: 41259 - DNA, 204 bp, Zea mays
  Clone ID: MRT4577_137631C.1
agaggtacagaaaaaagctccttgatttgctttgttcaagccgagcgactacccgacgctaaccggaagagagggaggcccttcgctgtaaatagccgtctgtgaggagatcgccttgtgtgtgcagacgcggtaacaagcgctgcagaggcaggagggattggggatggctggtgcccaccactgtgccggatgacgctgaac

SEQ ID NO: 41260 - DNA, 173 bp, Zea mays
  Clone ID: MRT4577_137632C.1
acgcccacgcgtcctcatgagatatggctaggccttgtgctcgctccaggagcatctgcctcgatgacgagctgctgctgagcggcgacgcgccctgtatcaggctggatgtgcgcaccaccaccacatgcacgacgacaggagcatacgcacggaccgagatcattaccact

SEQ ID NO: 41261 - DNA, 204 bp, Zea mays
  Clone ID: MRT4577_137633C.1
taagaacgctaggagactcgtcgccagctcggggcgcgccctcgaagcaaccccccgcgaatgcccaacgagtggaggcgccgtgccgcaagaagttcggataaaggacgaacctctgttgagaagaagtcgaagcagttctgcatcggcggcgcgttgccgcccaagaaggacctgcaccggttcgtcaagtggcccaagtcg

SEQ ID NO: 41262 - DNA, 137 bp, Zea mays
  Clone ID: MRT4577_137634C.1
cccagcgtccggtccatgacgtgttattctttttctaattaagttgtttatcattataatgtgtttatgccaaataattggtcaatgtagtggctgaaaccctacttctgctatttgtccacagtatcttacataaa

SEQ ID NO: 41263 - DNA, 114 bp, Zea mays
  Clone ID: MRT4577_137635C.1
tgtacgcctgcagtaccgtgccgattccctgggagcgcacgcgtcgactgtgtctaatccgagggggcctctaaggagtccaacgttactacctcgggcgacggataggtgggg

SEQ ID NO: 41264 - DNA, 375 bp, Zea mays
  Clone ID: MRT4577_137636C.1
aaaaaaatatatataaattaataaaaatataaaaaaaaaaaaaaaaaaaaaaaaaaaaaaaaaaggggaggggaaaaaaaaaaaagggggggccgttttaaaatatccaattttccatcctcttacttgcaacctcttactttttctttagagttcccaaattccaattcactgccccttattatacaacgttgtatctggtaaaacccttgcttttcccaacttaatttccttataacacatccccctttcaccatctggctaaataaaaaaaaggccctaacctatctctcttcccaacaaattctcatccttaattggtaaattgaacccccccttttagggcccatttaatcccccctctgttttattttt

SEQ ID NO: 41265 - DNA, 212 bp, Zea mays
  Clone ID: MRT4577_137637C.1
aagaagaatagcagccgaccctattgccgccgctggtaatgcccgcgcatggggttctctggctttggtcggctgcttcggttgcatcgtctggagccttgtgatttcacgccggtgcgaactcattgccgcgcctggagagagatgcgattgagggagactgcggatgcttttgtgcgactgaagttgtgcttgcacagtggcgacatgcg

SEQ ID NO: 41266 - DNA, 1166 bp, Zea mays
  Clone ID: MRT4577_137638C.1
aaggacgcgtgggcggacgcgtgggctgttaaccgatggatttggtcgtcgaaagcgtcgttcatgggcgcttccccgtcaggccatcaaggtttcctcttctgcccggctcgttgccctccactaccgtggcactgagtgctgccttttccggatgtccatgcccacccattgttcgtcggaatgccccagcggtggtgccatttgccaagaagaagaggaatgaatatatcgaagacccgccagatgaggaagtcgcagatgatttcaccgacgagttggaggaggacttcgacgacgccaaagaagacgaaggcgatgtaatggatgatgacgaagagtatgaggacgactatgactttgaagatgattttgagagtgatgatgaacaggatctttatgctggagatggaggtgctggtggcggtatatcccttgctggtgcatggtgggacaaggaagcgttagctttggcagaacaggtctcagcatcattcaacgacgacttgaaaatatatgctttcaagacagctgcaaatttgactattagagtacgcattgagaagatgtccaccaggtatggttctccaacgatagatgacattgaagcatacacaattgcatatcgtgcaaagttggacgaagcagagtcagcaggaaagataccgaaaaacatatcgttggaggtgtcatcccctggtgtggagagagttatccgtatccctgaagagctcgaacgattcaaagaaagggcaatgtatgtcagatacactacagcaagcgatgaggcaaccacacctcaggaaggtgacggcgtgctaacgctaatttcctatgacatggacctgcgagagtgcacctggggcatagctgatgtgaagataaaccggcagcagtctggcaagggcaggcccctgagcaagaagcagagggaatggaggctgcagacaccgttcgagtcgctgaagttggtcaggttgtactctgaatgttgagatgccagtttttgagtaaattttgagtttccatttgttgcactccttcggcagtttatccagtctcgctgaactctgatatgccactggatgcgcagctcatactaggtagaatgatgttgtactaatgtactatctgtcacaatcaattagttttttttcattgctaac

SEQ ID NO: 41267 - DNA, 413 bp, Zea mays
  unsure (1)..(413): unsure at all n locations
  Clone ID: MRT4577_137639C.1
gagccatcgacgctacaccaccggcgatcaccttccggatctagcggcctaggtgggcgctcacagctccaacgccgcagaggttcgccaacgcatcgaccagatccaactctggcaagaaggtagaaaattctacttttgttttcgcacaaacactccaacaaaaaatattgtacctttgtattcgtacaatccctgtcacagtatcatatctacattttttgggtctacctcaatgacaacaaccctctcaatacctttgaaggtgtgatgtcaatacctagaaagctgactgcatttgtttaaaacattggtttcgtagatgtggttatgattttggcacaaacagaagcgtgcccgagaacaagctanggccctttgcgaatcagatgctaattactgcaattggtggt

SEQ ID NO: 41268 - DNA, 810 bp, Zea mays
  Clone ID: MRT4577_13763C.1
cattgggtacctcgcggccggccgggaaccggccggggtcgtcattcatttcctcactcagcgaggcgaggcaagctggccgtcaagctcaggccgtcaggcgctacaagcctacaactacaagcctacccctccgccgcctagagagagaggccagcgatggcgaagacgttgccgccggcgtttgtataccggatcagcacggccgacgagtgggcggagtttcagcgcacgggcgccacccttggaggcttcctcgacagctccagcggctgcatccatctcagcgacctaaaccaggtgaagatgactttaaaaaactttttcctgggaaggaatgatctgtacctactgcaaattgatactttcaagcttgcagatgggttaatttatgagttaagtgatggtgataagtatttccctcatttctatggccctggtcggagctttgcacctcttcaactagatactgttgtgaaggcagacaaaataaagtttgcagacaatgaatttacctgtggtctacttgatggaagtgatctcccaagctgatctgtagagtctcaccttcatcttagcaatgctcatttgagttctctgccaaagttatgagataaatgatgacattcgcgagctgtccgggatgacatcgaagagaaattcgggtctgtgatgtacggacactgacctagtagtgtattatataagataggtcagtgcccatgcattgcacctagttgtgaatgaactggaactgagtgaaaaaaaaaaaaaaaaaggcccctccaaaaaaaaaaaaaaaaagcggcc

SEQ ID NO: 41269 - DNA, 378 bp, Zea mays
  Clone ID: MRT4577_137640C.1
cgtaagctcggaattcggctcgagacaagggataccaaatggtgcggcacccaatgggggatgacaccagaggggggttttaacgaagcacaggggtatgtcaagacgggctcgaccgctgcatactacctactgccgataggccagatgatgccacaaccgcagaaccagtcctggagcctgactgaagactcagccaaaatggggccatgatgcccttgaccattacgtaaaccgatccatacacaggctcttactgctatgagccggaggtcaagctgctctcctatgccttctgctcgacgactcaaacgaacctcaacaccagacacagaggccactcacatgagtagaggatgtgaaacaccctacatgtca

SEQ ID NO: 41270 - DNA, 269 bp, Zea mays
  Clone ID: MRT4577_137641C.1
ggcaaaacatggagttccaagttccaacatattcaaaaaagacaaactaacatcgcaccaaacgatgcatcgagggattttatttacacgcgcaaacggacagaatttgggagcgcttaatgacgaatgacggggaaaaatctagtgatttacaaaatgtttatgaacacctgacataaataaaactgaatgtctcaaatcgttcaggcgctgccacccgttggtgcatcaaataacaaaacaccctggaccaggaactattttaccct

SEQ ID NO: 41271 - DNA, 911 bp, Zea mays
  Clone ID: MRT4577_137642C.1
cattgggtacctcgaggccggccgagatgtgcttatctttggattgggtacttctcttctctccaccatagctgaagcctcggattgcaggttgcagccatgccaatgacaatcgagcgtgatctccacatggccacagggaacggagaaactagctacacgaaaaactctaggattcaggagaaagttatgtttcagatcaagccagtccttgaggaggccactagagcagcatactcagctctcctccctcgaactatggtcgtggccgacttaggctgctcatcggggcctaacacactgcgcttcgtctccgaggtgattggcatcatagctcgccattgcaaagaacacgaccgacgacatgactacccacaacttcagttcttcctgaatgacctgccgggaaacgacttcaacaatctcttcctgctcatccagcagttcaataagtcgatggcaagaaaccacaagggtgaggcagctgaggcactgcctccgtgctatatctctggtttgtcaggctccttctacactaggatctttcctagcgaaagcgttcaccttttccactctttgttctccgttcactggcactctcaggcatcagaacaactgaaggacaccaaaaataaatgcctagatatctacatcacaaagaatatgccaccgtcgatggtgaagttgtttcaacagcagtttgagaaggacttctccctcttcctcaagctacgctacgaggaactcgtgtctggtggccaaatgggtctaacatttattggaaggaagcatgaggatgtgttcactagagagcccaaccatctttccggattgcttgcgcagtcactgaaatcccttagttgatgaggtcttgtggagaaagaaaacttgagtcattctatcttccgtct

SEQ ID NO: 41272 - DNA, 130 bp, Zea mays
  Clone ID: MRT4577_137643C.1
ccgtcgacctcgagaacactaacaggtatgccataggcgggattcttgtttgccactgaagcagactcaaccttttgattctgcatgtagggtatgcgccaaccgaagggcttttgtccgtaaaacagcc

SEQ ID NO: 41273 - DNA, 662 bp, Zea mays
  unsure (1)..(662): unsure at all n locations
  Clone ID: MRT4577_137644C.1
nannnaanttcnaaaaaaaaaaaaaaaaaaaaaaaaaaaaaaaaaaaaaaaaaaaaaaaaaaaaaaaaaaaaaaaaaaaaaaaaaaaaattccgtccaatcaaccgggttggtctggtgcctctccggggccattgacgagcaaaaaaatcctcttcctccgaaacctggtccgtcgggggccggggggcccgggcccacccgttaaggccagggggccccgactcgagctcaccgggtcaaactcgaaccgctgttgttcctcgggggcagggtcgtcaaggatgccggagcactcaaaaaacgcggggggggacctgatgggcaacatcatggaaaccattggggaaaacctcccgaggcaaaaatccggggggttcaacaacggggacggttcctccatttccgaaaaggccaaaaaattgttcgggggcggcgaaaacaggaaaaaatcggtccaccacggggtgggggggggaaaatcccccgacgtgctgttgggggggaacaaaaaaatttcgtccagcgggctgggcggggcgaccctggggggggtcttcttcgagggggtggactaccacttcctcaccatcctttggtttgggctcgggctcggaatggccgtccagttcgcctggtccattttttcgtccagggtgcccc

SEQ ID NO: 41274 - DNA, 328 bp, Zea mays
  Clone ID: MRT4577_137645C.1
caccaccactgggtcttcagaccttatttttatctactccagagcggagaagaacccgatcgacaccatacgggtgttgctcgttgccctcgctctcctggctttcgctgagagcgccacctccacgcatacaagcggcggttgcggctgtcagccaccggcgccgtttcatctaccgccgccggagcatctgccacctccggggggggggccaccttcggtgcatctcccaccgccggtccacctgccgacgccggaacacttgccaccgtcggtccatgtgccgccgacggttcacctgacgtcgggcagatgccactaccctact

SEQ ID NO: 41275 - DNA, 238 bp, Zea mays
  Clone ID: MRT4577_137646C.1
acggtcggttttgccccaaaaaataatgcgaccgaaaagaagggcaacttttacggaaatgcagctatataccccccccagaaaaaataacggagataccaaaaaaacgcacactttttcccgctaaaaaaggcgggggatatgcatgcaggctttaagccgggaaagcacttcgaacgtacgatgctaaaaagcatcggggtcaaaaggaggacctgcggttcaaaaggggtttcct

SEQ ID NO: 41276 - DNA, 394 bp, Zea mays
  Clone ID: MRT4577_137647C.1
ctttcaatatgagcagcaaaattcaggtttcggccgtccgcgagagcgttcgcaccgtcaagctccagtccgaggagaagaagcgtaactttgttgagaccgttgagctccagattggactcaagaactacgatccccagcgtgacaagcgtttctctggctcggtccgtctccccaacatcccccgccccaagatgtcggtctgcattctcggtgatgcccttcactgcgaccaggccaaggagatcggtatggagtaccagtccgttgatgacgtgaagaagctcaacaatgacaaggagcagattagaaagctccgcaagaagtacgatgccttcctccgctccgaaggcctggatcaagccaattcccccgtctcttggggacctggtct

SEQ ID NO: 41277 - DNA, 452 bp, Zea mays
  Clone ID: MRT4577_137648C.1
attcaagggtcgaccgacgcgtccacccacgcgtccggcttggcaagattggtcgaccggtcgagtcatggcttccatctctggcatgctccctaccgagatcacagccctccgtgatggtagactcatccatcttcctgccaaggacctggtgaacggagatatcgtccaagtgtcattaggtaacaagcttcccgccgatcttcgctttgtcgacgtgtcctcggacctgagactggaccgctctgtgttgaccggagagtcagagcctatccagggaaccatcgagcagacggacagcaacttcctcgagagcaagaacgtcggacttcagggtacactttgtgtcggcgggtccggtacaggtgttgtcattcaaacgggcgatctcaccgtttttggtcgaatcgctaagctctcatcctccggtgctccatcgatgacactctgca

SEQ ID NO: 41278 - DNA, 294 bp, Zea mays
  Clone ID: MRT4577_137649C.1
cttccttgctttgcccacgttgctggcctcaggctcagacacctagctctactccaagcaaatggctgctcttccaatgctgtggaccgggctggtcctcttgggtctcttgggatttccacagaccccagcccagggccatgacacagtgcagcccaactttcaacaagacaagttcctggggcgctggtacagcgcgggcctcgcctccaattcaagctggttccgggagaagaaagagctactgtttatgtgccagacagtggtagctccctccacagaaggcggcctcaa

SEQ ID NO: 41279 - DNA, 186 bp, Zea mays
  Clone ID: MRT4577_13764C.1
atcctattgggggttttggtttttacatttcgtgcgtcggccacatgccgtgggactcttaaaaattagactaattagctattaggttacttgacacaagtctagatgtatgcacggaactctgggagtgaacagtgagcccagggggtaacctaggactacgagatgtcaactttggacaagcct

SEQ ID NO: 41280 - DNA, 152 bp, Zea mays
  Clone ID: MRT4577_137650C.1
ccgtgctctttgagctagccctcgcgctcgaggcgggcaacgccccacacgtagcggaggcaatgaatactagagcggcaggaagctgccaggcagctgcggcgaataagatccaggatgacttgtgatcgacgctgtacgaggacactaac

SEQ ID NO: 41281 - DNA, 261 bp, Zea mays
  Clone ID: MRT4577_137651C.1
tctgttgagggtaatcttatatcattagacttgctcaacgacacaaacatgagaaggtaatatctgggaagaactctgcacttcgtcctgaagaaaactattattaggttccttcatcttggttgccacagtggagagcttatatcacaaccacggccaaaaaatactcgattaactaccagaacctcatagcctcgaagctgctgcacagtttactcatatctgaaaagcattccagattgctgcaaaagcctttggatc

SEQ ID NO: 41282 - DNA, 241 bp, Zea mays
  unsure (1)..(241): unsure at all n locations
  Clone ID: MRT4577_137652C.1
ccgccctttttttttttttttttttcaagacataaagggcanagtccccttttattanngantataaactgagggggtgtaattcgatgtgttttgtaccctatcaagcacagaaggcaagccacatgtatttacactaattgatttgcctactgatttactataaattatatatctgatcactataatttttatgttattttcataaaattatcatttttcttttaacttatcttctgtt

SEQ ID NO: 41283 - DNA, 260 bp, Zea mays
  Clone ID: MRT4577_137653C.1
ataacggataaactaaaaaatattgatatcgacatgttagtagacgataccgaatttgattccgataaatatgatgaaaaaatggctgctttatttaatgatgaatttatcaagaatatgaagatgatgaaaagcctcaatttgaatacgattctgaaattgacgatcaagaatttgaccaatttggagaccaaggtttaattgcggatggtcgagagtatgaaggagaagttttaagttcagacaatgattcaaatgag

SEQ ID NO: 41284 - DNA, 1671 bp, Zea mays
  unsure (1)..(1671): unsure at all n locations
  Clone ID: MRT4577_137654C.1
gatgtttccagctctccccacgcgtttgcttcttcaagcattgaccccttccgccccgtccgtcatcttccccacctctctctctccaccgcaggagcttgcgggcgtggcggcggccgtgaccggcgctggagatcttggacgcgtgcgacatcctggtctccgctctgtgcctctggtctccgaaggcgccgccatcctatttttttttaaaaaaaatcctaaggtgagatcgacctgctctttgctttgcttagcttgcttgcgcggaatctggccttgcttgctttcacagttccacttcgttgcgtgtttcggtttattgattgatagatttcaatcgaagcttgcagattaggtttcttttctagctagatcctgcagcatctacgaggccaggccacggtcgactggttctccttcgatctagtcttccttcctttccttcctttctttctgaatgcgcatggtagtaccaccataacacagctatccttttggtgagacatccagtttttttctgtctttggtaatacaggcagaggtcgtcttgagaagacggatagctatgactgatttgtttttgctgcacatgtttattaccgagtgtccattgctctgacgaactgaagaactgatctcctgtaccatctttacatgtacctttatttgaattggaaatcattcataccatattactatcaatccaactaacaggactaactacctttcccaaggatcgtacactaacttcttcatccgaagtaccttgaactagcatgcttgctggcatcactgtctgttacacgctgatgccgcactatttctagccttgattacccaacgccgagttcacctcaaatgcttccgttatagggaaaacatgattctatatgccatactcatttttcgctgtattttaaccattttaactctcatatttgtgactgctatagtcactgtctctctctggtgctgctgcgcatttctgaatttttcagatagtttcttcagtccgacaccgcttctagcttcccctcggcgatctgtgaagctatgaagccacctctcgagaggaacccgactaagaagcgccactcgtggtggtgggacagtcacattagccctaagaactcgaaatggctcgccgaaaatctcgaagaaatggacaagcaagtgaaggaaatgctccagctgatcgaggaggacggcgactccttcgctaagaaagcgcaaatgtattaccagaggcgtccgatgctcgtcacccacgtcgagaacttctaccgtatgtatcgtgctctagccgagcgctatgacaatgtaaccggcgagctgcgcaagaacatccctacaaggctgcagacaaccggatttttaaccagttcagagtacggttctgagctgcagaggtcgccctcaccgtctcctgagccgttacagaggtcgtggacaagggagcagagccctagggccgctggcttcgacttcttcctgagcaataggagcaatgactcgccacctgtctacaggaaggaacccgaggacgcggcatcgcagtcggagtctgacgcgaagtctgcagacggtgaggatgatggcatcgcctacacgctgcacccagagagtcttgagctagaggacgagctncatgcgacaaaccagaaacta

SEQ ID NO: 41285 - DNA, 446 bp, Zea mays
  Clone ID: MRT4577_137655C.1
attaaaaccaaaaccggcccgggggggcgggggagggggggaaacgggggaaaccgggggggggggcaaggggggccgaggggggggccaaggggggcgaaaaaaggggaaaaaggggcaccggggggaaagggggaaacccgcaaaaccccacccaagggacaaaccagagggaaaaaggggaaagccggggggggcaagggagggaacaaaaaaacatgaagaaaaaggggcggaccggcggctttcaaagggggaaaaccggcgagccaaggggggtaaggaaatggccaaaccgccggaagaggggggaggggcattgggggcttttgcggttcctcgcccacagacttgaagggcccggtgggggggggggggcgggcggtctcaggggacccaaaggcggcaagacgggaatcccggaatcaggggaaaaagagggaaaa

SEQ ID NO: 41286 - DNA, 1890 bp, Zea mays
  Clone ID: MRT4577_137656C.1
ctcgagcggcgcgctgatatccctgcaggcttcttttcgtttgccaactccatggccccaagctccaagaacggcgccggctcttcgggatgcatgtttccagctctcccccacgcatttgcttcctcgggccggccgggaagcattgaccccttccgccccgtccgtcatcttccccacctctctccgcactgcaggagcttgcgggcgtggcggcggccgtgaccggcgctggagatcttggacgcgcgcgacatcctggtctccgctctgtgcctctggtctccgaaggcgccgccaccctatttttttttaaaaaaaatcctaagatagtttcttcagtccgacaccgcttctagcttcccctcggcgatctgtgaagctatgaagccacctctcgagaggaacccgactaagaagcgccactcgtggtgggtgggacagtcacattagccctaagaactcgaaatggctcgccgaaaatctcgaagaaatggacaagcaagtgaaggaaatgctccagctgatcgaggaggacggcgactccttcgctaagaaagcgcaaatgtattaccagaggcgtccgatgctcgtcacccacgtcgagaacttctaccgtatgtatcgtgctctagccgagcgctatgacaatgtaaccggcgagctgcgcaagaacatccctacaaggctgcagacaaccggatttttaaccagttcagagtacggttctgagctgcagaggtcgccctcaccgtctcctgagccgttacagaggtcgtggacaagggagcagagccctagggccgctggcttcgacttcttcctgagcaataggagcaatgactcgccacctgtctacaggaaggaacccgaggacgcggcctcgcagtcggagtctgacgcgaagtctgcagacggtgaggatgatggcatcgcctacacgctgcaccagagagttcttgagctagaggacgagctcaatgcgacaaaccagaaactacaagatgcaaacgagaagcttgaggttctggaggagaagagcttgaggtgccattgcgattataaagagaatggaaacggtgctcagcgaactacagaagtttcaggcaaagagggggagctggaagccgaaatcgtcaatctccaggaggaagcggactcggcaagaaggcgattcgaagaggcattgtctgaacgagatggagaaatcagcaagctaaagcaagagcttgctggtgcttctgagaagctgcagcgagagaagtacgccaatggcgtgcaggtatctgagctgcagcgatcggttgaacacatcaggtccgaactagagagagtttctgaagagaaactactgtccgagaacaagatcaaggagctggaggcagcaaacgctgaagccgataagtacggccacgagctcacgcgagctgccgagaagatttccgaggagaagttcgcgctcgaagctgagatcctcacgatgcggcagaacattgaagatctgaaatccaggatcgagagcctcgctcgagagaagtccctgctcaaatcatggtttgaggacttggagcaagttgtggggcgaggaaggggcatcttcgccgattaaccgagtttctatccagaacatcatcggtagctagaatttagcaagttagcaacattttgttttgttttctggtacccataccatcttgcgaaattgagatacgtcagtgtacttcctttttgtttgctgaatcttaaacttagacgtgatggatggtggtgatgtactggtaatatatgaaatattatactgaaccgcgctcgacgtcaataataagattcctatagtgcatctaaaaaaaaaaaaaaaaaaaaaagaaaaaaaaaaaaaaaaaagcggcc

SEQ ID NO: 41287 - DNA, 363 bp, Zea mays
  Clone ID: MRT4577_137657C.1
agcgttcgggacgtctgaggcggtggtgtagggggaggcggagttggcgcatgtgtcatggtgggcggacacatcgggccgaagggtatgattctctctcacatgtgacgacaatctaataaaaaagaccatagacttccagcacaaaatattacacttaaaggtggcagacaacccttggtggagggacctccagatctacgagaagacctaggacaactactttaccatcatgatttcgccaatgctgtatatactgggtccttggacaggttgactaatacatgggcaatggacaagtggagacttcttacaaaagagagtgagtgagaccggtccacccgtatatctaactcgatcacc

SEQ ID NO: 41288 - DNA, 2124 bp, Zea mays
  Clone ID: MRT4577_137658C.1
ggctcatccggccagccaggcgcagacggccgttagccgggtgccgcagccggccgctgtagtttgccccccgcccgcgcacacgcccacccaccgatcctcccacccggccagccagcgcctagtccaacggtgcactcccattaaccgcggattgcttggctgccggccgcaacctcgccgcctcgctcctgccggcggctctcgcgggctgtgaggcagccagcgccgcgccgccgccacccagctcgcccccgccccactgcctataccgccagcagcggtcggaaacggccgcaaggccttcgatcacacgaggccgcagccggggactgactcccactcccactctagcccacccctcgctgaccggtccccctccgacgaccacgacgccatcccgcgcgcatgctcccccccgacaacccagacgccatctcgcacgcgtgcttcaacccaaccccacatatcttctctcccaggcctaacctttctccccgcgagctgcctctactgattttgcactggcatgccgtgacgcggaaagatgtggagatccatcttggactgatttcttccttactcggttattcgccctctgccggcgcaagatccattttagtttgcccccctcccccaaattggactacccaaggttgaagataccttggtagtcagagcatagaataagggtggactgttattaattttccataggatggaatccttgtggaagctgacctacttgctcgagccggcatcacttgctctcattgccacagctatctctgtggcctatgcatccgcatcgcgtgctctagattatggcaaagagatggagagaaacttggatttttcagaggcttccattacattggatcggtcacaggcactaatgattccccttgcaagctcatgcagtctgttgctgatgttctacttgttctcgtctgtctcacatcttgtgactgcttttactgctgtggcctctgcgatggcactgttcttttgcctgtctccgtatgtcacttatctcaagatgcagttcaatctaatggacccattcgtgtccaggtgttgttcaaagccttttacacggttgcaaggtttgctgatgctcttctgcatagccacagtcttagcctggttggtttctgggcattggttgctaaataacctactgggaatttccatatgtatagcgtttgtcagccatgtgaggcttcccaacataaaaatctgtgcgctgcttcttgcctgcttgtttgtgtatgatattttctgggtgttcttctcagaaaggttctttggagcaaatgtcatggtttctgttgccacccagaaggcatctaatcctgttcacacagtagcaaataagctcagcctgcccggattgcaattgattacaaagaagctggagcttccagtcaagcttgtatttccaaggaatttgttgggtgggattgttccaggaagcaatcctggtgactacatgatgcttggccttggagacatggccattccagggatgcttctagctctggtactcttttttgataatcggaagttcaaggatgtgaattttccaccagatgtgtctcccccaaaacggcggaattatgtgtggtatgctgtaacaggttatggtattggcttggtagctgcactagctgctgggatcttgtctcagtctcctcaaccagccttactgtacctggtgccatcgacactgggacctgtcatgtacttgtcatggttacggaatgagctatgggagctatgggaagggtctgggacgattctgaacgagaaagctcatttgttggaggtctgagatccaagtggacaataagaaggatctgaacccaccgtgattgaatctaattaaacaatacttgacctcctcataccgaaggagagtatttataagctagaatgttcagtcatgtaagccatcacctagtttcgctcgcaagaggaaacacttacaaatcatgtaactgtttgtaatagaaaagttcaatgcatttcagctttttaaaaaaaaaaaaaaaaaaaaaaaaaaaaaaaaaaaactgcgttgttaccactgcttaaggccccgcgcgcgcacactggcggcgt

SEQ ID NO: 41289 - DNA, 311 bp, Zea mays
  unsure (1)..(311): unsure at all n locations
  Clone ID: MRT4577_137659C.1
tttctagagctaatacgtgcaacaaaccccgacttccgggangggcgcattnnttagataacaggctgacgcgggctctgcccgccggtnccgntgnttcntgatnacttgacggntcgcncggccttcgtgccggngangcatcattcnaattnctgccctatnaactttcnntngtaggntnngggactaccntnntngtataggangtctncgagtggcaggtcanatcatcggcncgcccnacaccctatatgatggatgctattcantgcaatantgncttttccanaacnatnccaacaggccgc

SEQ ID NO: 41290 - DNA, 668 bp, Zea mays
  Clone ID: MRT4577_13765C.1
ttcatttcctcactcagcgaggctaggcaagctggccgtcaagctcaggccgtcaggcgatacaactacaagcctacagtgcctacccctccgccgcctagagagagagaggccagcgatgacgaagacgacgccgccggcgttcgtgtaccggatcagcacggccgacgagtgggcggagtttcagcgcacgggcgccacccttggaggcgacctcgacagctccaccggctgcatccatctcagcgacctaaaccaggtgaagatgactttaaaaaactttttccttggaaggaatgatctgtacctactgcaaattgatactttcaagatactgttgtgaaggcagacaaaatagagtttgcagacaatgattttacctgtggtctacttgatggaagttatctcccaagctgatctgtagagtctcaccttcatcttagcaatgctcatttgagttctctgccaaaggttagtgtttaatatgtctatatatgcagaagtcggtcatatatttgagtgacagattgtaccatccagaattttccacagttattcatatactttctggtggaagataaaatatgaaactgtatgtaattgacgcatcatgatggatacggatgttcattatgctatagcaagtagtacaatgtgtacttgctgtc

SEQ ID NO: 41291 - DNA, 155 bp, Zea mays
  Clone ID: MRT4577_137660C.1
gggaacaaagcatttttaacttgtaacaacaaatatgttaaaaagccaggaaactttgggtttacaaattcgggtttttagatggaaaaattttggttcacgagttaatcccaaccagcttagcaaccttcggtttaattacccggacccgtggg

SEQ ID NO: 41292 - DNA, 780 bp, Zea mays
  unsure (1)..(780): unsure at all n locations
  Clone ID: MRT4577_137661C.1
gggtacctcgaggccggccgggaatcttctctcccaggcctaaccttcctccccgcgagctgcctctactgattttgcactggcatgccgtgacgcggaaagatgtggagatccatcttggactgatttcttccttactcggttgaagataccttggtagtcagagcatagaataagggtggactgttattaattttccataggatggaatccttgtggaagctgacctacttgctcgagccggcatcacttgctctcattgccacagctatctctgtggcctatgcatccgcatcgcgtgctctagattatggcaaagagatggagagaaacttggatttttcagaggcttccattacattggatcggtcacaggcactaatgattccccttgcaagctcatgcagtctgttgctgatgttctacttgttctcgtctgtctcacatcttgtgactgcttttactgctgtggcctctgcgatggcactgttcttttgcctgtctccgtatgtcacttatctcaagatgcagttcaatctaatggacccattcgtgtccaggtgttgttcaaagtcttttacacggttgcaaggtttgctgatgctcttctgcatagccacagtcttagcctggttggtttctgggcattggttgctaaataacctactgggaatttccatatgtatagcgtttgtcagccatgtgaggcttcccaacataaaaatctgtgcgctgcttcttgcctgcttgnttgtgatgatatttttctgggtgtcttct

SEQ ID NO: 41293 - DNA, 834 bp, Zea mays
  unsure (1)..(834): unsure at all n locations
  Clone ID: MRT4577_137662C.1
ggaccctcgaggccggccgggccgggaaaaatccgccatcccccgttcccgttcttctccttccgtccgaccgtccctcgacactgccgaggccgaacctagcagccgcccacccgacgcccaatccgccggtgcaatcgcaatctccgagggttaatcgactaccggcggctacggcgccgccagtctcctggcttaggctgccaggggatgcgaggagccagcgcagcgcggccgccggccagccgcccccgccccactgcctataccgccagctacagtcggaaacggccgcaaggcagtcggaagagggaagccgcagccgggcactgactccgatccccactctagccaaccccacgcggaccggtccacctcggacgaccacgacgccatctcgcacgcgtgcttccacccaaccactcaaatcttctctcccaggcctaaccttcctccccgcgagctgcctctactgattttgcactggcatgccgtgacgcggaaagatgtggagatccatcttggactgatttcttccttactcggtgaggaactccaaaccatccagctaggttgaagataccttggtagtcagagcatagaataagggtggactgttattaattttccataggatggaatccttgtggaagctgacctacttgctcgagccggcatcacttgctctcattgccacagctatctctgtggcctatgcatccgcatcgcgtgctctagattatggcaaagagatggagaggaacttggatttttcagaggcttcanttacattggatcggtcacaggcactaatgattccccttgcaagctcat

SEQ ID NO: 41294 - DNA, 396 bp, Zea mays
  Clone ID: MRT4577_137663C.1
ggaatatggatgtaagtcctgtttctctctctctctaatataaagatgtgcagctctcctgcgcgtactagaaaaaaagctttaaataatcgtcaatgggtggctgacattcgtggggtactaacagtacaggtgctagaagaatatgtccaggtttgggaccaagtgaaaggaacaatcctacatcatgatttgactgatacatataagtggaagttatctcagactggcgattacagtagcaagtcagcctacgctgctttcttcaatggatccatcaagtttgcaccttggaagcggatatggaagagttgggctcccctccgttgcaaactcttcatttggttggtgttcaaaaatcgctgctggatagcggataggctagctaaaagagag

SEQ ID NO: 41295 - DNA, 2418 bp, Zea mays
  Clone ID: MRT4577_137664C.1
aattcggcacgaggctcctgtcagccccacccccacgacgtcccccggacccccgtttccttccgatccccatccgccatcccccgttcccgttcttctccttccgtccgaccagccctcgacactgccgaggccgaacctagcagccgcccacccgacgcccaatccgccggtgcaatcgcaatctccgagggttaatcgactaccggcggctacggcgccgccagtctcctggcttaggctgccaggggatgcgaggagccagcgcagcgcggccgccggccagccgcccccgccccactgcctataccgccagctacagtcggaaacggctgcaaggcagtcggaagagggaagccgcagccgggcactgactccgatccccactctagccaaccccacgcggaccggtccacctcggacgaccacgacgccatctcgcacgcgtgcttccacccaaccacacaaatcttctctcccaggcctaaccttcctccccgcgagctgcctctactgattttgcactggcatgccgtgacgcggaaagatgtggagatccatcttggactgatttcttccttactcggtgaggaactccaaaccatccagctaggttattcgccctctgccggcgcaagatccattttagtttgcccccctcccccaaattggactacccaaggttgaagataccttggtagtcagagcatagaataagggtggactgttattaattttccataggatggaatccttgtggaagctgacctacttgctcgagccggcatcacttgctctcattgccacagctatctctgtggcctatgcatccgcatcgcgtgctctagattatggcaaagagatggagagaaacttggatttttcagaggcttccattacattggatcggtcacaggcactaatgattccccttgcaagctcatgcagtctgttgctgatgttctacttgttctcgtctgtctcacatcttgtgactgcttttactgctgtggcctctgcgatggcactgttcttttgcctgtctccgtatgtcacttatctcaagatgcagttcaatctaatggacccattcgtgtccaggtgttgttcaaagtcttttacacggttgcaaggtttgctgatgctcttctgcatagccacagtcttagcctggttggtttctgggcattggttgctaaataacctactgggaatttccatatgtatagcgtttgtcagccatgtgaggcttcccaacataaaaatctgtgcgctgcttcttgcctgcttgtttgtgtatgatattttctgggtgttcttctcagaaaggttctttggagcaaatgtcatggtttctgttgccacccagaaggcatctaatcctgttcacacagtagcaaataagctcagcctgcccggattgcaattgattacaaagaagctggagcttccagtcaagcttgtatttccaaggaatttgttgggtgggattgttccaggaagcaatcctggtgactacatgatgcttggccttggagacatggccattccagggatgcttctagctctggtactcttttttgataatcggaagttcaaggatgtgaattttccaccagatgtgtctcccccaaaacggcggaattatgtgtggtatgctgtaacaggttatggtattggcttggtagctgcactagctgctgggatcttgtctcagtctcctcaaccagccttactgtacctggtgccatcgacactgggacctgtcatgtactccctccggtgtaccaaaaactgacgttttggacagcttctcacataccaaggaactaataaataccacactttttcattcctagtcaaatccctttaatagccggagtggtcatcttcactccttcccaggcaggaggcctaggttcgattcttgactcacgcaatactaaattttttaccattttgcatgcaaatgcatggcgtggagaaggccaacggacggctggtgaatttacttcttgctgcgtcaatcgagagttctcctcgctccacgtgaaacgtcaatttatcgtgcactttggactcaaagctagaacgtcgattattgatgcaccggagggagtacttgtcatggttacggaatgagctatgggagctatgggaagggtctgggacgattctgaacgagaaagctcatttgttggaggtctgagatccaagtggacaataagaaggatctgaacccaccgtgattgaatctaattaaacaatacttgacctcctcataccgaaggagagtatttataagctagaatgttcagtcatgtaagccatcacctagtttcgctcgcaagaggaaacacttacaaatcatgtaactgtttgtaatagaaaagttcaatgcatttcagctttttaacc

SEQ ID NO: 41296 - DNA, 491 bp, Zea mays
  Clone ID: MRT4577_137665C.1
ccctccctccctctgtttacatctcgaattattatcgatttagctatagcaggtctcgatcggcggccatgagcggtagccgcagcaagaagtcgtggccggaggtggaggggctgccgtccgaggtggccaagcagaaaattctggccgaccgcccggacgtccaggtggtcgttctgcccgacggctccttcgtcaccactgatttcaacgacaagcgcgtccgggtcttcgtcgacaacgccgacaacgtcgccaaagtccccaagatcggctagctagctagctagaccgaatcgttttaattagctaatttctttctttcataaataaaagtcctctctcgtacccggactgtgatgttttcctagttgtctcgtacgtgttgtttctgtcttaatggatgccatggctcccgcgcggcctccatcgtgaagagattgaaataatataaaactacattatatctggaaaaaaaaaaaaaaaaaaaa

SEQ ID NO: 41297 - DNA, 477 bp, Zea mays
  Clone ID: MRT4577_137666C.1
gctggacacaagcgcactacaaatccagaaccatattcgcccccccaactctaccgactcggtcccattctcatcgggataaagatccaatcttttccgccaagcgactcggatcggtcctgaactccggcgatgtcaacgccggcgaggaagcgcctcatgagggacttcaagcgcctgcagcaggaccccccagcggggatcagcggcgccccaatggataacaacatcatgctgtggaacgcagtcatattcgggcccgatgatacaccgtgggatggaggcacgttcaagctaacactgcagttcacagaggactatcctaacaagccgccgactgtccggtttgtttctcggatgttccatccaaacatctatgcagatgggagcatttgcttggatattttacagaatcaatggagtcctatatatgacgttgctgcaatactgacatcgattcagtctctcctctgcgac

SEQ ID NO: 41298 - DNA, 247 bp, Zea mays
  unsure (1)..(247): unsure at all n locations
  Clone ID: MRT4577_137667C.1
gcaaccatcacgaaaacatcagtccctggtaaacccanntgcatanccatacccagcagtcaggctnnaanccatnncgcgtcataatncaaccgctatacacgcatctggatcatgtaatcaaagccacgaatagtatcaggactaccaacaagcaaacaaccacagcatagtaacctgcaatcacagtaggcccccatagtcaaaaaacaagtatgtcaggccaactcatcatcacatcccaagc

SEQ ID NO: 41299 - DNA, 257 bp, Zea mays
  unsure (1)..(257): unsure at all n locations
  Clone ID: MRT4577_137668C.1
gttaagaagccaaaccaaccaggcacgcgagggggaaaaagaacaagacaggcgggagaccccggcggaaacggaaccaaaaggaggacacacagaagaggagcaggcacaagccccggaggacccagaggccgccaccaanagagaggcccccacgaaaacaacgaaccacaaagacccaaagaaagcgcccgaaagccccaaaaacaaacggcccagccggaagcaacaaacgaaccaccacacggaaaacgaaa

SEQ ID NO: 41300 - DNA, 683 bp, Zea mays
  Clone ID: MRT4577_137669C.1
gtttatcttaacattcctgcctacaaccgttttcgtgctatcttacccaaatcttactcgcgataaatccacaatgactcgatattagagcaaggacaaggatcacctcctcaaaatcgatgctcacattgaggaacaccaaaggtgaataacgagctagatgagaccaagagtgctccgatggcgatcttcttcttcatgtaggagttcagaaaggactacagaacagacacgccattgtgaagctagtatccctgagtgctgaggctgtcgatgacatcagcaaggcgatgctcgatgacgagaacgttccctacaagactaaggaagagaagctctttgctgatgacaccaagaagatcagacgcttatcaactgcaatcaaggtggagaccccaccatgtgtggtgattgcgacaaatacagataccacgcgaacgaccatgacgaccattgggacgagtgatgcatgaactacgaaactctggccaactgttgtgcaagtgacgcaaatgatctcaagattggtcctaatagaccatctctctctaacgactatctagatcgctcaggatcatggctcgcctatgtgcatcatcttgcatgcagaatgtcctgctgccaattgagtgaggcagagaatccttgtagatggccctcatgacattgatcgctgcgcttac

SEQ ID NO: 41301 - DNA, 774 bp, Zea mays
  unsure (1)..(774): unsure at all n locations
  Clone ID: MRT4577_13766C.1
cattgggtacctcgaggccggccggggtcgtcattcttttcctcactcagcgaggcgaggcaagctggccgtcaagctcaggccgtcaggcgctacaagcctacaactacaagcctacccctccgccgcctagagagagaggccagcgatggcgaagacgttgccgccggcgtttgtataccggatcagcacggccgacgagtgggcggagtttcagcgcacgggcgccacccttggaggcttcctcgacagctccagcggctgcatccatctcagcgacctaaaccaggtgaagatgactttaaaaaactttttcctgggaaggaatgatctgtacctactgcaaattgatactttcaagcttgcagatgggttaatttatgagttaagtgatagtgataagtatttccctcatttctatggccctggtcggagctttgcacctcttcaactagatactgttgtgaaggcagacaaaataaagtttgcagacaatgaatttacctgtggtctacttgatggaagtgatctcccaagctgatctgtagagtctcaccttcatcttagcaatgctcatttgagttctctgccaaaggttagtgtttaatatgtctactaggtcagtgtccgtgcgttgcaacggngacctataatatctcgataacttatatatacaaatggtgtatgcagttatgagataaatgatgacattcgcgagctgtccgggatgacatcgaagagaaatttcgggtctgtgatgtacggacactgact

SEQ ID NO: 41302 - DNA, 794 bp, Zea mays
  Clone ID: MRT4577_137670C.1
cccccctcccaatccccgcccataaccctcgcatccgccctccatggcgccgccaccggagctgatctccgacgccgttgccgaggtcttcctccgcctgccgccggacgaccccgcgggcctcctccgcgcctccgccgtctgcaagtcgtggctccgcgccctcaccgagcccgccttcgtccgccgctaccgcgacttccacggcacgcccctcgtgctcggcttcctccacaacccggtaaaccgccgcctcgctcgcttcgtccccaccacggcgttccgcccgcccgccgccgccgaccaccgcacctccgtcgtgctcgactgccgccacggccgcgccctcctctacgactacagatcctcggagttcgtcgtctgggatcccgtcacaggccgcgagcgccggatgcccgacgatgtgcccgatcgctacacgaaccacgtggtgctctgcgccgcgggcgccggctgcgaccacagcgcctgcagcggcggggcgttcctcatggcctccgcgggcgggcacgtcatggacttggtgcaggcggacgctcgcttgtactcgtctgagaccggcgtgcggaggggaccagacggcatctacctcgattacaacgatgggcagttcgatgagggctgcccatacagcctcgaggctgatcggcccggcgtgccttgctgggggcacgctctacttcgtctgccagtcgggtgccctgctgcggtacggctttctgggtaagcagagcctatcgctgatcaagccgcctcccggcaaatttcatgga

SEQ ID NO: 41303 - DNA, 514 bp, Zea mays
  Clone ID: MRT4577_137671C.1
ggacttacatactacatacattaattccttaatggggtaacttattctatcgataccattaacaagctcatatgagaataacagaggaataaccgtacatgaatactgtactaacaagagaccacaaatctagcgtgcgtccgataacacagatggcaaaccacaaacatgattacgaacacagagagaaaacgtcctgactgaggaaaaaatcacggatgaccacatggtaactctggcacggggggaccaccgctcagaagatccaggacccggcggaggtgcacgtcccgacggacttggtgttacagacgaacacggtggtatcaacagtgcacgtgccgcagcatccccagcgggccttcaccgaagccctgcgactggggcgtccctggccaggtcatacagcggagtcgtagatgtccgaagacagcgatcttagagatccgggtaccgctcgcgccagcgcgtccacagtgccgctcatcttccggtagaagctctgcgcgtcgct

SEQ ID NO: 41304 - DNA, 256 bp, Zea mays
  unsure (1)..(256): unsure at all n locations
  Clone ID: MRT4577_137672C.1
gaagaaaagaagccgcccctggggaagagaaagncagcngccaagccaccccccaagaagcgggggtttctgcttgacactgtcttttcctgcccattctgcggggggggggttgtgttttttgcctaattgncctgaacaatctgggggggggggggtcttgtcgnatctggcgggcccccttcngcncggctggtggtgcgctccctgggcctgttggtgttcttgggggccgggttggtgggggcgcgcgggg

SEQ ID NO: 41305 - DNA, 1571 bp, Zea mays
  unsure (1)..(1571): unsure at all n locations
  Clone ID: MRT4577_137673C.1
ggccgcttttttttttttttttttcacataagcgggtataaggacccaccagagtttttttatatcattaaacatcaatacatcgtatacaagcgaatgaacaagaccgttttcgtaggattacacatttacagtacaaactagatctacaaatggttatacaacacgctgtcttggggtttgttctcccttctcgtagagcatgtacagtcgctacaaattatagtggttagttgtaagtagggtaagcaaccttcggatgcaactgtgctagtgaacatttgggatattgctatctaaagactgcatccagattattggttcaggaacctgccagcttcagttcagaatgatttaatatcaattctgcgatattcccttgggttgttctgtgccctcaccaacgaagcctgatgcttcagccagaacttcaagctcttggtcaccgctcagaatctttccgttgatgaaccatgttggaaaaccttcaagaccagcagcggcacattcagcggtcattttctttcccttaccagctccatttgggaaacattccacataatccagaatttttgtagcttcatgaccaaacatctgtttttgttcattgcaatgagaacaccagaatgctccatacatcttagcacctatagagtgcaaatgtttagccagtgcaatggcaaatggggatgattcggttgatatctctgtttcatacggctgtaatacgaaatcatctgtgcctttcaattgagtagtagcagaactatatgagtttgtcaaagcaagagctataatgacagctacagctaactgaatgccagcgaacttctggatacgttcaaaaccgatgtcctttactctgatgaagagtagagtgaatgagagaaatgctgagagcaaacagtacgaacatgacaccccaataaatttagtgcttagaatataaagaaaataaacactcgcagtcgccatagaagtagcaaccagaagcaatatcaatctaacatccaggtcatctgatccttggagtaagtcctttccatttttttgcagagaaagtgcggtaactaaaccatatgccaccagaccaactatgggaagaggtatcccaaagacgacggagtagtcgctgtcgaggacgtcgccacagcctgcgccagtgatggggcagaacgcctcggagcccgtgagcttgaggtaagtgaggtaaccagtctccaggaaccccagcccagcgacacccgcagaccaggtgctcgtggaaatgcccagcagagaggaagggggcgatcttgcagatttgtccagcggcggggcgggaggggcgccggagatctcctgctcctgggaagaagaatccgcgcagcacctgaattgtgtggctctcttgatgcgcgaggaagcagagggcgtacttgcgacggcaacgcgagttagcgacggtaaggagatggcgagggctgcagacatggtcgccatgggcggaggtcagtggtgaccgattagagcgggcaaggcgagctgactacacgcgaccacgcctgccccggccggnccaanagggtacc

SEQ ID NO: 41306 - DNA, 671 bp, Zea mays
  Clone ID: MRT4577_137674C.1
tgtcatttccaccccttgaagtcactttgcgtgagataaccagctgagaacatggtgatgagaggcggcaagagcagcgtcaagaccatggcagtgatgcttgcagttgtgggtcttgtggccctgcagcaaacacagcgagtgcaagctagcgtgtgttgctgtttagacctggcggtccctgtgtactatacatgccgcggctcttctggtaccatgtcacagtgttgccctacgtgtggtggctatgtatcagtcggtggatgcaggcccccatatgtccccatatctggctaccgcacaacaaccgtcaactactgcaaggtggggtgcacggcttccgtgtgcaacaaattaattccatctgcagttattggcagtggcaacgaaggaaaagatgccatggaacgttgtaccagtggatgtcatgatctgtgcaccaagagcagcactgacattgcaaaagtccacaatgcttaactagttaagccatggaactagatgtcaaaagccggccaaggcgtgtttatgttatgttcaataattgggtgtcacatccaatatcagtaggatgtcaaatgttacttgtgatacaaatttactatttccaataaggttaatgagatgtgcaatgcatcttcctaggaggattatgctgctcatcatctcat

SEQ ID NO: 41307 - DNA, 668 bp, Zea mays
  unsure (1)..(668): unsure at all n locations
  Clone ID: MRT4577_137675C.1
ttgggtacctcgaggccggccgggnnannntttcnnnnnnnnnnnnaaaaaaaaaaaaaaaaaaaaaaaaaaaaaaaaaaaaaaaaaaaaaaaaaaaaaaaaccggaaaaagcgggggggcggggggacaaggaacagggggaggaggaatttggccaagccaaaaggggtttttcgggggactcgatggacaagggccgggcccccgggggaaaacaaaaggcctggaggaaaaagcgaaagtttgagtttggtccccagccagccaacaccaagttgtcaagcaaaaaaaaagggaggagggtcccggttccgggaggtaatgggaaatggagggctcttccccttgaaactggaaactactcatggggaagggaagttgttacccccaaaacccgtatcctccacggggtctacaatggatcaaaaaatgagcttgggaggacacaaacccttgggaaaaaggccattgggcaagttgatgctgccccattcaagcagggggacctccctccctatggagttgacattggtaggaaaaaaaaaacccctgctgcaaaaaaggataatgctgagggacaaaaggttgaggcaccccctggggaaaccaaaaaaagcaaccttgtccccaggaagcttgaaaagcgcaaggagggacgtacccttga

SEQ ID NO: 41308 - DNA, 361 bp, Zea mays
  Clone ID: MRT4577_137676C.1
ttcacgcgtgcggccaaaggagcgtggggggctgaccttacagatgctgccgatcacactgggctcggttacacctgagcctgccgactatatggaaggcggatgcttagacgacaaggtgatgaaggaggacaagaacttgtcgaaggactccagaagcagaatgtgctaagacggaatgcccacggatcagctagcttttggagtcatgcatcaaactgcctgaggccagcagcctgcacatgctgtgcatggcgacgcaaacaggcgattgattggatggaccccagacctgcgaggaacatgataggcaagcatcattccctacatgggctccaacttcagccaccacatcgttgac

SEQ ID NO: 41309 - DNA, 167 bp, Zea mays
  Clone ID: MRT4577_137677C.1
gggtggacccacgcgggcgcgcacccttccgctggcagagatcgccgttcgtccatgtttctttttttgcttctgtccgcgctgtttggtcctgtgcggactaccagttgggtgacttcactgtctctttggtggctcctttcttgttgatggacgctttttttgtg

SEQ ID NO: 41310 - DNA, 303 bp, Zea mays
  Clone ID: MRT4577_137678C.1
cgctctcccgtacggcggtcgctttggatgtcatttgggaagggaagggaaggggaggggagggacgggggcgcgttcgtgccgcgtcctgtccttgtcgcgtccgtcgttcgtcggtcgccaacgccgtgaccccatcctgcaactgaccaccagctgcttctgacgcatggctgcgacgcgtcgatcctgctggacaccgcgcatagctagaagactgaggctccgaacctgtcggtgggcgggtacgaggtgatcgacgcgatcaaggcgcatgtggagagtgcgtgcccagtcgttgtg

SEQ ID NO: 41311 - DNA, 911 bp, Zea mays
  unsure (1)..(911): unsure at all n locations
  Clone ID: MRT4577_137679C.1
ttgggtacctcgaggccggccgggaatcctatgattaaacaagatcatattgtgttaaatggaacatggagtgatcatcaaggaaaaaagtgcaatcacgagtgctatcatggctctggctttggtaattagttttatatacttagtgtctagcaaccttacctgaaagatgggtaagagggggcgacagtggtttggtgacagctcaggttaacatggggtggtagtcttggctaaggtaactcacccaaagattcaccaatactgacgtggaaaccttagcggggtactttgcattaagtatattttgtgaaagcctcataataatggatccctagccattcacctcggtagtgagtatgggtttgattaacccaggttagaggtgatacacggcttgtgggtaaagttgtaccacctctatagagtgtaaaattgatatttcagtcgtgctcacggttaagagcaacatggaccctgacatgataattaaactctaagatggatgttaaatggtgatcttttgggataaagtgatttgcttaagtgttttcacttaagtgcttttggatataattatttacgctcatatttaattttgggatggtatacactcatatttagtaatcagacggtaataataaaatactgactaacttaaatgctaaccgcactaaactttagccttaccatgttaaccttgcatattcctcgcacttgttgagcccccaccgtanatgagctcactcttttcttaattttttttatcagaaggtgaggatgaagactttgacagggactatgatgagctataagtctagcgacactccggtcatcatcttgtangagatcgcctatgntatntctgctataatttgattatgctactggttaagaatcttaagtctgaa

SEQ ID NO: 41312 - DNA, 107 bp, Zea mays
  Clone ID: MRT4577_13767C.1
ctcttcctctgctcccaggctctcccacggtacttcagccgctagtctgcgactccggccagtacgccaccaccaccgaagccttggactaccgcctgccgcccttc

SEQ ID NO: 41313 - DNA, 1830 bp, Zea mays
  Clone ID: MRT4577_137680C.1
cacacgcgtccgcggacgccttgagctctcccctcagctcatctccctccctatatataggagtgtgtgcctcgaggccggccgggaagcgcccaaggcagcggagagagctagctccctcctcctcctcaggtagcgagcgagcgagcgacgagctcctctgcccctctgcacacctggcctccccttctccgctgcaggaccgccgttgacgactgctccaccagtactgcgcgcgcccgcgctgcctacccttacctagccagagcgcggcgcgcgagagggagaacgaccaggaggggaggagatcgatcgatcgatcgatcgagatagatggctttcctcaacatggagcagcagacctgggccttcaccttcggtatcctaggtaacataatctcgctgatggtgttcctttcgccgctgccgacgttctaccgcgtgtaccgcaagaagtcgacggaggggttccagtcgaccccgtacgtggtgacgctgttcagctgcatgctgtggatcttctacgcgctgctcaagtccggcgccgagctgctggtgaccatcaacggcgtcgggtgcgtgatcgaggcggcgtacctggccgcgtacctggtgtacgcgcccaaggccgccagggcgctgacggccaagatgctgctggggctcaacgtcggcgtctttggactcgccgcgctcgccaccatggtggtctccagcgccggcctccgcgtgcgcgtgctcggctggatctgcgtcagcgtcgcgctcagcgtattcgccgcgccgctcagcatcatgcggcaggtggtccggaccaagagcgtggagttcatgcccatctcgctctccttcttcctggtgctgagcgccgtgatctggttcgcgtacggcgcgctgaagagggacgtgttcgtggcgttccccaacgtgctgggcttcgtcttcggcgtcgcgcagatggcgctgtacatggcgtacaggaacaaggagcccgcggcggtcacggtggaggtgacggtggaggaggcgaagctgccggagcacgccaaggaggtggtggtggccgcggcggcggccgaggccagggcgagctgcggtgctgaggtgcaccccatcgacatcgacatcgaagctacgccgacgccggtggaggaggtgcacgagccgcaggtggtcgtggtcgtcgacgtggacgtggagcctgtcacctgcgccggcgccgccgaggcagctgcgggagcaggggcagatgcgtccggcgtggccgacggcggcgtccctggacccatggcgccgccggagcagctggcgatcaagcccgacatggccatttccgtggaggcgtaggttggttaaagtgtaatagcagagtgagtcgatatcgatcagtagtaggtttgtcgagtcaaggaagtggcctgctgctgctgctacgcgacagcagcggccagatgtactgcctgcatgcatgcagtccctcccgttgactcgacccgtagagatgggatgggatggaagtagccgggtccttgggcgagtagcggcgccttggcacccacgggccagccgtactggcctgtgtgatgaaccggcgagagagagatgagataatgtgcgagcgagagagggttgggttgtggtagactggtagttgaagaagacggctagctagctgctgctgctgggctctctatctgtctctagatctgtgtgtgtctgtgtaatcgaggattccctcaccttgcttgccgcctcccttttgtgtccttctagtctgatgattgttttcattccatccatgccggcgtcgcagtaataaaatttttttgg

SEQ ID NO: 41314 - DNA, 343 bp, Zea mays
  Clone ID: MRT4577_137681C.1
agtaagaacatccaaatgatcgttacccatatttcaccattctagctctctcgaggatgtactcaagtaaaacaacaaagcaatattttacccatctttcgtcattctagctctcaagtgacatgaaacaacaaagcaatattttactctaatgcatgctttataataatttttatgctaggtccgctcctctcgacgtgcggtggggtctggcccacctcaccgggccggtgggccacggcatcgcgggctcctccgatcgaggataactctgagggccgcgacggcttgctctggtggcgcgacctcgcgcgctgccacaccggtgaagtctccatcgtcg

SEQ ID NO: 41315 - DNA, 1230 bp, Zea mays
  Clone ID: MRT4577_137682C.1
cattgggtacctcgaggccggccgggagccactatatataataatggcgtcgcgagccaacaacaacaacgcacgagacgaagggcctcacgctttccacatcgacacaaaaaccaaccgccgccacctccctccgctcgcgctagctgtgtgcgttccttgcctgccacaactctagcactcggagtcttcgacgacgacgacgacgacgacgacgacgacgacgacgacgacgacggcaggggaggagaaagagaaacaggcgggcgggtcatccatggagacggaggaggagacgacgcccaaggcgaagaagcggtcgcagtcgctgctcgggagcctgcgggaggcgatcaccaaggtccggttcctgctctcctccagcgcgacgcggtggatgctgctcaggtccctggcccgcggcggcggcggcggcggcgccccggcgcggcgcctcagcttcgacgcgcggccgggcctgctcgacaccatcgccgcgtcgccggactcctcctcctgcagctccaggacctccaggtcggccagcctgggcacggcgaccacccggaccctgtcgcgggccagcagcgccgcgtcgccggaggccctgacgagggcctcgtcgtcgtccggcggccgctccccggcgtcgtcggccggggacgacgacgtcgaccagcgcgccgagctcttcatcgccaacttctacaggcagctgcggatggagcgccaggtctcgctgcagctgcggtacgtcagggggaacagctgggacaggacccctggcgcaactccttctcctgcttcttccaggggatgatccgtagattgcatagcgaaataagaatttgcgaggtagagatcctttcctttcagagcgcgcggtgacgcgatttagatgggtatcctcttttttttttcctccatcgtttctgcacattcttttttttttgggtgctgaatagtactgtacagtttatgatttgcttggactcatgatcgagagtgtaataaatacaaaaaaaaagagagagagattgggattacagtctgtaatcaggtaaaagttttgactttcgttatgtgaaccaagaggaaaaggggaagcacattctgatgctcccttaggagtgtttgtgttcgattggttgatatgttgaaaagcatttaagtgcctatggagagagaaggccgagagcatttgtgtgttcgaatagagcattgttcgtc

SEQ ID NO: 41316 - DNA, 238 bp, Zea mays
  Clone ID: MRT4577_137683C.1
gcggcctctggcttctcacgtaagtactaatgttttccctccaaccacctccacctagagcctgggtaacaatatctttcgcattcatccggctcattctagctaagctctacccccctttctcctcaaccttttatatcgatctcgcacagacgttcgaccccgtctagacttcatctaactttgccatttacgccatttacccctctgaagccgttcgctcactctcctccccgca

SEQ ID NO: 41317 - DNA, 370 bp, Zea mays
  Clone ID: MRT4577_137684C.1
cttgtctccaccgcggtcctgcaccacggtcacctccaccggcgccgccgcctcgcccggcgtgctacgccgtcgtcgcgggagctgcggctgaggccccgctccccatggcgccgcgcttcggtcgggccacgcggcaacccataatcatgttactcgccatcctgtccgaatcgctgtaggaatgggagccaggggggagcatggatggaaggcaaaaagcatggcacgagaacgcgagaagatgctaaggttattgtccttttcatgccaactctagccggatatcttccccgatgccgctgcatattatttcggtcatcttcttgattcatgatttcgcgcagactctgacctcgaatcctttatg

SEQ ID NO: 41318 - DNA, 407 bp, Zea mays
  Clone ID: MRT4577_137685C.1
tcgcccacgcgtacgtaacaacataaaaagcgacattagtgtaccaacaatggcagccaaaatatggggcctccttatgctccttgggctttctgtaaatgctgctaccgagaccattttcccgcaatgcttacaagcttctatagctttcgttattgccccgtacctctcaccagcgagtgtttttcggtattgtgaaaacccattctcttcaaccctatatgatccaacagtcgaaaggatctggcatcttaccttaatgacccttgtttctccaacaaacatcatctctatttcaggatttacctttggtgcatttattggcatacaatatctgggaactactgctacttcaacttgggctaacttactttgaagctaatttttagtaacagtagttatttttt

SEQ ID NO: 41319 - DNA, 246 bp, Zea mays
  unsure (1)..(246): unsure at all n locations
  Clone ID: MRT4577_137686C.1
tctctgttgcccatttcttgttgcccgtatgtatgtgccttggccacatcgagcgggctagatgaacgcagttgttgctgttgtaggttggcggcaggggccaccatggctagttgactaagcgctgncagaaactgttgcagttgttgttgttgctggtttgtttttactttttctatatcaagtgttttgtatgctatcacctcctgtttctattattctacaggggtcaccatggctaggtgg

SEQ ID NO: 41320 - DNA, 920 bp, Zea mays
  Clone ID: MRT4577_137687C.1
cccacgcgtccggccgcctgggtggagtggagagctggaggcagatcgaaataaagagcaccgtccgaaccgacgtcctcgccgacgtcgtctcaaacgtgcccctcacgagaccgtcctccaaaatcctgaaacctatataattcccgctccatcaccggccggacgcctgatccgagtccctgagtcctgatagtacacgacaggcaccgcagcagaccggccggactcggcgccaagcgcgatggatttgtcatccgacgacgtgaaggcggcgaacatgcggcctgcggttgctgctgccgacggcacgtcgacgcttctgcggggttggcgggagttcatgcggagcggcgcgccggcgaggttcctctgttatgaggacggcaagtggatcggtatcaccggagaggcggtgccgcagctgcgccaggcgttccaggagaggagggcgatggccgatgcttcgtacgggggcaaggcgtacctgttcgacttcctccgcatgatcaggatcgacgaggtcaccggcgaggagaccgggctggcgtggatcgacgaccgcggggactgcttcttcccggcgcccgactgcggagggaggaagcgcaagagggacgacgagccggcggaggacgaggccgagtcatcctcgggcgtggacgtgcgctcaggggagagacacggcgtggacgccaagaagatgaaggcatgggagaacgcggcggtgaggctcgaggagaacgacatgtactaccaggtcgtcagcaagctattcctcagctatgggatggcgcaacgcggcgcggcgatcacggaggtgcgcaagatcgcgcccggcgcgaggaccgtggctttccgggaacaggggcagcgcctcgcctacgcgcgctgcacagccaccggcaccgccaagttcg

SEQ ID NO: 41321 - DNA, 489 bp, Zea mays
  Clone ID: MRT4577_137688C.1
tcgtcatgattggtatcgtgaattaccttcagctttcgggatgccacacatgaaggtcatttaaccattcgtgatggttgccatatatggagattctatgggttgggtgaattctcggggatatagcactatagttatctcacatggttatggactacttcgatgacttgcaagcgagccgctaaaagcttgcccatgcactctaactctcaagattctcattctggctacgctgacaccaaatcatgtgtgtggactgtcagaccagcatgcctaggagaggactggatcacctagtgcattactttctttgcgacctgatagaggagattacttatgacatcatgttctactgtgttcactgaatgcatgcggtttatagttttcttccggctagatgttatcgagcatgtgacgacctatcaggaacgattgctgctgatacccgagcacatggctagtatactctacccggagaaaaactctgaa

SEQ ID NO: 41322 - DNA, 361 bp, Zea mays
  Clone ID: MRT4577_137689C.1
gggacacaaaaagtaaattaggcggctttatatccattaaccagaaattgttatcccatcacctgaaaaacacctaattgtgattcctcttttcaagtgttgctctagcaaaattaggaacttgattccacacaagaggccacattaaggaattgggccttcagaagggaaaatataggagcacatgggtggcaaaatatgaacgccttccagagatggcctcaacctgtgcaaaggaaacttacaccctgggttgcgctcaataggagcatggtactctggatctggtgtcttgtcaacgccaaagctgatgggtgaaacctttgcaacatcgtgtttagaaaaggatatgcatgaactg

SEQ ID NO: 41323 - DNA, 473 bp, Zea mays
  unsure (1)..(473): unsure at all n locations
  Clone ID: MRT4577_13768C.1
ccaatagccgtggacggtagggtggagacagagtttcgagagaacaagggctggttgatgcctattcagaatacagcacccgtttccctttaaatgtattggtgagacgcgctattctgnggctccagaggcttaatacctagcatgagctgactgactagataaaaaatctactatccttagagggggggcgggatagtaggataatatccctatttgaggcgtttaagtaattgcgcggattaatcagtgtaatagttgttttacttggtcttagggtaagtggaatccaaccgttgcttcaagtcagaggccgaaatcacgatgttggctgactacagctactgattggtaggtttggggctagtggcattggtgcactttagtttactatctttgctgctatagctgtcggcaacagtgttggtggcgattactgttttagtgccgggataaggctggatacacctaac

SEQ ID NO: 41324 - DNA, 783 bp, Zea mays
  unsure (1)..(783): unsure at all n locations
  Clone ID: MRT4577_137690C.1
ttgggtccctcgaggccggcccgcgcggcgtcgcgtgggggatgggcgttatacgagctgtacaggacaacgagccgcgtggcggcgccggcagtgctattgtggcggcgactgcaagggctggagcacccgacgcggtggccggagcggctaggacggccgtccgcggcgcggcctcggccgggctctccgctcgtgtggtttcatgccgtatcccttggcgagggaatggccgcgcttcccattgttcgccactgcgtccgcctccgtcccggcctccccgtgcttttcaccaccaccaccctctcctcgtccgaagttatcatggatctactccctgatggtgtcatatatcagtttgctcctcttgactgtcctactgcaatagatagttttattggatactggaagccaagtttggtacttcttctggaaagtgaactctggccaaacctcatcatgtctgcagcagcaaaagggattgcagtggctcttttaaatgcacgcatatcattgaaatccttcaaccactggtcgatgcctttaatgttcccattagtttctttgatgctctctaaactatcacttgttgtcccattgagtactattcaggctgttcgttttcagctgctacatacaccaccaggaatcatacattnttgctggagatttaaaatatgtcatcctccgcattcatgaaagagtggtcaacgtgtatcccgntctactactaattcttgtgcccagacatcctgaaagactgtagaatatttccttggcact

SEQ ID NO: 41325 - DNA, 138 bp, Zea mays
  Clone ID: MRT4577_137691C.1
acttctgctcaccctatctcgggctgcttcctgatgacctcaaaccccttctgattgttcatgtagcattccatccgccgtcggcgtggccgcctttggaaggggaatttgtgtaaccttattatttgttttgggggg

SEQ ID NO: 41326 - DNA, 655 bp, Zea mays
  Clone ID: MRT4577_137692C.1
cattgggtacctcgaggccggccgggtctcgctcgtctcgacgcgcctctgaaagctcgaagccgacggaccgtccgcctgcctctccgcctcacgttgccgaggacaatagttttcaagagagaatggagtaccatgataaccaacccactgttcttcataagctcgatggccagatccacctgcgactctatcatactctgaatgcgtacgggaccgtaacatatggccatctgtctcatcttatgaaaggagatttgactacaaagaactatcatgacccagagacttttgagcccttctatgtcagctagtggaggtatcaatgtaccattgatgccaatcccgctctgtgttaatgctactgctgagaaaggaggtaagaacttcatgatcaagttcatgatgggcggcgtttcatatgctgattcgaagactgctgctgctcccatcaagcgcgcgaagttgcttattcacaaccaagatgatatgattaagactgatagggtatcagagtcgtacaagggtattggtgactgcttcacacgtagcattaatgatgaggctgtctcttccatgtggatctgtaacactgctaatgtcattgcttacttccctactcaggatctgaactttgcatttaaggactacttca

SEQ ID NO: 41327 - DNA, 1071 bp, Zea mays
  Clone ID: MRT4577_137693C.1
acctgcaccaccactccctccctacctcactcccgatctccccaccgcctccacctcctcgcctcctcctcgaccccccgccccctcgcgcgcgcccaccggcccggctccgtggtcaccgcagcggagatggtgttctccgtcacgaagaaggagaccaagccctacgagggccagaagcccggcacctccggcctccgcaagaaggttacagtattccagcagcctcattacctcgcgaatttcgttcaatcaacatttaatgcccttccagctgaccaagtaaaaggtgccaccattgttgtctccggcgatgggcgctatttctcaaaggatgctgttcagatcattgcaaaaatggctgctgctaatggagtaagacgtgtctgggttggacaagacagtctcttgtcaactccagctgtatctgctatcatccgtgaaagaatttctgcagatggcgcaaaggctactggtgccttcattttgacagccagccacaacccaggtggtccaaccgaggactttggaatcaaatacaacatggggaatggtggacccgcccctgagtctgttaccgataagatcttctctaatacaaagacagttactgaatacctcattgcggaggaccttccaaatgttgatatttctgtgataggtgtcacttccttcactggacctgaaggcccttttgatgtcgatgtctttgactctgctacagattacatcaagctaatgaagacaatctttgacttcgagtctattaaaaagcttctggcatctccaaagttctcgttctgttttgatggtcttcacggtgttgctggagcttatgcaaagcgcatgtttgtggatgagctcggcgccagtgaaagctcactgttgaactgtgttccaaaggaacttttttggaggtggtcatccagaccctaacctcacctacgcaaaagaactggttgatcgggatgggtcttgggaaaacctcaaatgttgaacccccctgaatttggtgccgcagcctgatggggatgctgaccgcaacatgggttcttggtaaaagattcttcg

SEQ ID NO: 41328 - DNA, 1026 bp, Zea mays
  Clone ID: MRT4577_137694C.1
acggacgcgtgggacgcgcgcacgcacgtatggtcgaacaatattaggagagaagctcagagaccggttcctggccttccaaaaaagaagtagacataagatagatctctccgcctctcctcgcccaacctcctccaacaagtaacattgaccgcaaacggatcatcgtccggtgcggtcaatgtaattaactaagcttctcaatcatacatagcttggcaaatgcctgagggctagctagacaaggtccgttgagctagcccctttgggaagaagggagaggaatggcgctggtggcccgttgagcgaggaagaggctattgagaacccgttaacaagaattgccagcagcatctggacaatcttgttaacagagttccaaaggttcaattccaagcagatacaatttccgagttggatcgagaagagtgcgtgcatccgatccgtccgtccacgttcgtggttcgtataagctaggtttcatcaaccatgggcacaaagatgaagaagggcatcctgaagccgttccgctatatctcgaacatgatggacggtaaggagcctgaaatgcaaattgggctccccacggatgtaaaacatgtggcacacatcggttgggatggtcctggatccacgaacagcggcagcagcaacaataataatgccggaggagctcctagctggatgaaggattaccactcggcgccgctcgactcgtcctcctttaggagcgagagtgggggcacggctgctgcgaatccctgggcttctcaagagatagtcatggacggagcaagcatcggagagacctccttcagggacacgaaaagcgaggcgggcgggggcgacgactccccgccgtcccccgccacgcgccggacgagacgacagcaccgctctcgcggctcggccacctcctccatggacgacaccaccggcggcgagggcggcgccgaggagaaggagaagaggaaggagaagggcaagaagggcgcccgcaagaaccgcaagaaggacaagccggcc

SEQ ID NO: 41329 - DNA, 777 bp, Zea mays
  unsure (1)..(777): unsure at all n locations
  Clone ID: MRT4577_137695C.1
gggtacctcgaggccggccgggagctccatctccgacctggattcggatgacggcccccgagtctcgcaaccacgcaccaacatcgcgaaactcatccatccgcccacccctaccatgacggatgagcagacggcggctcgaagacgttcctcctcgctcgccggcgcaaccctgcccactaaaacagacctgaagaagcaccgccggcaccgttccgaccacattgctgaagaaggagaagaatcctcgtccggtgcggaccgttccgattcagactctgacagcgacgactccgacctcgacgacatgagcgcagacgggctcgaagacgatgaggagacgggccttaccaagagagacaggcggagacgccggagaagaaagaggaggaacacgttgctcgaccagcgcatcgtccccgacgatacgtacacaaaggaggagaagaagctcgccgaccagaacttgctcaagtccatgctggtcaacggagccctgataggcctatggtacctcttctccatttcgatatctgtctacaacaaatggacgttcaaggaagccaagggcgacggcgagaccaagaacatctttccatttccgctcttcacaacatgcctggcatatgatcgtccaattcacgcttgcgtcgctcgttctattcctaataccctcctttcgacctcgacacgattcccttaaccctcacgctgccnggcgcgcgtatggagcccttggacccaaacaagccgcttatgaccaaatggttctacttc

SEQ ID NO: 41330 - DNA, 664 bp, Zea mays
  Clone ID: MRT4577_137696C.1
cggacgcgtgggcggacgcgtgggcggactcgtgggcaagtaacattgaccgcaaacgggtcatcgtccggtgcggtcaatgtaattaactaagcttctcaatcatacatagcttggcaaatgcctgagggctagctagacaaggtccgttgagctagcccctttgggaagaagggagaggaatggcgctggtggcccgttgagcgaggaagaggctattgagaacccgttaacaagaattgccagcagcatctggacaatcttgttaacagagttccaaaggttcaattccaagcggatacaacaattgatccgatccgattagcaatttccgagttggatcgagaagagtgcgtgcatccgtccgtccacgttcgtggttcgtataagctaggtttcatcaaccatgggcacaaagatgaagaaggggatcctgaagccgttccgctatatctcgaacatgatggacggtaaggagcctgaaatgcaaattgggctccccacggatgtaaaacatgtggcgcacatcggttgggatggtcctggatccaccaacagcgggcgcagcaacaacaataatgccggaggagctcctagctggatgaaggattacccactcgcgccggtcgactcgtcctcctttatgagcgagagtgggggcacg

SEQ ID NO: 41331 - DNA, 552 bp, Zea mays
  Clone ID: MRT4577_137697C.1
gccggccgggctcggaaaaaaaccattgctgtactcattcccctcctgcacgcaacctcatctcgtcctccagatccacgatgaacgacctccttgataccttgcctcgcccagagctctcggtgacctactttggtccgatttatcaggaaatccgtttgcttcatgctatgcacgctcacatctgattgctgcattcagaatcttacgcgcttgaatagagataggactgagagaccacaacaaacccgcgctgtatcctgtatcaatctggagaaatttctaagtcagctcccccgtcaccattcgggtcacaccgcatctcacgcgaccatgcctgaaagcttcgcgatctcttggtctgcagacctgcttcacctccatggatgatgtctctgcgctgataattattggatccactttcgatacattattagtacatctatgagatatgccgcctggaagaggccaagtaacgctgcagcatagtcatacactctagcgtgcgtctgacactacacaagaaaaacaacaaacggccctacgcgcaca

SEQ ID NO: 41332 - DNA, 268 bp, Zea mays
  Clone ID: MRT4577_137698C.1
ttcagtttcaaggagttaaataaaccaagctttccatcactacaagtgaccctcatcatcccgccccgtggcagatgggtgaccctaccctgcactgtccctgtgctcatgaactcccctgtacctttgaaaagcctctctcctgggccggatgtcagaggcctgtctgaatctgattggtctcttgcccaaggcttgggaattacctcccaagttgacatttcagtttcaaggagttaaataaacaaagctttctctaagaacaaac

SEQ ID NO: 41333 - DNA, 270 bp, Zea mays
  Clone ID: MRT4577_137699C.1
ggactcggccgccatgttaggagtactgggacgattccgcggagcgggcagaggttttaggggaatgattaacaaaggcgtccgaagaaatcgttgttggaaggtgaccaaggtggaaagagacgttgctttggccctgcaagtaagaagagagagggaatagcctgaaggagtaacactaaatttaaaatgacacttttttaccaaccagcgaaagcagatgttcagaggggatattggccagagtctgtcacactaagatgagaaatg

SEQ ID NO: 41334 - DNA, 1873 bp, Zea mays
  unsure (1)..(1873): unsure at all n locations
  Clone ID: MRT4577_13769C.1
gcacgagatttcctcactcagcgaggctaggcaagctggccgtcaagctcaggccgtcaggcgatacaactacaagcctacagtgcctacccctccgccgcctagagagagagaggccagcgatgacgaagacgacgccgccggcgttcgtgtaccggatcagcacggccgacgagtgggcggagtttcagcgcacgggcgccacccttggaggcgacctcgacagctccaccggctgcatccatctcagcgacctaaaccaggtgaagatgactttaaaaaactttttccttggaaggaatgatctgtacctactgcaaattgatactttcaagcttgcagatgggttaatttatgagctaagtgatggtgataactattttcctcatttctatggccctggtcggagctttgcacctcttcaactagatactgttgtgaaggcagacaaaatagagtttgcagacaatgattttacctgtggtctacttgatggaagttatctcccaagctgatctgtagagtctcaccttcatcttagcaatgctcatttgagttctctgccaaaggttagtgtttaatatgtctatatatgcagaagtcggtcatatatttgagtgacagattgtaccatccagaattttccacagttattcatatactttctggtggaagataaaatatgaaactgtatgtaattgacgcatcatgatggatacggatgttcattatgctatagcaagtagtacaatgtgtacttgctgtcatgttacatccagtgcctgaattcatatcattattacaagtatgttacccaaggtaacatatagtgcttattgtttatgcaaccaggcactggatgtaacatgacagcaagtacacattgtactacttgctatagcataatgaacatccgtatccatcatgatgcgtcaattacatacagtttcatattttatcttccaccagaaagtatatgaataactgtggaaaattctggatggtacaatctgtcactcaaatatatgaccgacttctgcatatatagacatattaaacactaacctttggcagagaactcaaatgagcattgctaagatgaaggtgagactctacagatcagcttgggagataacttccatcaagtagaccacaggtaaaatcattgtctgcaaactctattttgtctgccttcacaacagtatctagttgaagaggtgcaaagctccgaccagggccatagaaatgaggaaaatagttatcaccatcacttagctcataaattaacccatctgcaagcttgaaagtatcaatttgcagtaggtacagatcattccttccaaggaaaaagttttttaaagtcatcttcacctggtttaggtcgctgagatggatgcagccggtggagctgtcgaggtcgcctccaagggtggcgcccgtgcgctgaaactccgcccactcgtcggccgtgctgatccggtacacgaacgccggcggcgtcgtcttcgtcatcgctggcctctctctctctaggcggcggaggggtaggcactgtaggcttgtagttgtatcgcctgacggcctgagcttgacggccagcttgcctagcctcgctgagtgaggaaatgaatgacgacgcttgcctcccgggccggccgcagtcgcccactcgtccgttttttcccgggccggttcacctacccggccggaaatcgccaggagtccatcatggtgtagcgtactaccatcgctttgcgctgggtgcgtggtgcggctgctggttggtggtggtggttcgtgtcgtgtgcacgtgggtctgctcgcacttcgttgaggagcngtancccggcccggccggctcgagcgccgcaca

SEQ ID NO: 41335 - DNA, 810 bp, Zea mays
  Clone ID: MRT4577_1376C.1
cgagataggcacaggtagaaaggacaagcatcagaattagtcacgcacccacccgggaggagcccaggagagagaacatagaagggaccggaggaggaggaaacccttttcttcgccctcgccgccgccttctccttcgccggtcgcgtcctcctcgggttctctcgtgacctcttgaatccgcccgcgagttgttgcgtccgagcgtggcaatctgcatctcttttctctctccccccctgttcctgaacccgtgtaaaacagaaccgaagaaagaagacccccaatcaatcgaatcgaattggaaaaaaaaaggaacgtaaaattaatctgctactaggagaggcacaagtgcgtgcgtgcgtgcgttcgtccggggctccgggctgtgccggccgggcgatcgatcggcgatggcgccgccgtcgagggactactggctcggcttcttccgcggcgcgggggacaacatcttcgacgccatcgaggcggccatcaccgtcgccgcatccgaccacccggccgccctccgggagcgccgcgacggcatcgccgagcgcctcttcaccgcgctcctggtcaccagcgccgcggcagcggcggcgggggcggcggccccgggaggaggagcagcggggggaacccccgtggctggggcgcccactccggcacagctccaccccgagggcgccgccagcgtgcccagcctctgcagctccgaccgcgccgaggccatcgccgacgacgccgcgccgcgctgcgacgatcctgttctcgccgagacggacggcatcaagggcgtcctcctca

SEQ ID NO: 41336 - DNA, 792 bp, Zea mays
  Clone ID: MRT4577_137700C.1
atggaggagagtgcggaagtcattcagcatcccacacactggttgatacacacaccggctcagactctgcaaatgattccaccctcctcgccattcgccatatggggggtggatatcctagggccattccccaaggctgtcggtgggtatcgtttcctcttcgtcgccatcgacaagttcacaaagtggccggaggctaccccctatggtcagtatcacccaagaagcaacgaccaagctgagagggaaaacgcagaaatcctcaggggactcaagacacgcacctatgactgcttaaagaagcatggtgcaaattgggtcaacgagcttccgtcggtactatgggcaaaccggaccacacccagccgagctacaggggagaccccgttcttcctggtatacggggtcaaagcctgccttcccctagaaatcattatgggctccccacgagtccaatctttcgatgggtctatgcaggaacagctacggcgtgaggacgtggacttcatcgacgaacgcagatggcaagcggcgatcagaaatgcacggtacaacctagtgctcaggcgctaccaccagcggtttgtgcatagtagggagctcaaggttggggacctgatcctaaggcgagtactaaaccgagaagggctccataaactctcccccagttgggaaggactcttcaaggtgacagaaatatgccgacccgggtgtgtccgccttgccagaactgaaagagtgcctcttcccaatccctggaacatagagcatctctgtaagttctacccatag

SEQ ID NO: 41337 - DNA, 651 bp, Zea mays
  Clone ID: MRT4577_137701C.1
ggcgattgggttcctcgaggccggccgggaaccttcacttctcacttcaattcgttaggaagtaaccacagcaccttccttagctcaactactaacgtacaagttaaccttgtgtttattggaccttccctctctgaatttgttcgcttctcaccctgtcgtggaatctcgtctcgcacccctttcatctaaaaaatctccttagcattgccatcatcgtcttattcagagattacaaacagaactggccagcaaaccaccacatcgactactgcaaacagatgcacatcgtctcatatcccggctatcacaggtctgtacagggtcaggcatggcctgctctcgcttcatcgtatatgacagcatggcaaaccttgtctcttcgcttccagagaatcctccattgatcgccacgagattcacctgaatatctctaatcacccggttcaacaccgtttggcgagtagcagcctcgaatctcagtccctatttcttgactttggggggatcttctcactacctcactcaagactgctgacttgagagttatgcgaccgtccctgatgggctacagcttacacggcacagtcaaggcagtctcatctgctcctctcaagagagcaaacccatgatccggagtctccatccaca

SEQ ID NO: 41338 - DNA, 245 bp, Zea mays
  unsure (1)..(245): unsure at all n locations
  Clone ID: MRT4577_137702C.1
caccaaagcaccccanggaagagggggtgaagaagacggaggcgcctacccaagaaaggaagctagagacagacgtggagatcaaggcttcggctgataagtttcaccacatgtccgctgggaaaccacaccatgtctccaaagcaagtccaggcaacattcagggatgtgacctgcacgaaggcgactggggcacagtcggctctatcgtcttctggaattacgtacatgatggggaggcaaag

SEQ ID NO: 41339 - DNA, 435 bp, Zea mays
  Clone ID: MRT4577_137703C.1
atctcttttgagtgctcgactcgcctgaaactcatctaccctagtcttctatcctctgcaaacatgatgagtgataggagagatggcgggcggcctcccctgaaggggcatgactgcagagaataggaagttcgctccgagagtgaaacttcatatggatcagtaaatgtatgatcttcagaaggagcggcgaactttaagatgcggtctaagtgccccatatccatggtaacaaaatgaaatcatgcctgacttggctatgctcctctatcaacaggatggcgaacagatgcgactgtcgctatgtgagatggtgggtccctccagcaatgcggcagaacgagaagcccgatttaaggtttgccaaaaaaaaccttgctttcccgctgttggaggccctcatcaagcagattccccgtctccttgcaaatgggg

SEQ ID NO: 41340 - DNA, 512 bp, Zea mays
  Clone ID: MRT4577_137704C.1
agagagcgcgccgcgccgcggcgatcacggaggaggagcggcggcgcaaccgcatggcctccaacaggctgtcggcgcgcaagtcccgcatgaagcagcagcagcacgtcgacgacctgaccgcggtggcggagcgccttcggcgcgagaacgaggcgatgcgcgccggcgtcggcggcgtcgtgcggcagagcatagagctcgagcaggagaatcgggtgctcgccgcgcacgcgcgccagctgtgcgccacgctcctactgcggaactcccagctccgcctgctcggtgacgtggccggcctaccgctcgacgtgccgctcgtgcccgaccacctcgtgcaactctacggtatgctcgagttctgaggtgtgacgtgagtgcatgaactatttattgttatcgtgcgaattctgctctgtcgttggtgttgcgctatgtttgctgtatgtatcctgtgttgtgctgatatatcatacattctttatgcgaccacaaaccggacgctgggg

SEQ ID NO: 41341 - DNA, 439 bp, Zea mays
  Clone ID: MRT4577_137705C.1
aacagccccacgacaacgggggaaagaggggaaaaaaaaacagggggggcaaaaacaggcaagagcgggaaggagatcccggggggggggccaacggcaaaggggctcggtatttgggggccaaaagggggcctttgggaagcgggggcgggggccaaagggggggatgggatttaagggaagcatgggccccagggaactggggcccctttgggcgggggggcaccttcccaacctgggggggaaggctaaagaacgaaaaattttggggggaaagggggggaaaggccttctccaagggaaaaagggaatccctattaaagccaggggggccatgggggggaaaaaattgcctggccaaaacccggaaaggggcggggccaaaaaaggactgggggccaaaggggccggggggggaaaaaaaaacaaaaacccccgg

SEQ ID NO: 41342 - DNA, 441 bp, Zea mays
  Clone ID: MRT4577_137706C.1
aaaggacactgtgtcatcactgtgcatataacatttcatttgcttgccctgacataatgacatgagggtaaatacgaataaaatccagcttgaattgctaaccttttgatgctgttcagaattgcataacagacctacaggaggtgacaagcacctaatccaggcactacgtgtgggccttattatgcaagggatttcaagcgcatatcacggctggcgcctctccgaacttgccacgagctcatctttaagcttaaagctcttcataacttaccattcatcaagcgtatgctttgtatggccagaatttagcgtcaaacccgccttaatacgctggcatgccaaacatccaaagcattgcggggcatacgtatacatttgctgatttgggctgtacctacactttgggagtgcacaagtctactacttgcagctggaggc

SEQ ID NO: 41343 - DNA, 422 bp, Zea mays
  Clone ID: MRT4577_137707C.1
acgcgtccgtttgctaccattgttcactttaggtactcccaaggagctcttacataattttcatgatagggggaggttggtatgtaagagaaattagctttgcctttcttatctatccgtccgcaagaccgcaacaccaccccattctccagcaacgagacaacaaatctcctcctcttgctctccgtatccgcataaggccatcaccttaaagggcagcggcggcggctgatgccacctccttcaccaccctctacatcgcgcgttcggcggagcaccggtccctctttgcctccaaggacgaacctttggcactcctcttcctccgtggcgcccacatcccctcgcaagccgtctccttctccgggggccttgcagcgtcttcatcttacagtcgcgcgcgctttgctacattcgccagc

SEQ ID NO: 41344 - DNA, 631 bp, Zea mays
  Clone ID: MRT4577_137708C.1
tcatcttcttcttcctctcctcatcttcttcctcccatccatggaagagagaggagaggaaggggagggggctgcgcaggggaggtcggggttgggccggccggggtgggcgcggccgcaccgggcgcgcggggcgcggccacagccgccggggaggggtgcgcgcgggcgcgggagcacgggacgcgggcgccaccgccggccaccgccgccgccgccggggagggagaaaggggcgccgtcgaggaggggaaacggaggggggaggggcgccgccaggggggaaggcgcggggggagagggcgcgggccggagccgaggagaaatccgtcgattgccggagattcggggatccaatcgacgaaccgaacgcgctgcgacgaagccttcgacgagacgaacgcagcggtaccctcggattcggcagacgatgcacggattgggagtaattgctcgccggagttgtcgccggagttggaaccgccccgaacttcggcgagcaataccgggagctagggattggatttgggggaaacgtttggtgttctggaacgggctcgacgagatgaagccggacataaaaattcctataaatgttttggcacctaatgaactcaaaaaacataattag

SEQ ID NO: 41345 - DNA, 276 bp, Zea mays
  Clone ID: MRT4577_137709C.1
cccactcttactcatcactactaacacatcctactatacttttttctcactcacaccttcccacactcaagactgattctatccaaaatccggcaaccaacctacctcatactaccaacccacctaatacccaattcatcacatctatccaacaatcctcacctaacacacattaaatctaataattccaccatctctctctcaactactcacacaactatctaccacaatcataattccataccacaaacacctcaaaatacacttacttccata

SEQ ID NO: 41346 - DNA, 807 bp, Zea mays
  Clone ID: MRT4577_13770C.1
attcccatccccaacccctagctccgacccaaccagaaagcgccgccgtcatcaaggaaaccctcgcgtggcgatggcgcctcctccaacggaagagcagctactgcgtggatcggaggaaaccgaggtcctccgcctttctgttgacggcggcggccaccccagcgtttgcacggatcagccgtcagcaataggtggccccgcggcccagactacggaagaaccccgtgatgaccaggcgctcgtctccacagaatcagatcagttttccttgcgcgctcctgagctcgtgagcacacaggtggacagcgacgaccagcgcgatgcccaagtgatggaggaggacagcgatgacaaggagggtagtgatgacgaggaggataccgatgaatatgatgcccaaatggtagacgaggacagtgatgaggaggaggctggggatgaatactatgcccaagtgatcgacaaggacagcgagacaaattgcccaggaaaaaactactccaaggaagaagcagatgaagtagtgtccagatggcttcacagtttcaacaaagcgtatcatgactgcttgaacctgcgcctagagattctagcccggggtgataagaatgctcgtcttccttcttttcctttgaaagttctccctgtggtaacaagtctatgcattgaaagcaacatctgttatcaccgtgaatacattacccatgacacttccacaactgcatcattccttgggtattccaatccaagaaccatgctacagatcttctctttgcgcttgtcaactatgaatcccatcccatt

SEQ ID NO: 41347 - DNA, 398 bp, Zea mays
  Clone ID: MRT4577_137710C.1
aaaggattcagcacgcctcccgttgggaagggagcttcgaggcggcccatcggagagcgttggccgttcggtctgatccaatgtcactggcccttggggcgcgaacgccctaacgtgggtcgtagcgggcgacgagcaaaggcgccgtttgctagcttgaattttgacttaaaggcttttagtcataatccggcacacggtagcttcgtgccactggctttttaaccaatcgcaatgaccaattgagtgaatcaacggttcctttcgttctaggttgaattactatcgtagctcggtcatcagttgagtaaaacttacctgtcttactactacctaatacgagtatatgttctttattggtgtatgaacaatacaatactctgtgtatttatgttcac

SEQ ID NO: 41348 - DNA, 457 bp, Zea mays
  Clone ID: MRT4577_137711C.1
aggctcgtaaccttcacagcggccgaccatcatacactactttttttcaaaaacaggaagagaacattaaacacgggcatgcaaaacacaacggcacgaaaaaacggaaccccatatataatcaaaacacagaaaaacctggtacaaaacaggcctaacctgaatattacagcatataactacaataaggaaatatacacacggaaccgaaattacacttaaccagccaaagaagcacaccaaaatacaaaaaggactgtgaggcccaaccaagacgggcaagctggccaagccgaaacgcacctactcgatttacaggaaccatgaacgacatgtccaggccaaaatttcctgacaaaggcggagcaacccgcagatgaatcatggtcagcgggtacatgccaccaaggtcacgggatgatggctgcagcgaatgcacaaagcccaggtacagcaa

SEQ ID NO: 41349 - DNA, 183 bp, Zea mays
  Clone ID: MRT4577_137712C.1
tgttgctgaagaacgggctggtacaaagcctggtggactcatggatcccaactcctactcggttgatgatgaaagcagctacaagtactttgcgatcatcctggttgatgtggcccacactgacatccgcaatgactcaagcatcagctggctatacaatcctgtgcacaagcatagtgagct

SEQ ID NO: 41350 - DNA, 329 bp, Zea mays
  Clone ID: MRT4577_137713C.1
attcttactctttgattatattaagtttcatctgcttttgatgccaattcttcaatccatcatactactagctacagtgcactcaatttctcaaattatgttctcattgttgaatcatggtcaacttattctcaccttgacatacagagtatagaaacgtatggattcttgaactgtgcttaaatagttagtcatccaacctcagtgtacaccttgacagtggtacacactgaatgataccaccaatacccatactatattgaatgtagcatcaccttgcattgtgtagctgtatagaatgtatcagcatcactcatacttgtaatcat

SEQ ID NO: 41351 - DNA, 490 bp, Zea mays
  Clone ID: MRT4577_137714C.1
cacggacgaccgttttttttttctatggtcttcttgtgtgccaacaccgagacactaccggtaccgaatcctgctggcgctcaaaactgttacccttaattgagtcagcttaatagctagagggaataatggtcctccctgcaacctgagggaaggtgataggcgttaacaaactgcgacatcgtaggacccgaatagcgttaggagccaaaactgggggggactcttgagtgaactatacatatacacacctggctatgaggtcactgcccttttaatcatattaataaaccttcatgtgcgcaaacaatgcatgatctatgccagacaaaccaagagacgtggaggggcaattagaaaaatggggacccttaaaacttaagctacataaacggaccatatcaaattggcctacgcctatttaaaattcgagaggggaaagtagcggactgaaccagttagagctggtttgtcataaacctgtggggag

SEQ ID NO: 41352 - DNA, 601 bp, Zea mays
  Clone ID: MRT4577_137715C.1
ttattagttttttggcgctggcccttccagaacttgtagcatcctagaagtaggaacttgcaaattgtggccgtgttattttcgttaaattcgctgtaagtttttggaactaagagtattttatctaaccattcggccaaatgctgtatgattgcttgtttgtagcaggactccatatgtgatctgtgataaccgttgctccagtctggaacaagattttcacatagttacatagaacggggagctccacgctgaaggaccaagactcgaacttcaaggcaatgaaccacatacctgtactataaccttaatcaagttaatctctgccgtaacttctgccggtgacagctcttattggcaaccctaaaggtagccaccgactcacagcttgacaagaaaagcccattactgctgatgtgaactgacggcatgaaaggcactggtttggcacctacggcgctgatacgtggaacgagacgctcgggatattgccacacactcgtgcttactgcgctgttacaggccgtggaacgtggggcttccagcggacatgggtagcagggcccccattggagagattctgcctggtacatcggacctg

SEQ ID NO: 41353 - DNA, 636 bp, Zea mays
  Clone ID: MRT4577_137716C.1
caggctcttcttccctgccgcggccctaggtcctgatactgctgagcttgtggctaccaaggcaaagggactacctcgcatcactctctctctcgatagagttgccgcatctgcgctcaaagatgtcattgctgatttctcccttgcgctctatgaatcttacaagaccaggcaggaacatgcatccagagaacaagaacgagtgtcacagctcatggaaaatctagactctgaaagagtatgttatcctaccatcactgcctatattagtacgaatttggtactggtgctctcatttatgctggtgcttgatgaatacagttgggtacacaatgtctaagatagcttactcatttgacatacatatttgcctgtcagaatgtcaatcaatttagcaggctaccctgggtcaccatagaattttaaagcaatttttggcagcctaaaaactagcgcttggctgtttataatgtaatatagattcttattttcagtggttcatacttttcgtgaaatccttttgagtcatgaaattaagatccaacacgttggttttcatgtgttagcctagcgctataacatactccctccatttttatttatttgacgccgcttagtgcaattttatactacaca

SEQ ID NO: 41354 - DNA, 134 bp, Zea mays
  Clone ID: MRT4577_137717C.1
gggggtgcaaaccagagtccttttattaaccctccaccaattcgaaaaaaataacaccggcgcagggtatcttaaaaaaattatacctgggggggctattcatgcttccaataacaggaaaaaccagggcgccg

SEQ ID NO: 41355 - DNA, 175 bp, Zea mays
  Clone ID: MRT4577_137718C.1
ggaacttcgatatcgaggatctcaaggctcaagcatcattgattcatgatgacgagccaccagaaataaaagaagatgatgacattccaagaaacattgaggatttatcttcacggaaccatttggcaaagtcatctgcaaatgaatgcaactccagccagcgagcttttgccac

SEQ ID NO: 41356 - DNA, 779 bp, Zea mays
  Clone ID: MRT4577_137719C.1
aacgaagcaaaccagctcggaaacagagcagagagagagagagagaaaccagcagcgaatcccacacaggatccgccttcccttccttttcctacccccgatcgaaacagagagctagctagagagatagatattcccgcgaatcttctgctccgattccaagcccgtcccggtctcggtcccgtcccacgccccctccctccgccttcaatccttcttcatcggtaccagagcacccctgcggcggcggcagttcgagtcgaatcgctcctcctccttcgtcttcgtcaggcatgtgcgtggagggattcgaggacgcgcagatcgagaggccggcagatttcgcgatggagagagtctgtgagaacacagtgtccattgatttcaagcaagccaagatggtgactgcgatgggagaaagttggcacaattttgttccagctatccgctcaggggattggtctgacattggtggccgtgattacatggaagatccgcatgtgtgcatccccaacctagccaagaattttggttacaacatggtgggatgatgaagttatttccttctatggggtatttgatggacatggtggaaaagatgccgcacagtatgttcgcgacaacttgccgcgggtcatcgtggaagatgctgcttttcctcttgagcttgagaaggcagtcaggaggtcgtttatgcaaactgacagtcagtttgcagagaagtgctctctccaggatgggccttcttctggaacaactgcacttacagcaatgaattt

SEQ ID NO: 41357 - DNA, 619 bp, Zea mays
  Clone ID: MRT4577_13771C.1
gctcctcagccccagcccaggccttcgctctcgctgccctgagccctccgcgttccccgcccgccacgcgatgccggcgtgggccgaagcggcgctcgtgctcgcctcaccatcccccgccaccgcctcctcgaccacgtcatcatgtggcgccaggccgcgcgccgccgtggggtccgtcaggctcttctgcaagggattcccttgtagcattcgttccaaagctggattccagattcataattaccgtacaaggatgtttaagattaaagcaaaagcagaatctggtgatggctacacacggcttgctccacttagatttgaatctccaagtggccagcttctgattcaaatactacaatcacaccctcatcttatccctgcaacagttgatcagcaacttgaaaatcttcaatcagagaaatctgcccaaagtgaagaagcctcaaaagttccccaggacctcctctacaaggggtggccctgtacgtgacatatccgcattgcctaatcaagaagacaaattgcgaaacatacactccgcagacgcctttgagatgatacaaaaccatctcaatcttatcatggggagaaaagatagcatcaccgcccgatactg

SEQ ID NO: 41358 - DNA, 2119 bp, Zea mays
  unsure (1)..(2119): unsure at all n locations
  Clone ID: MRT4577_137720C.1
actgtctaaaacatttttttctttgcttgaagcaagcaccttcccctttctctgcctccctctcccctccatatatacgccattgtgtcgctccgctagtctcgcgcgacgcccatgggggaggaggggtggcctgatctaatgtaggggcaggaggaagcccttccactgttccatctctttcccggagtaggtggtgggcacgacgaaggcccctcgcccccaccagattcgtgcaactcggcgcctcatccgatcggcaccggccgcccaacgcgctacagacgcgctgccgcgtcgggactctggaggacacggcggcggcttggtggattgtgggagggagggccttctcttggatttctgttgtcgaggacagggtcttgtattagctagctattcactggatgttggcgatggggacagaagagtgggagctctatccttgttcctacagtggctcacaggtgatagagtacaggccggtctctgaagacgaagacgaagacggcgacgacgaccagaacggggccgacgtggcagtgtcgctggacgccgttctcccagacgatctcctggagaaggttctttccttgttgcccgttgcgagcgtcataaggtccgggtccgtttgcagaaggtggcatgagattgtgcatgcgcagaggcacgcgtggagcaagacggtgcccgagaagccatggtacttcatgttcacctgcagccaggatgcggtttcagggttcgcctacgacccgagcctccgcaagtggtatgggttcgatttcccttgcatcgagaggagcaactgggccacgtcctcgtcggctgggctggtgtgcctgatggacagcgacaacaggcgcagcgtcctggtgtgcaaccccatcactaaggactggaagaggcttcctgatgctcctgctgctgggggcaggacagctgattacagtggcctcgccttctccgtggacagaagcactcatcgctacaccgtggccgttgcaaggagcagccaggttccatccgagtattaccagtgggagttcagcatccacttgtacgactcggtgtctggcacctgggcgactcccttcacgggggtgttgcttgggtggagaggcggcgacgagtgcgtcatctgcgacggagtcctctactacctggtgtactccacgggggttgtgatgaacgatagcgagcatcgccattgccttgtgatgtacgacctcgatgcaaggcatagtagtagcagtagcagccacacttctctgctgagcatggctatcccggcgccgtgcgcccttacgtgcggccggctgatgaacctgagcgagaggctcgtgctggttggcggcatcggcaagcaagataggcctggggtcatcaagggaatcggcatctgggagctccgtcgcaaggagtggcacgaggtcgcccggatgccccacaggtacttccaagggttcggcgagttcgacgacgttttcgcaagctgcggggcgcgtgatcttatctacatccagagctatgggtcgccggcgctcctcaccttcgagatgaaccacaggtcgtggaggtggtccgcgaagagccctgtttccaagaggttcccgctgcagctgttcactgggttctctttcgagcccaggctggacattgctctctagtttcttgcctcgtgtctacctcccaccagaatcttcgcgttgcattttgtatggttttgtggagcggccaaagcccaggaaggtggtgctgctgctgccgttgaagccatttgagcacagaaaatgccccttctttttatactgtagctctattcttttctttgttgggtctattgggcagcagggtatatgcattggaattatcagttaaacttcgccgatcatttttgttgacctggacactggagggaccgagggagagacgatgatgtgagagcaacttgcctaagaactattcctgttccattgctatgaaggagagtagtccaccattgccatggctttcttggagccttttttgtaaagagcggagcctgttactctgcttgtgatcacatattcatctctcttcatatgtccccccatggaagtcaaatctttctancgct

SEQ ID NO: 41359 - DNA, 396 bp, Zea mays
  Clone ID: MRT4577_137721C.1
gttccagagagaagagagaagagaaagaaaccagcagcaaatcccacatccgcctccgccttcccttccttttcctgcccccgatcgaaacagagagctagctagagatattcccgcgaatcttctgctccgattccaagcccgtcccggtctcggtcgcgccccactcctccttcaatccttcttcaccggaacctgcggcggcagttcgagtcgaatcgctcctcctccttcgtcgtcgtcttggcgaggcagagcaacagaggccgggaggaagaagaagtcgtcggcggcggcgaaccggacatgtgcgtggagggattcgaggacgcgcagatcgagaggccggcggatttcgcgatggagagagtctgtgaaaacacagtggtcattgat

SEQ ID NO: 41360 - DNA, 810 bp, Zea mays
  unsure (1)..(810): unsure at all n locations
  Clone ID: MRT4577_137722C.1
gtctccgtaaacagagaagacagaagagagaagagaaagaaaccagcagcaaatcccacatccgcctccgccttcccttccttttcctacccccgatcgaaacagagagctagcttagagagatattcccgcgaatcttctgctccgattccaagcccgtcccggtctcggtcgcgtcccactcccccttcaatccttcaatccttcttcaccggaacctgcggcggcagttcgagtccaatcgtgaggcagagtaacagggcgaacgcgggagccagagcgagaggtcgggaagaagaagaactcaccggcggcggcgaaccggacatgtgcgtggagggattcgaggacgcgcagatcgagaggccggcagatttcgcgatggagagagtctgtgaaaacacagtgtccattgatttcaagcaaaccaagatggtggctgggattggagagagctggcacaattttgtcccagctatccgatcaggggactggtctgacattggtggccgtgattacatggaagatgcgcatgtctgcatccccaacctagccaagaactttgggtacaacatggtggatgatgaagttatttccttctatggggtgtttgatggacatggtggaaaagatgccgcgcagtatgttcgcgacaacttgccgcgngtaatcgtggaagatgctgctttttctcttgagcttgagaggcagtcaggaagtcgtttgtgcaactgacagtcagtttgcagagaagtgctctgtccagnatgggctttcttctggaacactgcacttacagcaaatgatttt

SEQ ID NO: 41361 - DNA, 587 bp, Zea mays
  Clone ID: MRT4577_137723C.1
ccggccgggaatgtcgtcctctcctcccccggcgccgttggcgccgtttacatctctgcgtcatccagggcgccaccgtcgatcgagcggtgccgcgtgtacacacgtatgaacgccagggcaaggcgagagagctagcacgccggcgcgcgcgcgcgatcgatggagcccatgacgtacgatacggtccggcactgccagtgccaccgctttccttctcgtcttacagccccggcgctccgccgggattcatgcacgccgcgctttccgcgcagtcgccgtcgctctcgaccgcgcgcgcctagcctagccccggccggtcgccatcccatgcacggcttttggttcgcggttagatgctgcatgcgaccgtcgctgttgcgtgaaagggccacagggacagccggttcctcctgctaggcgtgtctggtgaatttcttcttcactttgattgacgacgcgggtgcgcgcgctttatttattgactaggtatatgcccgtgcgttgccacgggagacatagatatggaatgacaaacataattataatacataaaatccgcgaaaaaaaaaaaaaaaaaagcggcc

SEQ ID NO: 41362 - DNA, 457 bp, Zea mays
  Clone ID: MRT4577_137724C.1
attcttcacccaaatggtatcatgtgttttttagacgtaacaactcacaagggcgggacattatcgggtatcgctacctaatgcccaacgatttcagatcagcgattacatccacagcaataaaggcgagaaaaacactcacaaggcctttcctttccggccattgctacccccagctgaggctccgccgcctactgcctccaacaggtaggacaccatcgaaaccacccccccgccgaatatgccgaaagccagcatgacctggatgtattgtgaagcccattgcgaggaccaactgcgtgctgcgagtcagcgaaccatcaggaagcacaacgcgattctctttgcctttatacagctccactatctgaacgggagaaaccactacttgccaaacaaagtacacagactctccccttggagatcgcattactcccgaaaagataagctttttctc

SEQ ID NO: 41363 - DNA, 619 bp, Zea mays
  Clone ID: MRT4577_137725C.1
aattcggcacgaggctctcctgccgctcctcccctctcatgcctcctcccctcgccgccgccgccgccgccgccgccgccgccgccgttgagagaactaggaccacgggcgggtggagcactggcatcctgcggactcgccgccgctccacgggcgcaggcgctagccgtcgcggggtcgctctgtgagccctggtcggtgctggggggttcggcggcggtctggtagacgggcggtggcgggcgatggcgccggcgaagaggaagcgcgcatcggctgcggcggccgcggcggcggctgccgcggccaagtggaaggtaggggacctcgtgctcgctaagatgaagggcttcccggcctggccggctatgattagtgaaccagaacagtggaagatgccttctactaaaaagaaaccgctggtctatttctatggtactaaacagattgctttctgcaattatgctgatctcgaggcattcaccgaagagaaaaaaagatctctacttgctaagcgacatggtaaaggggctgattttttaagagcagttgatgagatacttgaagtttatgattctctaaaggaggaaggtagtaacaaggatgacttggctgctga

SEQ ID NO: 41364 - DNA, 363 bp, Zea mays
  Clone ID: MRT4577_137726C.1
ctgcgatccatgctgcaacccaaacaagcccgtgacgacacgtacaccaagtcgaggagctcgagagggcaccaataatggtcggcgtgaactccagcgtcgtcgaggtcaagacctgctagccagtgccgcacgacggcgccgactcatatcctgatagagagtgagcatgtgtctgatccctagaggcatgtggaagatctcctctgcaaggagcagaggaaaactatatccttctacgacatgcttgacaagggccagatcgtcgatcgtcgaggagaagatcccacgcgtcacctaagaaatttttttttacaggttgttcagaaaagtcactctagtttagcccgacctacacaatgc

SEQ ID NO: 41365 - DNA, 109 bp, Zea mays
  Clone ID: MRT4577_137727C.1
ccctcctaatgtacataatatagacttattttaggggggaattttaaaatgcctaccgcatattactcccaacaatccgaacattctatatgataagaaccataaactt

SEQ ID NO: 41366 - DNA, 273 bp, Zea mays
  Clone ID: MRT4577_137728C.1
cgtacacccatcgtaccctttatcatgcccgaagctgtaagagactatgtgagcacgactcacagaaattgaggcctgtgtgattctttctaaggaaaagggtgttgacacgtttcaccttccacattcttccacttgagccctgaagaaaaacctcctatttgtattgagttccacagctattccacactataaggagaaaagaagaaacctacgtacctatcgatctggtcttgaaatgataagggagaagaggggacctttgaaatataa

SEQ ID NO: 41367 - DNA, 293 bp, Zea mays
  Clone ID: MRT4577_137729C.1
acccacgcgtccgcccggcgttctttccaaatattcttcttttttaaacctactacaagcaagctgtgcttatcgaacatttcacaaatatacacaccaccagccaactcatcacctcacccagactcaacatctcttacgctcaccccgcgtaaaagacttacacaaaattagagcacccccagacgctaatgctgaacgaatggcacaccggttacaacatctcaacagaatccgaccctttcttctcaatcgcaaactcttcttctccggcactttaaacacaacaactt

SEQ ID NO: 41368 - DNA, 1599 bp, Zea mays
  Clone ID: MRT4577_13772C.1
attgggaccctcgaggccggccgggatgggtacctcgtggccgggccgggaggacccaatcagccgacggaatctcacctgctctgctcctcagccccagcccaggccttcgctctcgctgccctgagccctccgcgttccccgcccgccacgcgatgccggcgtgggccgaagcggcgctcgtgctcgcctcaccatcccccgccaccgcctcctcgaccacgtcatcatgtggcgccaggccgcgcgccgccgtggggtccgtcaggctcttctgcaagggattcccttgtagcattcgttccaaagctggattccagattcataattaccgtacaaggatgtttaagattaaagcaaaagcagaatctggtgatggctacacacggcttgctccacttagatttgaatctccaagtggccagcttctgattcaaatactacaatcacaccctcatcttatccctgcaacagttgatcagcaacttgaaaatcttcaatcagagaaatctgcccaaagtgaagaagcctcaaaagttccccaggacctcctctacaagagaattgcagaagtcaaagagaaggaaaggcaaaatgccttagaagagattatctactgttgggttacatataggttcatggaaaatgacatatatatgacacctgcattatcaccagggggtggccctgtacgtgacatatccgcattgcctaatcaagaagacaaattgcgaaacatacactccgcagacgcctttgagatgatacaaaaccatctcaatcttatcatgggagaaaagatagcatcaccgcccgatactgttgttgagatcagcaacttgaatcttggaaagctgtatgcagcatccatcatgtatggttactttctgaagagagtggatgagcgattccaacttgagaaaactatgaagactctcccaccaaagcccaaccagcagatagtatttgaaaacctacagcctaatccattctgggatatggagtccttagtacagattacacctgatggggaggagataagtttggacgatgaaaaatcaaatccaaacaagttgaggtcttatgtctcacaactggatgctgacacattgcaaagatatgctactatcagatcgaaggaagccgtctcactgatcgagaagcaaactcaggcgttgtttggacggccagacatcaaagtattggacgatggttcggtcaatgcaaaggatggcagaatgataacaatcacatttacagagctcaatcatctggtcttggaggcagttgctttcggttccttcctttgggaagctgagagttacgtagaatcaaaataccattttgtcaacagttgaatgtgccttttcttatttgaattttggaaatggtttgtgtacatgtgatagggtaggatccatatctgatctattttttcagtgtattcatggttcttgctcgctatcagtaacagccaaagcatcaccacccatgaaccatgcctgtaacaggtttgagatttttcatcaaaggaagcgggcctgatccatagtgtaatctaacaggcaagtggaaattaacaaacagttgatgttttcc

SEQ ID NO: 41369 - DNA, 282 bp, Zea mays
  unsure (1)..(282): unsure at all n locations
  Clone ID: MRT4577_137730C.1
ccacacgtacggacgtctcatgcactgcggcacccaccgcgtgctggaaataattatttattttttgtgaaccaagcggctcgacnncactacgcccaacagatctacacccgcacgagcggataactaactcccaatgctgcaagaacccgcggcccacaagagctgccacttcagatcacaaacctcatgccgtccgcttcaccctaatgaaggcaacaccaccctgtaagttaccttatactcaccaacaacattggctcgaactacaatcaccaacac

SEQ ID NO: 41370 - DNA, 395 bp, Zea mays
  unsure (1)..(395): unsure at all n locations
  Clone ID: MRT4577_137731C.1
ggccggggcaaccccagnncagngggacacacccgcngagnnnaagacacaaaaaaaggggaggagaggaaaccaacaagganngccccaggaacggcgagcgaaccgggagcagcccagcnagagaaacgggcggcccaccacgcccaaaagcacccagaagaggcgnccncacccacgacaccggcaccaaaggcgcnggaaagggacaccggggggggngagagcccacaggcggccccaacccaagcccaccacgaggcgcacgcaaagcacccgggagccagcaacagccgccaaacccaggacagcagcgaccccccaagccaaaagacggcacaaaacacgagggcaaaccaaccccaacagcgaaaagaagacaaaccaagcgccac

SEQ ID NO: 41371 - DNA, 354 bp, Zea mays
  Clone ID: MRT4577_137732C.1
aaaagatgtcaatttagatgaacttccatatgatccggccgataggaggagaatcacagatgatcctgggcttaagctgcaagatcagattagaagaaggtacttggttaaaggtcctcacagaccacaacctagttttaagtatccacaaaaaaatcatagtgggcaagccacgtcgatttaacccagcatggtttgatgagtacagttggattgaatatagtgagaaggtggatagagctttttgtctttactgctacttgtttagagattgtattgaaggtcaggccggaaatgatgcttttgtaacaaaaggtttctcttcctggaacaagaaagatagattagatgttc

SEQ ID NO: 41372 - DNA, 343 bp, Zea mays
  Clone ID: MRT4577_137733C.1
ttacaatacatcgtacgatggaaggttcaacgcatagttcacgcaatttatgatgtccacgggatgttgagtgtcgtcgcagttggtttggcaactgagatgtctgtccaaggaaaggtctggaacaatgttgtgtatgtggataagcttgtgtagcagttcagataactgccaatcgagcagcatacaatacctgacgttggatttcagcaacatccttacgtgtatcgtcacaagggcgcaattgtagttcgatgatctccacacatatactacaaggacttacagttgatatctgacagttcggaggcctcaagtatgtaagatcttgcaatgtgatatt

SEQ ID NO: 41373 - DNA, 893 bp, Zea mays
  Clone ID: MRT4577_137734C.1
cccagcgtccgcccagcgtccgcggccgcgtgggtttgcatgttttgatgagagttcatttgcagtaagctatatatcattggataattaatcatttggttggatcatcagttcctatgggcattttcttcattttttctattctttaatttattaactaatgtatagcttttccaacttaactacttaatttggatagatgaagcatgttgtttaacatgaattatggtagccagaaccgtatctatatactattggtaataacaatttgttgttgcatatgtatcttttgaatgttttattccttttgtttcaactttcaatgagaaaatttaacaaccttagttatatgaggctatgcatggacctcttattgtcttacatatgtgcatgaaacacaacaactacttgcttcatatatactatagtctacatgtcacacacaagtatgcatgtatatatagtatatggcacacacaatttacacatttccacaaggtgacatatgtgtagaaagaggatccacatgttatatgattcatcagatattattaaaagtatagaatataatattggaaattaactaaaagaatggactactagttaggaaagtcgcaagttgagtagcgatggggcacatgtcttggcttcccaagaaaatacaatacactggcaactgtcatggccatgagatgcttcgttggattccaactcctactaggccttgcattcatgtttccatccttgtatatagtatgaaaaggcaataaaggcacacatcttttactttgtagctatgtcattgctatatcattgtacatacaacacctacaacctgatgtaaaagtgacacacacacacacaaatgcaaatcaatcttgagctgcattgtc

SEQ ID NO: 41374 - DNA, 259 bp, Zea mays
  unsure (1)..(259): unsure at all n locations
  Clone ID: MRT4577_137735C.1
caattattaaccttcgagcatgctgcatgcaccgcaaaaaaaaaagggggggggggggggggggaggggnnnaannnnnntnaanggtccaaaaatcaattcatatttttcgctgtctggttctaccattttttttttgttccaaaagcatcaaaaaaagcatcacaggtggtattgttcataataataaggcgcctttttccttggacggggccgggtacttaacggcgttcttgactatcttcctgagggcggggac

SEQ ID NO: 41375 - DNA, 292 bp, Zea mays
  Clone ID: MRT4577_137736C.1
gagctattatccggcggccggcctttcttttttttggggtgtgtgtgagcaaaagaatgattatgcatgcatgaagcatgcaatcatctgcaaggttgctagtgggcatatgcaggaaaaaaacaaggaggaaaagtggctacttagaaggtcttggatgcctggtccctgacaccgaacttccagtcagaggggagaacgtgccatgaggtggacttgcgggggtcgttggtcattacccgggacgtctgcgactcccaggtgaggtcctacccggcctgccacacttgcc

SEQ ID NO: 41376 - DNA, 1212 bp, Zea mays
  Clone ID: MRT4577_137737C.1
gccgccgtgctctcgtcctctgccgaggagagccccgtcaagccgctccgcctgtgggtcgtcgggtacgccgcccagtgcctggtccacgtggggctcgtctgcgccgacacccgcggcgagacgcggggcgcccggagatcggcgtatgactgtgcgtcctagatgcgctgggacagacagctctgacgccgacagcgaagatgacgaaaggggtctagggaggagcagctatacaggtcgtggcgagtcgatgaacacgttgatatcatttctgtaggatgctattggttgttactgtctatcatcatacggagatggagctgagttagctgctctcccttgcagacatcacttccactggagtcgtattaccacatggtgttttgctgtgttttgtgttgctgtggcctgtttgcttgggattgcactgtgttgctgcttgccttgtgtcattgctattctgtatgctctggctggccaggagggtgcatcagatgcagatattagtgttcttctgagatatagatattctgatccaagcgaagatggtgagaagggggtcgatgaaggactgatgatccctatcctgaataatagtggaatgtcaacaagtgagcgtattctccttcgcgaggatgctgaatgctgtatctgtctatcatcatatgaagatggagctgagttatctgctctcccctgcaatcatcacttccactggccttgtattaccaaatggctgcgcatgaatgcgacgtgtccactctgcaagtataacattctcaaaggcagtgacagtgcatgaccaacttattctgacataacttccgtacacagcttcctttcaagtggcgttctcaaagcaatgctgttttcacagctgtgttattaagtgacagtgatctgtgtttttctgtttaggatgtggtgataacctgtagatggatgaaaccttatttacaattgtccttgttaatatcgcttgtaaatacctttcgagttgttttctacgtatgatggaattggaattgctgaaaaactttgtgattctggtttgactttatgcaaaaaaaaaagcaaaatttttaagtgacagtgatgtgtgttctgctgtttaggatgtggtgagtggtgacaacctgtaaatggatgaaacctaactcagtcaccctaatatcgtttgtaaatatctttggagttgttttcaaaaaa

SEQ ID NO: 41377 - DNA, 426 bp, Zea mays
  Clone ID: MRT4577_137738C.1
tcacaaccccctttttttttttttttcctctttaataataacccacccgaccagcaccaaaaaagaccgttttattcataacattccccgaaaccaaacccttgcggggaaaaaaaaatccaacgatacacacacacaccactttgaatcactcgaactcctcaaaccgaagaaaaacacaacactaacacacttcacacaactacctttctattaaaaaaacaaatgggcaacaacaaaaaccacacgaacgaagataaaccccctagactaaggaaaacaacaccatgttcgaacaaaaaaacattgccccaacatgccccaccaatcaatgccgacagttacagttccaattccccaatccccctccacacaattcaccgccaaaaccaccgccaccaacacctaaaactgcttcaaccacca

SEQ ID NO: 41378 - DNA, 470 bp, Zea mays
  Clone ID: MRT4577_137739C.1
cccgggcttgcatggtttttcgtcgtgctcacccgtagcgccgctcctccggctgctcctcctgctagatcacctgccgccgctcgcctttatacactcctctatagccgtcttgctccacaatatagcatgcagggctcaagataaacatagcacaaggggtggctgttgcactcaccacctcgaaaccggcccaaactccattgggggtatctatacgactcgcatttttcattccagcggggcctgcatgcacacccgggcctatatccgattgggggtgcgcccgcaggtacgaggcctgcacaggggcggaagaggtgtggacggacagggtggctaagaggcgcaagtctgagatgagcaagcacatggtccataggcttctgaagcgacttgtcctacggcatgggggctctcttctctgcgttagacaccttgtcgttgccttgcgtggcgttgatttctct

SEQ ID NO: 41379 - DNA, 377 bp, Zea mays
  unsure (1)..(377): unsure at all n locations
  Clone ID: MRT4577_13773C.1
ataaccttttncgggtaggtgtacaaggtattttttcgggctcaccncnccccccactcctatacactttgttccaaaggccaaaccgaaaaccctcccttttgccccctttatatatcaccccgacgggcccttaacaaacaccgacaaaaacaacccccctcccaaaacctacttggaggccacccaaaacccccctcttttccattaccccgggaaaccccctttaaaaacatccgaaagaaaaccgccccccccattttaaaattaaatactaaggccccccccattttcaagggcatcccccccttcaaaaagcgagaaaaaccccccccgggcccgctcccctttttttttctgccaaaacctaaaccccc

SEQ ID NO: 41380 - DNA, 1383 bp, Zea mays
  Clone ID: MRT4577_137740C.1
aattcaaccaaactttgttaacctcgtatctttaatactgcaaaatctagccggcaaaaaaaaacactgtccttctcaatagataaactaatgaccaaacgatcacaatgccggcaaatattttagcatcccacttactgcatgaagaacgggattacaaaattccccatcttctccttcctctcgagctcatccttctcagccatctgtttcagcgttgtccaacccttccttgcccgcttccttgagctgccagaaacctgagaagaatctcttgctgcatatttcacattatttctagagccattcgaggcagacttgctggagcctgagagggcgtcaatggctgagccagaaatcatgccacttcctgtcttgagtagtcctgctgaatcttttgcaacagtcaccaccggtggtttcattttctgaggcgtgacaaatgatgaaccaggtgcaagttctgcttgcaaagtagcttcacatatcctaaccttctcaggaaaaatatggctagtttcacgcatctgttcatcaagattacaatttaacctttcgccatgctcgtcactttcagtagtcgactgcctcaacagagatgacgattccacttgcaaaattgctgcttgagaaagctcaagcacttctttcttatcatgtgctcttgtgttgctaccgtttcctctcacaattatatgggatgagttcatggtagcatgccctcttgacagtaacaggctctgaacaacacccttcccactacccaatattaggttctgatctccacagaaatggcatgcataggaaacactgttctgacaacagtttgatttcttccgacgttttgctttatttctcttgttccttatgcggacagtgcagttgaagcctggctttaagattgtctcacacctctggcaaaggaaagtggcggcgttgaggggtactccggcggcctcggcgctcgcggcgaggcggcgccccagcagcgcgccgatcgggcgcaccccggcctccgggcccgcccacgccgctagcctctgcaaatgcttgaccctcagcagggaggcatcgtctacgcgcgtcctcccggaggtctcctcgcggagcgacacggcctgattcatggacctggccggcgtcgaggtgccatcggtgctgcgaatcttctttcccatgccgccgctggtgcaggacctgtgggtactctgtcagcaagaacggttgctagccctagcttgcgcgtctccggcggcggggatttttttacaagacggcaggatgggctttgctcatggcaagggtgatcaaagttgacccactggtccgctcggctgaacgtggtggcgtgttccgaccaccgatacagcctcgtgccgaatt

SEQ ID NO: 41381 - DNA, 388 bp, Zea mays
  Clone ID: MRT4577_137741C.1
tccggggtggaccaagccttccgtaaccaaacttggggaataatgtattttatgatgggccacaaattgccattgtgcgggcggttctgaaaacaagattgatgtctctccgcgcacttcaatgaacagctgattcttaactaaaataccgtccatcaatgatagctccagtatgtgaaaacccaactcttcaaccctataggctccaacaagcaatcgcagcaagcatcatacctttatcaccctcgtttcaacaatctccagccctatctctggtgcagtcattggtacaaactactgcggcacatcatctgcagcaactcgtgctacctgtgatcaaccaagtagctctggcaaaccgttctacctactctcagcaacagcaatt

SEQ ID NO: 41382 - DNA, 370 bp, Zea mays
  Clone ID: MRT4577_137742C.1
attcggctcgggggctaacccttttttcactggagagtgcggacatgcactgcttctacctggatgacacgacacatgcacatgctcattaatatgtctatcgctccagtgcaccaatcactagagacacacatggcctgtggtcattgaattgcacaatggacaggagggtggatcatgggcatctgatcctaagggcataaactcctgactggtatctggtaactcgtcactgatcactacgcaggactgcgggagttagggtggctcgctgataccacaccaactaagaggtcagttcatcaatcactgtagacacggaaacattgtacgtatacacgagcttcacttgcatgagcatatatcactg

SEQ ID NO: 41383 - DNA, 294 bp, Zea mays
  Clone ID: MRT4577_137743C.1
cgttcctcttttttctatattgagatcccactacactctcgctaacccacgcctattgcggcaccccgacacgaagggctacactaaaaccagcccacacaaaacacaacaccggcgcacggcccaaccagccagacccaccaaaccagaggcccaacacaaaaaaacagagccccgcacacacgggacagacccaggggggaaaccccccaggaaaaacccctaaaaaaatctcccaaacacagggcccagcccccatccccccacgagccccgcggagcaaccccttacacc

SEQ ID NO: 41384 - DNA, 278 bp, Zea mays
  Clone ID: MRT4577_137744C.1
ccttggaccgacagttccctcgtatagggggctgtagaattcccatcgctgcctttcacaggctaagacaaatcaatctacttgacctataatttaaatcgagctattaagctttcaaatggaggagactaggacatttagaaaaggctgacttatccatcatcagactcacgaaatagaggctatgccaaccttgtcaggagagggttatgaagtcatgctagaagatgctgggggattttatgataacatggcagatgcacctgcaggagtgaatg

SEQ ID NO: 41385 - DNA, 605 bp, Zea mays
  Clone ID: MRT4577_137745C.1
gccacccagcggctctggacactgctattagaccaaacgtgacggctccgggctccaggaactgcgccagtgcctgtgctgaacgaactgcctacaattcaggggtgctgtcggacaattgcgacgctcctcctgcggctgctaaataggggagcagatcggatgcccacgacgagaacgacaacaaatatctcagaggaatgctgcccgagagatgaccgtagacagcataaagaccaacgacatggacacgactgtagaggaatctgaaacaataagatacgactataggaaagcactacttgcgactaacgcatgtgctaggtaagctgaagccgacaaggatctgtgttctctgcagacaatttgaaacaaaaaagaataatgatgaactgtacattaagctggggtctgacaacgataagaagaaggaaaatgctgtacttcatgatgcggcacacaaaccactgagcaacaaagagctcctgcaacctgatgaacgagaaaggacctacggttgtcgtgcgtctaccaaggggccaaggccatacgcctggtcttagaggcggatacggcagacgatacagtgctccaccatctgctgc

SEQ ID NO: 41386 - DNA, 363 bp, Zea mays
  Clone ID: MRT4577_137746C.1
aaccgaataaaattatttttctagtataagactaagatgatccttgtacatattttggtccgtgggggaattttctccggatgtctgttgtagggaggggaggcagagaaaggttgatttgtatgtggtttcagatgataagaaccccagtggggaggtagaatggaaggccagctaaacacaaaaggatcaaaggagacatggtatgcgaccagaccatgcatgaggtgtctagatgtacatagcgactgtgtagtgcacctgtgtgttgtgtgtgtgtggaggtataacctgcaaaggcgaccattgtttgcgatacaagacctggtaaataaagattaccttggattttttttttatttg

SEQ ID NO: 41387 - DNA, 208 bp, Zea mays
  Clone ID: MRT4577_137747C.1
atgcagagcaccatggtttcctacatactaggcctgccatcgatcaaatgtgcaccacattccacgcacaagtgctttgagtgagaataataacattgcaatgcactgtccgcaacgcagtgtgcgacgtgtgtatgtacttaaaggacctcctgcctaacctggctggcatggacactgttgaatccgagctaaccccacctatcca

SEQ ID NO: 41388 - DNA, 415 bp, Zea mays
  Clone ID: MRT4577_137748C.1
ggggccaaaaaaacccccttaaaaaaaaaaaatttcacaattctttctccggggttgtggggtcaccctatttttcagggccaaaaaacaaaagtttgttctcaaaaaccaaaaaaaacctaaaacccttaaaaggaaggcctttcactggacaaacaggttccaaaaactttaaacactttcgtatcaaaaattcaaggccccaaccctggaaaggggggggcgaacacaaaaccaggaacgggtggtcccccccgtttaacccccaaacaaaaacccagaagcttgctcctcattccccttgaaaaacttgagcccttgggtcaccccccccctttgaaaacccagccccacaaacttcgggacttttgcttaaaaaactcccccctgcggacccctgggtccaccccggaat

SEQ ID NO: 41389 - DNA, 126 bp, Zea mays
  Clone ID: MRT4577_137749C.1
tccttctataatggatagtgtcaagaaactgtggttgttgcaccctacggagggacccggccgtgaagaaaagaagtaaccagaggggtcaagctaaagttggagggaccatcttgtgaagaaaga

SEQ ID NO: 41390 - DNA, 344 bp, Zea mays
  Clone ID: MRT4577_13774C.1
tacacgcatgggcggacgcctgggcacagaggccctcggtggaggacgtgctgaggaacctgcagttcgccgcccatgtgcatgacgactggcaagcacatgcctggagcccggatgaacgaaccccagtgccctgaggaccaatacccaccagcccgtctcgtgtacacttgaacatataaaggatcaggcgctgaaccaatctccagcaaagcggaagatgatctatccatgagctaccggtgacaaggatctaaagatgggaaatgctggtctggctactgtacaccatgtagctctgatgggatgctgacacccacttcaggatcagcttactgaaatct

SEQ ID NO: 41391 - DNA, 203 bp, Zea mays
  Clone ID: MRT4577_137750C.1
tcggtgatatcttctgtgtgtgtgtgtgtgtgtttgtgtgcatggctccagtcccggaggcaggcccgataggtcttcctataaggtgatccactgccaaatacacatcgaaacgtacatgtcggtcacagggaaacacattgcgaacctctacccgggcatttaatgggtcccgtacaaagtcccgttgtacgccatgaaga

SEQ ID NO: 41392 - DNA, 138 bp, Zea mays
  Clone ID: MRT4577_137751C.1
cccacgcgtccgcacactcgtacgcggacgagtagtcagacgcgtagttctccgtcctgttcgggtccaagaatacgcggtggtcgaacctagagaacgtgctgctttggggatctgtgcggtagatagatgactact

SEQ ID NO: 41393 - DNA, 192 bp, Zea mays
  Clone ID: MRT4577_137752C.1
ctaggaggaagtcgaatgccaaaaatccggacaaagcaaattgaatactgggactacacacccctctttcatccattgcaagccactccatagaggatagcagtggaaaaaagcttcgaatatacaaactgtggactacatacgaacggaagaatgcgaaccacccgggccgtcccaagcaacaagcacatg

SEQ ID NO: 41394 - DNA, 323 bp, Zea mays
  Clone ID: MRT4577_137753C.1
ctcccggcttcgcctcgtggtactcgccgtagtgggcgcatacctacgggatggcgacgcgcggccgtgccacaccttcttctttgccttacgcgccgtccccaaccccaccagatgcgatgattttgtaccccagcaccttggcgcccgtcatgattgttacaacatgaccgtcttccgttgtccgacgtctcgttccgtacttccttcacggacaccgaaaccatcaccaccgccactgcatcctgggcaacgcacggacccaccgtcccattcttacaaactccgtcggggtaccctaggtgagcgtcagtgacatctct

SEQ ID NO: 41395 - DNA, 174 bp, Zea mays
  Clone ID: MRT4577_137754C.1
atccagcagccgctctccccagccccactctctccatctagagcttcctaaactgcaccgggccgcaaaacaacggaccccgaacccttggccaccatgggcaacggtctaaggaggccccgggcgccgggctttttttttttggcggtcttccttcgtggcgcgccggggccc

SEQ ID NO: 41396 - DNA, 457 bp, Zea mays
  Clone ID: MRT4577_137755C.1
gattcaacaatatgcgatagacattctgcctgctaccaacaccatcctaccaccccaccgtgactagggcttcctgctccagatggccgccgctccggaagacggcgagcgcagagaccgggtggccatcgactacttctgaagcgacaagaaagcgctggactgcgccatcgagaacctgctccaccacggggacaccctcgccgtcatgcacggcctgcaccagcacgaggtggacaccaagcacacgatctgggtcaagaccgaatacccgctgatcccactcgtccgagtatcccggagaccaaggagatgctgtgttactgagggccatccgtactcctgggttctcgacacaagcaacacggctagatgctcgatgtcgatgacaggcggtgttcgaagctgcactgtgaagactccagtgacaagctgtgcgatgcagaccaggatctcg

SEQ ID NO: 41397 - DNA, 1622 bp, Zea mays
  Clone ID: MRT4577_137756C.1
tacaagaagctgggacagtcgaaagtcagtgatccatcggaatgtggcagcactactgctgctacagcagaaagtgagtcacacaggaaatggagagaaatgaagcggaatggctttctttcttcgtctcatggaaatgcagtggtgcctaggccacgtggtcggcccccgaaaaggaaaaaagatgatgaattcaaaaggagcacttccacacagcatggccaggctaacaagtctgttaaggttgctgctcctagtggcctattatctgggctaaaccctggaatcattaaccatgtgagaaatagcaagcaagtttactccataataaaggctatggtacactctgagaggcttgagaatgagaagcagcctgcatttactagtcaaacaggtggaagagggagagaagccagtgagggaattcaggatgagaaatatggtgctggtttcaagaagtgccatatgttgatgaaagacaataatgcggtgtttcaccaagcactgcctaccacatcacagttccttgcacaggacggcgataggctcaaactgcaactctcatcagcagtcactatgtcttcagacagggcctgcagtacatcagctgatgatccaacaactaatcatgattacatgactgtactgtcagtaaaagcggccactgttgcttctcagtggttggaattactgcatcaggacatcaggggacgcctcgctgctttaaagcgcagcaggaagagagtcagaaatgctcttcatacagaattgccttacctaatctcgacagaattttcatctaaccaagagaacgaatcatccattgcaaatacgtgtgatgctggatgtactgaaaaagcagtttcagaagcgcatgtggcacgatggaggtctctgtttgtccagatggaccgagcacttcaggaggaagggaaacagctggagaaccggttgaagcaagtgcaagaaatgcaatcgaattgtgataaaggcctcaaacacatgagctgtgaagctcctctgctaggacctattcctgagctatggaagctgaagaacccagatatttctgagagtgagtgggcggtgcaagctgccgccgcatcaatctactcgacctgcaacatggccatgagaacggagaacgtgccttgcttctgacctcacacttgtagttgtagtttagtttcttgcttttgctgatttttacctcaaaagttaggcctcttttattaccttcagtctttgtgaattgtgaccccttgtccatacactagcggcgagtcatgtaacgaggaagaaacttgatgtatgttgtcaccgtcctacgatttcaagggcccgtgaaaaaacacattctttttatataaaaaaaaaaaaaaaaaaaaaaaaaaaaaaaaaaaaaaaaaaaaaaaaaaaaaaaaaaaaaaaaagggcccccgaggcccccgagaccacgaaacttgtgcccttcggaataggggaaataacagcgcgagacgaaaacaaaaggtgatatcggttcacatgtgaaaacgtcttcccctcccaaaattccaccccaaacatctcgggaagaataaagggtgaagtccgcggggtcaatggagagggctcaaccg

SEQ ID NO: 41398 - DNA, 303 bp, Zea mays
  Clone ID: MRT4577_137757C.1
gcgtactgaatcgtaggaattcggctctagcggtcaccaacctctggaggtgtagcagagcattggtgtgagtgggatgtacagtcttgggtgagtctttgtagcactaggagttcgtatctggcaacaataatcagagaatgtacacacaattgctgtgactaaaatggttagtcgacgagcagtgtggattcggtgctattttacttatactgctttctattgtaggtaaagtcgtgccattcattgcttctattcctgatgttatggttgctgctctgctttgcttcatgtgggctatgc

SEQ ID NO: 41399 - DNA, 630 bp, Zea mays
  Clone ID: MRT4577_137758C.1
ggtacccggggccctccctcgagttttttttttttttttttttttttttttttttttttttttttttttttttttttttttttttttttttttttggttttttttatcaacaaacgacccctcattttataaaaaaacaatacgggccaaacagatcagctcccgaaatcgacaagttccaaggccttttaaaacgggaagggcgaaagggggtcccgttttccaaccccaatatgccgggggggttgggaagccaagccagaaacgaccggggaccttacatgaaatccaaataaaaccgggtgggggggtttctccttatttttttacgaaacacgaagtacgtttctactacaggtcacacagttacgtcagttaacggggtggtcgactaataatgctcccccgggtgaggctggtttaacaaaaaggccccttccaggcttttagggaccccgggtttgaacttttcccccttggggcctcttttcaggttcatcaaaagggcaaattttgcaaaggtttccacaacctgggcatgggcccaaaggatctcgaaaagttcgtagggaaacagggagggggaccccttttggatcgattcacaggagggggggcagaatttttgac

SEQ ID NO: 41400 - DNA, 555 bp, Zea mays
  Clone ID: MRT4577_137759C.1
ggattgaaattattaattacagatcagttgtagcttcagaaaagctcagattcattctgcaagcagaaatgcagaatgacccgtatctcgcatcactatcttattacacactttcgcaaacaagctccatacaaaaccaagccccacgccaatctgggcttacaaacacaattttggcaagaccgttttctcaacataaaccatacataaccgaagccggacgtatagcactgcatcaaaaagaatgataaatgcggccttaaaatcagggaagtgtcagcatgacgtccttctaggcagcagcgacaatgatcctgatttgagggtgaatgggtgatgagtgccccctgtaccgatccacttcaacgtaaatctgtcattttgtacaggacggttctgcgatcatagcttggctaacaccgcaaatgataaggtggcacaggctgtactgctgttgccaccaatctctggcacactgtgtactttactatcatttgttgtgtcttctgtgggatgatataaagagacgacgaatgctgctgtctgttcaatggt

SEQ ID NO: 41401 - DNA, 282 bp, Zea mays
  unsure (1)..(282): unsure at all n locations
  Clone ID: MRT4577_13775C.1
gccggagcttatgataagaacaactatcgggttacctgcccgtatcaccaccggtgtctctgctcaacctccttgtcggtcgtctctctcgctcaacgtgatcgaggcaccagaaggtcattttttgtgattgccatggagccgacgaggtttctgcgcgaccggcgggaccaacgcggangaagagcagagcgacagccagctcgagcatgagcaggaggtcccctgcgtgcccgacatcttcgtgcaaaatgtgcccgtgtcccgccgctcttctcccgc

SEQ ID NO: 41402 - DNA, 412 bp, Zea mays
  unsure (1)..(412): unsure at all n locations
  Clone ID: MRT4577_137760C.1
ggccgcaaattttttttttttttttttggaaaaaagataaatcacttcatttctcaaaccaaacacaccataaaagattcaagggcgtccgcacacatctcgtagtactactcatcacaagcaaagcaatggatatacatcggtcgacgtacgcacgcacacagccggcttacgtacatacgtacgcgggcgggtcccacgtacgggccgtatatccatccagcgacggtagaccgtgtggcgcagggccgcccccgcccggcacgtgcccgagtacgaaagtacgtacgtgcgagagtgtacgccggcggcgaggctcggcgaggtagcatatcgcggtcgcggtnggggagcgcggcccccgacagctggtcggtggcngggccgtccgcgccgtgtgcggccgcgcccc

SEQ ID NO: 41403 - DNA, 178 bp, Zea mays
  Clone ID: MRT4577_137761C.1
actaggagacgcttttcactagcgtggtgaagccatcagcaggcagcacaccacacgacgaaccgactcctcctacgagccacaggacaagaccgcgagacgaataccacgaatgcaagcagaagacactgggaccaccccaaaccaggaaggcaaggaggtggcgacaaaacacaag

SEQ ID NO: 41404 - DNA, 419 bp, Zea mays
  unsure (1)..(419): unsure at all n locations
  Clone ID: MRT4577_137762C.1
actcctataggggattgggatcctcgaggccggccggggtgctttcttacaggtgggttggattctgctgccccttcggctcgggttcatgaggatctccggcgttcgcgttttcgggagggcgtatcgagatggctgcgttggatgctgagtaccgttgtttcgtagggggcctttgctgggacaagtacgaccactccttccactagggcttcagcacctgacggagaggcactggagtctaagagcatacctctatccgggagacccatgaggactacgcggttatcgtgcttcggcaccttactcnacggcaagatgacgcatgggtacctccatcggacggcatcgaacgtgcacaggagatggacggtacgccacatacgccgattagccagggccagtcaccgtcggaggac

SEQ ID NO: 41405 - DNA, 271 bp, Zea mays
  Clone ID: MRT4577_137763C.1
gcaaacaggatcagaggaagttgttcgtcgcagtcttcttgacgccgctgccagcagatccgctgaacagccgtcttttcggtcaaggacttcagtggcagttgcattgaccacagtaccttctgtgactacgagactcaggtcatgcagcctcactccatggagacctgagagcacgccgtgatctgcatcgccggtgctgagtccagcgactacactcttcccgacatcaaggacgcgaaagtgcaaggacttttacagtaccttcact

SEQ ID NO: 41406 - DNA, 284 bp, Zea mays
  unsure (1)..(284): unsure at all n locations
  Clone ID: MRT4577_137764C.1
gagcatagtattgattgaggtttcttccaggcaaacagctgcttcagctcgttcatcttcagatctttttgttttttgtatttctgtttgtaaatagaaaaattaccatgttaagtacaagcagtggtagtaacaataagaagagtaaaaaagagagacgtttctcccagcaaacactttacgaacaattcatcgcagatgcatcgtctccanaacccaaacccaaagcctcaaacccgccgaaaagatcattgagtaattccgcaccgccgacatatgaagcc

SEQ ID NO: 41407 - DNA, 327 bp, Zea mays
  Clone ID: MRT4577_137765C.1
gttataggcttggaatcgccgacgtactcggattcgctcgagtgggagaggcagaagcaactcgccgcgctgccaggtgatgaagccgatgcgctcgcccatgagccaggctgtgggctcagccacgtcgacgccggggccggtgaggtgatgacggcggcggcaaaggccaaatcacactggtatgtttgctcctctccgctcggtagtcaaatccagagaaatggcagcggtggtgctccatccggcgatcctccggtgcatctgcctcttcccctccctatcgctcaccctcgccgccgctggggcaggggcgtcccaccattc

SEQ ID NO: 41408 - DNA, 1113 bp, Zea mays
  Clone ID: MRT4577_137766C.1
tccactccgcccgcgattccccttcccgtacccgcagcccccgccgtcgtcgctggcgggcagccgaggacagccaccgcgcccccacgcgttcccctcctccccctattcctccgcccgcgattcccctccccgcgccctcgccgccgtcctcacggccagccgaggatagccgtcgcgcccgcaaatcacgcgaccatgccctttcatgcccgcaaatcacgtcgcctccttccatccatggcagtcgcgctccctctacgcccttccatccatggccgcggatccctgcgcgccacgattcttcccatacgctccctctgcgcccttccatccatggccgcgaatccttgatgttgagatccgggagctgaagcgggagatctcgcgggtgcggctaacagagctggagcgggagcaggggctgatgaagcagcaggggaggatgcgcggcggggacggcggcggcgggtggggcggcggcgagcacggccgtgccttcctcgcttcgctgtcgaggggcatcgacagcatcaccatgttcggcgggcctgcagcggctgacagacggcgcaagaagagcggtggccggagctcccagtgctccgacggcaagacccgcaggcggcagaaggcgtccttcgcctatgactgaagcttcgctgctggcatcgacagtggaggcgcggcaggcggtgatcgtggatggatgcggtctgactctcagcgtctggaggatcggtcggagctaagcagggacgctggctgctgagtgctgacagctgagtgggtgacgatgatcaggactgcggttttagctgttggtgatggcagtccgtcgctcaagctttctatttagagttctggagactactactatgttggtgttttctatttagagttttggagactactactatttagagtttttctaagttttggagactactactatgtgaagatataacagggaggaattgcttgcagtttatagcaggaaatgctacaggctagcgagagattatttaacatgcaggaacgacgcaggatcagtaaagtagtgtagcaaactgttttagcctgaactctgaatgcctgctttcactggattgc

SEQ ID NO: 41409 - DNA, 163 bp, Zea mays
  Clone ID: MRT4577_137767C.1
gtttcacgttggaccaccagtgcactgggcacgccatagtcccaaacttaaagctgaacctcatcctgtataagtgcctcacgaccctgcagagaaccatgagcaggaacaggaatctgtaacacaggacaaaagtattcacgaatcaactgctgctgccata

SEQ ID NO: 41410 - DNA, 484 bp, Zea mays
  Clone ID: MRT4577_137768C.1
cgttgctgtcgccacagtgaagcagcaacactcaatgttggagtgatcctcaacttgcagtcattggtgggtaagatggcacgaaccagtattttgatggccatggaagatttctatgcagttcacaggaactatacgacaaagctggtccttcacatcagagattccagtgcagacagtgtccaagctgctttcacccctaatcctaataaactaggaaaaggagaagcaacatccattcaccagcttttaaagataccatccacagatttatgtttattataaatcactcaaatttgaatccttttttggatgattattgaggatcttagaatgctagccattttaacttttagaagaattaacacattccttaatcaatctgtatattgctgaaattaaattaattgttgattaggcattccccaagagatcccctatgatcaatgacttctccaggagaatcctcagcataacagaagga

SEQ ID NO: 41411 - DNA, 335 bp, Zea mays
  Clone ID: MRT4577_137769C.1
aatactcaccccaccaatcccacatttcttatcatgttcaacaatacatatattcatcattaccattcatgaaaaccacccataaaccataccatcatacactctttctgcaatgtaccaacagtgcacagcactatcatttccattatcctgattattgcaacaaatcattagagcaagtttctcaatgaaaattgaaattaaaggaccttaaactgacactccctacgaaaaaatccttcatgggagaggaacacaaactgcaaaaagaataattccccaatcttttcactaccccttaaggtccgattcaccagatataatctcatttaact

SEQ ID NO: 41412 - DNA, 377 bp, Zea mays
  unsure (1)..(377): unsure at all n locations
  Clone ID: MRT4577_13776C.1
gtctcctttcacgatgaccagcttctctggagcacgtgcgtggccttatatcaagtcatgaaacctgttctccgtgactgcatcgagctctaccacccctctcgcctccctccaccctcaggagggtcgccacactcttggaccgttcgtgttctgcagtgtcgagattgtctccataacgcttgaggccttgtcgtctccaccacccatgtccgtcatcagcatgctcactactgtcgaccctagcacccctctcgatggctctgtgggggtgccttcccttgctctcttctcgtatcccatgtcttcgcagcccagtcctcctaccgactntgttgttgactccgacgtctcgtaccacaccactcctaacccta

SEQ ID NO: 41413 - DNA, 226 bp, Zea mays
  Clone ID: MRT4577_137770C.1
ctagcaaactaaaaaaaaggtatggattttgaccatttctttattatattgacaacacccttttcttggcaaaactacctttctaacaattttacatctttgtagcttataccaaaaaaagaaacaatccatggagggcacaagtttacattgattttcaaacaataaaatattggaaccttttttatacattcatgcttttaagtaccgtttgacttggaagttt

SEQ ID NO: 41414 - DNA, 740 bp, Zea mays
  Clone ID: MRT4577_137771C.1
gaaccctctaatcccttccccatgctgcactggttctgcggccgaatcgcttaatcgcttattggtctctgtggaatcagcggcgatgcggtggaagcttaactcctccgtctacaagcgcgtgccgtccagggaaaccgccatggaacccgacgtcgagacgccaatgagaatgacggacggcggcggcagcggcgcggggccgtcgtggcgcatgtcgttgccgcatgtctgtgtcgccacgctcacctcgttcctctttggataccactccggggtggtgaacgagcccttggaggtcatctccgctgaccttggcttcgccggcaacactcttgctgaagggctcgtggtgagtatctgtttgggaggagcttttgttgggtgcctcttcagcggctccatcgcggatggtattgggcgacgccgtgcgttccagctcagtgcgctgcctatgattattggtgctgccataaggtgacattatgtgttacttgatttgtctttcgctttcactagattctgtcactggttggtttactgttttatttaattgccacttgctaacattcattattctttggttgggtcagcagaagttgtttaattttttttgtcaaacaattatgtactactccatggaccttggggtataccacctggtgattggcttgctggtgaattggtctcttggactggtgttagtcatgctgtttcaattgctgaatagttcaatatgg

SEQ ID NO: 41415 - DNA, 757 bp, Zea mays
  unsure (1)..(757): unsure at all n locations
  Clone ID: MRT4577_137772C.1
ggttatgcagttcctcaaaggttcctggaagctgcaacaatggagctaaagtcactcgccaatccattcccgtgggcttccccgtctccaatatgccggcgtccaccggacccgaagaagaagatccggccggcgcgccgcagcagggctccgtatctgaaggcgacctgcgcgctctccaggcggagggcggtctcagacatggcggttgtcggcgccctggccctctccacgcccacgccggcgcgagcagagcagcctgacgtcaccaggtaccggaagctggggagtggagtcatactcgaagatgtcgtcgagggggaggggcccgaggcgcgggagggcgacctggtgcagttcaactacgtgtgccgccgcgcgaacggctacttcgtgcacagcacggtggaccagttcagcggcgagagcaggccggtgacgctcgcgctcggcggtgaagagatgatccgaggcctgagagacgtcctgattgggatgaagtccggaggcaagaggagggctctgatccctcctgaagcaggctacgtcagcgagacactgaagcccataccggaggagtttggaccgaggcgaagcctgctgtcccacgccaaggagccgctggtgttcgaggttcagttgctcaaggtcctgtgatgctgcgttcatggtgccatcgtcgtggcgacttcgntgtgaacttaaatggtcttcccttgaaaacgaatggcgtgaaaaaaaaaaaaaaaaagcccct

SEQ ID NO: 41416 - DNA, 427 bp, Zea mays
  Clone ID: MRT4577_137773C.1
tttatttttttttttttttttgttttttttttttttgggggttttttttttttgggggagttgacacaaaagcgctagagacctaacctaagacaagatagtcttttacagaacaagtgaaatttgctaatgggtgggggagggggacttctaaatcaaaaaggctgaaaacaatttcttcaccaaactccttgttggccttttcctttttttactagacggccggggcaccataaggcggagaaccaccaagaggggcggaaacagcaactggagctgcttcggcaccagatccaagggagaggatgaggtcctcaaaatttcgctttttaaggagcttggcaaatagggcccgccattaggactcgaccttgaggttggccggctttaagaacggggcgatcttttcgggggggatggaaaagcc

SEQ ID NO: 41417 - DNA, 1237 bp, Zea mays
  Clone ID: MRT4577_137774C.1
aatatagaaataacattgttttgagatataagctgcataaaggagctaatcctagaacattcctaattcaatcatatggtgtcctaggatccaaacctacaactgtgagaaactgagaataaagatgtgacttctggtacaagtatcagactgacccaatagcggaggctcccatatataagtaaggtttgggaaagggataaagcaaagcaagcccgcccccctcgaatgcggagaggctgcttcaaacatgggacctagggactcagggagacaactctcaccactaaaccagccctgatctttgacttctggtataagcattattttgtctagtttgcagggctgctacttcacttctcagatggcttcacatttgaagatgagacactgactttttcaattctttaattctctttagctactgagctgaaacaaacagcaactttccactgaatttaaattgtagttgcatgtgcaatgagctgatctgagtttcaacaaaatagatgcaccgactttagcttgtctcctgatcatttaataaacactctcctcactccaattatatggtctacatggtgtctgacggtcggccaatcaaagatgcaaactgatcatggaatttcagtaaaggacacttataaataaggtcactgttttcataagcctccttaaggaagactgtgcttcttgctctcttgttagtgatgtaaaagatgccatgatttttcactaaacaaagaagtaacttgcatggaagcctgtactcgttgtgaaatatgtctagcttatcagatgtcaatcgtctctccattgtaaggctcaaaatctcatgcagaacagcaatggcacgctttcgagactgtggtgttgcagactcgactcgtctagcattcaaataaggcgaaggaaatgccatcttctgccacctgacaacctcctcaaggtacttccggtttggcctaaatcctgttggatacttcaacttgaaagcaaaaggacccaagacatttccatctttaggaatccctctacagcctatctggaaaccctcaaaattcattttttcttctcgtattgtgactgctagtgaagagtcccaattctccagacacaaatggtccagtcccttcacatcacggattgaaaaaaaatcagggtaccttggaatcatgttgctcttgaagttgttaggtaagcccagttcagactggattagttcaatcttatccag

SEQ ID NO: 41418 - DNA, 252 bp, Zea mays
  Clone ID: MRT4577_137775C.1
gaagaacccgatcgacaccatgagggtgccgctcggtgcacctgctctaacagctctcgctgccatcgcacaccttcacacatacagaacgctgctgtgtatgtcaaccaccaacagctactaatataccgccaactgggcatgagccaccatgcgttcacactgcaactacagtgcatatcataccatctgtacacctggcgacacatggccacctgccagagacagcacatgtgcgcggcgactgtacat

SEQ ID NO: 41419 - DNA, 445 bp, Zea mays
  Clone ID: MRT4577_137776C.1
ggtggggtttttttttttttttttttttttttttttttttttttttttttttttttttttttttttttttttttttttttttttttaaaagggaaatggccccgaggaaacgcttctgggtggaaaaagcccggaagaattacagccaaaagggggggcccaggacccccaattcagggggaaaacagaaccggacgaaaagacccggggggttctggtttcgggggcctaacttccccggtctggcccgggaaggagggccccccatcatggggggggggcccgggggcatctaaaactatcagttcaaggggagccgaggccacgggcgggggttattgggggccggggagggggttgacccaagcgttgcggagctggagcccaacgggggccccaaaacacttggcccgcgcgagggaaaagggcgtgcaaaacccggccg

SEQ ID NO: 41420 - DNA, 255 bp, Zea mays
  Clone ID: MRT4577_137777C.1
ccaaacccaaccatggccgcggtcgtgtggtatttctcgaccgttgcggctatcaatggagaaacagctgatgagccaaatgctgaactggtgatatcatatgagaccggcaacttttagtattgtaagactggaacttgagttctccaaaagcaatgaactacatatggtgcatgtcttacgagtttcagcacttatgttaagagtggtgtttccgcccatgaatcagataccttaaaacaaggctttaatatc

SEQ ID NO: 41421 - DNA, 165 bp, Zea mays
  Clone ID: MRT4577_137778C.1
cctacacctacatccctacctatcctcttttttttccactgctcatattcctatgtgcccggcattattcaacaatactacaattcccttcaagaatgtgcatcctataaaaaatattactgttacctgttaaaccccccccctctttgccttgtcatttccaca

SEQ ID NO: 41422 - DNA, 107 bp, Zea mays
  Clone ID: MRT4577_137779C.1
ggtaccctccgctttccggtccggttgctcgcatcatagcgcgcgtccccagcctgacccaaggttcgccttcctatgctccgaggtacacaactctcgaactgttc

SEQ ID NO: 41423 - DNA, 589 bp, Zea mays
  Clone ID: MRT4577_13777C.1
gaagaacgtttatattttcatttatctgtgttgctctggttcaaaaatttacatctacaataagaacaagctggtattcaactcaattaggaagacattaaaggaaagctctgagattgtatcttgtattttttcatggaaaagaaaaatttcaacttctaaaaagaataaataaatcgagagaaaatattacggattttttttattcgtttgtcaattcagaaatgacaagaggcgtaaacagtgcgggaacatcgcggtacgatgatgatcttgaaaatcaatggggttttttttcatggtgcgagtatatatttacggtgattatttcttctgtgctcctcattggtgcttcggtattgacactgttctgggtcatatactaccgtgatggctttgcatggtcagaaaatccaaaaattcaattcaatcttcatcctgtaatgatggtcattggttttattactttatcaggattttcaattttactttatcgtttgtgccgatgcttgaaacacatttatgcaaaattggcacattctctgttccatacattagcaattccatgtattgcaatcggatttttggc

SEQ ID NO: 41424 - DNA, 296 bp, Zea mays
  Clone ID: MRT4577_137780C.1
ctggaaatgtttcacacaaaagcaagagcaagcgaagcgacgaggcagagcgcaggcaaagcacagggggagggctaagccgaacgggggaaagggtccggggggggggggggggctgacggagtaaggaaactgggggggttggggggacacgcgcaatctggccaccagagcacgcaggggcgaaacaacaagcagacgcggggttcgctcccaccaggaacgccggaccggacaccaacagcgggtagggatcgcacgcccccacgggaacgcccacccccccgcggacaccg

SEQ ID NO: 41425 - DNA, 376 bp, Zea mays
  Clone ID: MRT4577_137781C.1
ggacctttgggctgatttatgtgcttggttaatttcaaggcataccacgagattatcggtttagagactcgggaggacctaaaggggaaggcggacacatctaccggcggaaccggaataggtgggataacactcggcgtcggttgcccttctaaggagaaaaacctcggaaccaaggccaccggcaccgagttcctcgaaagcaatacatctcttggcggaaaattcggcttatacaagacctagggaaccggcgtaggacccgccttaaggaatccggacagtgacacctccgacgaagcaaccgagacactaagcgacgaagtcgccgagatagtaaaataaccggtcgcctaggaaagaccatcggccggaa

SEQ ID NO: 41426 - DNA, 349 bp, Zea mays
  Clone ID: MRT4577_137782C.1
aatcagtggacggtagaactcgtcgcgccgtctccgcccccgaccccggctccgcctccggcgtatagttcctctctcctcgtcatctcaccgcccggcccacagaaatctgccccgtgctttgccaccggtgactgcagtctgcagaagcagttagtcatggtggagcacccgttaattcctcctacctctagacttctagtctcctctctctctctctctctcctgcgccgactcatcttcaccctcgtctcacctccctgctgctgctgacgctgctgacgtaaagattatatcgttcaaaaggtgttttacgcgattgatgcttactacctcactactgactttt

SEQ ID NO: 41427 - DNA, 3110 bp, Zea mays
  Clone ID: MRT4577_137783C.1
agatggaaagagaacgccttgttatacgacagtagtaacgcattaaactagccagaatggccgcatttagacaggaaaacaaaaaatttagtacatcaaaaaataagaaacataagctgaattccataatgctagtttaaaaaataaaagaaaaaagaaactcaaatgctaactcaattataaaaggatcccaggaacaccaagggccatctcgatgcacaggcatcacttggccaaccacttcgaggcgcaggtcgattttgttttatttcgttatttctggctatggctctcacttggaggtccagggagaacaaaaacaaagccgaaggctctgttcttgattctgcccgactacgcccgcattccgccacacaagactatccctttagaccacccccgtggtcttctccgcgactccgagccttctttacacgcactcttccgcacgcatcagcgagtttgagcgacttttatgcgtcttcaatcccaatcttccccaagtcttcctcactctttcaaaatgccaggctgaaccttgtcaaattctactaccttctctgcccctttctgcaactcttcctgcttccgtgatccgctatcttccccctggctagaatacctttctctctgggtgctcactattatctcacagtgtatggtagttctcagccgtcctagtcaatttgttgttcagattgatctgttccaagagatggccctctgcctcatgcacatgagctacgatattgtccctttgagagcccctccattttttttttcagttcctcgatgctcgctttgatgcttaacagcctctgtgcatcagtagagcctcattcaagtacgttcttgctccacgcctcgtgaggctctgcagctccctttggcacttctagcttattggttccaaggtctcttcccctcgctagctcagacgaagggtgctcactcttcagatcctcgacggcttgtatgtcgtgctcagatgacgaggacttggccgtttggttcttgcagctcctctccgcagcctcccacagctgaagcatatcgtcatcgagttcagcatttgcaccagttccaagcggatagagggcagctcgagcgccatatggtggacaagtggatatttggtccagctcaatatccttcatgatctggacttgcttccctttggagatctcaacatcttgtttctcatgatcagaatatatttcttttccctccatgcgtgagccacctcttgctttaaggtcttgaatttctgcacttactgccgccaatttagctgcagactcagctgactcctgatcttgacgatctttagcatttgatacaactacttgaagtgcttctattcttgcaatcaacccttgtaactctggagttcctttgggtaagcaatgagattccagcccatcattgccctcttgaacatgatgtacacatgcggtttcctctttgtcttctgtactacagggttttgacagagaacggcaatcttcttccaacacactgacatgatcagccaatgatgctacgagagctagatgtgtgttcaactcagcttttagttctgcatgttcgtcctgaatgccagccaactttttctgcaactcctcaatgtgagcatctcgggaagagacctccttcattagcaactcctttagggatattgctctattctctgtagctttaccattcatcataagcttgaatgctgtttcttcatacaccgcagaattcactgaagaggtaattgcatcatccatcagaacaacaaattccctctcacattgctcaacttctgattgcaatgcctcattgtcttggtgaagaagtaaaatttcgacatccttgcaagaacactgttcaatcagtcttgtgattttcttctccagttctccttccaccactttagcaccttcagttgcaacctgtagagatctaacaactccacagagttcctggttcttttcttgcaatagttgaacttcctcctctgcttccattagctcaccatccttctgcgccagctgtgtcatgcaattctcaagtttaacaaccaactcctggcagacactttgattggtgtccaaatcaaactctgaaaggactaatcgagttctgagaatctctaccaagtatatgatgtactcctttaagtgactattttctgattcatgcgccactgaccttctgctcagctcatcaacttgaagatcaagatcgctcttagccaaactcaacaaagccatctcattggtaagagaagccaatgcagatgcaatctcattattatgtcccctaaagaacaggcacaggttctcgagcatcatgcattcttcaagaacagtatcattctcatcttccaaggaattgtacttctcactcaaggactggtattccttagacaaggactcatttttttcggtcaggttgaaaattacatcttgtgatgtctggtaggactctctcaagcaagatagtttctcttgtgtgatgaatacttcagttttcagcacctcctccctttcactgctttcctgtaatccattccttagttgttcattctgttccaacatctgttggtttttgttttgcaaacaaagcaactctgtttctccactctccacttctttctcaatggcacacttctgtaagtgcagatctctgagctccatccctaattgcaacaaaactactgagagaactgagaactcagtgttcatgagcctattcacatcttcagtttcatccttaagtctcagagtgttaatggtttcatctaaaacagtctgcaacagaacttcgtcctcagctaaatcagcaggtgctagatctttgcagatattcagaaccttcatttgctttgaaatcccttgcctcagtttttcattgtgccttagcaatgtttttctctcctccccatgatatctagcttcccccatcaactgtgaaaccaacatattggctgaatgattttccacagcatacttttggcactcagtgaaaagagcagccttcttgtcttgctcatcgaccaaacagttctccaaaataactgtactaatagaagcatttatgttttcatccagaccatcatc

SEQ ID NO: 41428 - DNA, 830 bp, Zea mays
  Clone ID: MRT4577_137784C.1
gccggccggggctgggacgtcacgcaccacgtcagaagccccccaacccaccggtctcccactcagaccgtccgacgaacgactcgactgtcgactcctgcacaggcaacacctcacctcgatgatgcatccgctccgccgcatcctcgtgctcttcctcgtcggcctcctccccgcggccgcgtggtccttggcaccaccccgcttcccgaggccccaaccccgctcgcggccgggagctaatggggtgggagactacgagtacgagacgcgatacttccggcagcggctggaccacttcagctttccaggggtcggggacgaggacgaggacgaggcggcggcgttcttccagcagcggtacctggtgggccgcggcggtgggtgggctggacccggcggccccatcttcttctactgcggcaacgagggcgacatcgcctggttcgccgccaactccggcctcgtctgggaggccgccccacgcttcgccgccctcgtcgtcttcgccgagcatcgctactacggagagtccatgcctttcggtagcaaagccaaggcgtacagcgactccaagtccctggcgtatctcacggccgagcaggcgcttgctgactttgctgtgctgctcactgacctcaagaggaacctatcggcagagggcagccccgttgtgctctttgggggctcatacggtggaatgctagctgcttggatgagactcaaatatccccatattgctattggggctctcgcatcatcagctccgatcctgcagtttgaggacattgttccttctactatattctatgatctcgtgtctgatgatt

SEQ ID NO: 41429 - DNA, 318 bp, Zea mays
  Clone ID: MRT4577_137785C.1
ctcctagtcggggcgcccttttttttttttttttttttttttttttttttttttttttttggctcggttgggtatagccttaagccttatattccccacccaaaaaacgaattgtctcgaatttgctcatgccttactggtgtgcattaaccatctgaagaaaatccttaaactggttaaagcaggttgtctttttttcaagagcccgtgaagatagttgatttcatcagaaaaaaaaggcccaattttttccccccaaatatttttccaagaatcatgatttcccagatcacatccttgaaatatgggaaatattat

SEQ ID NO: 41430 - DNA, 522 bp, Zea mays
  Clone ID: MRT4577_137786C.1
aattcagcatctcctacatacgcgtctacatactcgcgtacctccgccgatcatacctctccacctactcccaattccttccgccgcacgccgctccacccgtacgactacaccatagaaggagcgccttgctagacacatagctcagctccgaataccgccccggagaagcatgctgggagctgaactgccttgatgatgtccttcgagttgcacctctgatgcctgtagacaagaccattggggaaggccatgatgcttcaaacgccttctttggtgacactgctgctgggaagaacgtgcatcgtgctgttccttgttgagctcgaacacaatgtcgtcgatcacgcgcaaactgtgacctagcgccagctcttccaccctgaggatgtcgtcactgctactgacgatgactagaacaactgtgtccgtgataactacacctttgctgactatagtgttcaacttgcccttgctcgtgtcaggaagcttgccggcaactgtactggtctacaacgtttc

SEQ ID NO: 41431 - DNA, 611 bp, Zea mays
  Clone ID: MRT4577_137787C.1
ttaattcgtctcctgtggcttttgacttgagctgacacatgaaccttatagacatgctatgatattgctataattttgctacgctggttctgttgtgcaaatgcctgccgagttattttattattttggttgaacataatttgttggagagttgaatgactttgtctaattgattgttttttcctccagaatatcactaaggtcctggaaaattttggtagtaacatcatattcttcaacggacttcttgacccacgggtagtggcggaggtgtcctgaagaatatatctgagagtgtcgttgctattgtggctccattaggagcacatcacatcgatctgcgcccggcaactcgagatgacccggattggctggtggccctgagagaatcagagctggagatcatatctggctggctatgggattactacggggctggaggagcactcttccagcctgtagctgtcaagggctcctcttcatactgaggaaccgccgttaatgctgctgcagtgctgcgtcatggagaaggaagatcttcatgttgatgatcgggcactgaattcgctcctgcatcatgtgccatatcagtagcatttggtctgtgtatc

SEQ ID NO: 41432 - DNA, 1975 bp, Zea mays
  Clone ID: MRT4577_137788C.1
tttcgatgatgcatccgctccgccgcatgcgcgtgctcttcctcgtcgggctgtccccgcggccgcgtggtccttggcaccaccccgcttcccgaggccccaaccccgctcgcggccgggagctaatggggtgggagactacgagtacgagacgcgatacttccggcagcggctggaccacttcagttttccaggggtcggggacgaggacgaggaggacgcggcggcgttcttccagcagcggtacctggtgggccgcggcggtgggtgggctggacccggcggggccatcttcttctactgcggcaacgagggcgacatcgcctggttcgccgccaactccggcctcgtctgggaggccgcgccacggttcgccgccctcgtcgtcttcgccgaggcaatcgttcttccgcggcctcactcgtctcgtagtccatcgctactacggagagtccatgcctttcggtagcaaagccaaggcgtacagcgactccaagtccctggcgtatctcacggccgagcaggcgcttgctgactttgctgtgctgctcactgacctcaagaggaacctatcggcagagggcagccccgttgtgctctttgggggctcatacggtggaatgctagctgcttggatgagactcaaatatccccatattgctattggggctctcgcatcatcagctccgatcctgcagtttgaggacattgttccttctactatattctatgatctcgtatctgatgattttaggagggaaagtttaagttgttttcttacaataaaagactcctggaaagaattagatgaccaagcaaacgagcaagatggtcttctgaaactaagtaaaacgttccacctttgccagaccctgaaaacaagtggagacctttcagattggttgagctcagcgtacagttatctggccatggtggattacccacttccatcagaatttctcatgcctttgccagccaatcctattaaagaagtatgcagaaatatcgacagtcaacctaagggtactggtactctggaacgtatatatgcaggagtaaatgtatactacaattatactggcactgttgactgctttgatctaaatgatgacccccatggaatgggtggatgggactggcaggcttgtaccgagatggtaatgccaatgtcttacagtgaacaaaggagcatgtatccaccttataaatttgactacgcttcctatgctgaggattgcatcaaaagctatggtgtcaggccaaggcctaagtggattacaacaggaatttggtgggcataatatcactaaggtcctggaaaattttggtagtaacatcatattcttcaacggacttcttgacccatggagtggcggaggtgtcctgaagaatatatctgagagtgtcgttgctattgtggctccattaggagcacatcacatcgatctgcgcccggcaactccagatgacccggattggctggtggcccctgagagaatcagagctggagatcatatctggctggctatgggattactacggggctggaggagcactcttccagcctgtagctgtgaagggctcctcttcatactgaggaaccgcaccctggctaataactcaaatgcttggtctcagaaataagagggccctgctgcaagtgccaaccaccgttaatgctgctgcagtgctgcgtcatggagaaggaagatcttcatgttgatgatcgggtccgctcctgcatcatgtgccatatcagtagcatttggtctgtgtatcaaatgggacatgtacttggctgatgaggtgaggaaaacactggataacgtaacgactctttcgcagtggtggtggcggtcagcaggtgctctagaggcttgatatcacgtgcatgtgccgctgtaaataacataatgctctatgtacgtgtacatctctactactcaaaaaaaaaaaaaaaaaactcgagaagggg

SEQ ID NO: 41433 - DNA, 750 bp, Zea mays
  unsure (1)..(750): unsure at all n locations
  Clone ID: MRT4577_137789C.1
cctcgctcgaggccggggccgggaaataactcagctctaccacttcacaacacctcgactctaatacctaatcatctacaatcacctgtttgtctccagcctttcaaacatcaacaccgtcaagatgaggtacaccactgctcttgcctccctcttcgctgccgccatggcagctcctaccgctgttcagcctgttgctaggcaagcagacaccagcgcctacttcaccgtcatctctcagcgcagcgcctctcccatccacttccagaacttgaacgcccgcggcggatccttctaccttggtggaaagggaggaccatcttcctactgcccgtcagaagtcattggtgctgagaactgcccaccaggcaacacgaccacattggctgggggcaacaacactctcagcctcggcgtagctgctcccggtgggcagcaggtatacgtctgccctgacggttccctgagctacaccaccgctcactctgcctacatccccaatggctccaccgtcaccggcttcaggcgcaccccagctaccaacagcgacgagactgggctctcgtgaacgtgccactgcgtgcttccttgcctgccctggctcctaggatgatggatggaaggtctacttgtagctccacaacgttaccttcagcgaccagtgcctctcattcagcgccattgccgctaccgtcgatgcccctgcgctggggncaatactagatgcccttgcccttgcgattcgattca

SEQ ID NO: 41434 - DNA, 311 bp, Zea mays
  Clone ID: MRT4577_13778C.1
ctcgagccgttttcttttttcccgccgggccgccgccatggctccagcgtccaccagatggcgcatgatttgcagagtcagccttctacagagtgcgctgcacggctgcattcctccggtttcgaaatgctctagagagagagagagtcagagagagacgtgagctggttcgtcacaaatcacgacccgtgacgatggcagctgcattgcacactcgaggtgaagaacacgagacgccagtcatcttgagcgattccatgtgcgcttcgattggactcgtctagctagccttgtctctctgtactacgtta

SEQ ID NO: 41435 - DNA, 588 bp, Zea mays
  unsure (1)..(588): unsure at all n locations
  Clone ID: MRT4577_137790C.1
gacgcccgcggatccggtccggaattcccgggtcgacccacgcgtccgctcagccaggatccagccacaggacactcctcctgaagcagaagaggaggtcatcagagctgcaccagctagaggccgagagcaactcaacgaggacgagcctgccgctgggcaggacccatggaagctgttgaaggagcaagaagagcggaagaagtgtgttatctgccaggaccagagcaaaacggtgctgcttctgccctgccggcacctgtgcctgtgccaggcttgcactgagatcctcatgcgccaccctgtttaccatcgcaactgcccgctctgccgccgcagcatcctgcaaaccctcaatgtctacctctgaggactccctccctgcctgcccgtcctctgcgctccacacactgggacagcatgaacactttgcctctgggttctggcctgagtcttctttgcccccgaaggcggcgactctgccaagcctcaagccatatatccaggacgtgtanctcggaatactgcggaagactccagtctgggtgggacagacgaacgctttctctacgccctgcgcgncgccct

SEQ ID NO: 41436 - DNA, 109 bp, Zea mays
  Clone ID: MRT4577_137791C.1
aaaaaaccagtcctttgttcttcttcacccggcacgcccagcgccagtcaccaaccttccaaaaccttccttcggtcgcaatggcgcgcaagaagatccgggagtacga

SEQ ID NO: 41437 - DNA, 398 bp, Zea mays
  Clone ID: MRT4577_137792C.1
tcgactgcacgcgtccgccacgcgttctccacgcgtgaactgacttattcgcgcacccattttcctccatccatagcgtcactgcaaaggggacatttcacacagaatcaagtaccatctatatgcaaaacaaacatacacacctagacaatactttcattacatactcatgacaatctctaaaacaactcaccaacttcttgcacccatatagcatggatctcgcgcaggccataacactcaatcgaagacccctctacgaacgtcggctaccaataactatctccaacccaactttaaccatcaattcatatcccccatatactctaccaaccattacacataatcaatgatcaacatctaattgaacattcatccattctactatccctgcaata

SEQ ID NO: 41438 - DNA, 508 bp, Zea mays
  Clone ID: MRT4577_137793C.1
aaaaaaaaaaaaaaaaaaaaaaaaatttaacatatacccaaaaaaaaactataaaagggaaaaaataaaaaaactataaaaagcctgtttctgaaaaatcaaaaacaaaacaaaaaggggtttccccctcccccggggggctcttttaaagggggaatttccacccccctggcggccgttcttaggggtccccccctgggccccaagttgggggtcctgtgggccttagttgttccctggggaaattttttttccgttccctttcccccccctttttcgacccggaacctttatgttcccccccgggggtgcttatgggggggcccccctcccataattggggttgtccttctcgccctttttcaattcgggaacctttctggcccgcttggtttattgattctgccaccccccgggggggggcgcttatgggtttggggcccttttccctttcctcgttgcttgcccccttgacctcattttttcgcttggggcccgcgttttcccc

SEQ ID NO: 41439 - DNA, 173 bp, Zea mays
  Clone ID: MRT4577_137794C.1
aaaagtcgagaccagaaaaaagaagacagagatattaaataacacagttaacacatgatagcccattttaacagtaataacatattttgcataaattttactctagcctagaggctaatgagtaatgacctcattacatttacaaaagagggagcgtgttctgaatacaaaag

SEQ ID NO: 41440 - DNA, 124 bp, Zea mays
  Clone ID: MRT4577_137795C.1
acgacaaggagccaggcatcaagacttcatgctttcaataatagaatctgttttgagtctcggcaacccgttcaaatagccctggagggacctaatttcaatacacaggggacagaccggtatc

SEQ ID NO: 41441 - DNA, 645 bp, Zea mays
  unsure (1)..(645): unsure at all n locations
  Clone ID: MRT4577_137796C.1
tcgcgatctagaactaggtcaggaataggttacattcttttaattattgttctttatctagagtcattccctgcagaaatacagctgtctaatacagaaactacaaatatcttttttctgttagtacactgtgcattccaaaaagtgcctgcagtgctgaaattatagacagcattgctcagtagaaactattgttctgtaaatttcttactacagccattcatgagagaaattacatacactcacagaaactatgagtattttttttcgttaaaacaatgtacatttgaatataaatttttcttatgacaatttgtagctacaactatttgtgcagaaattactggcactcagtagtcgaattacagccactcattagaggaattacaagtgtttcttctctgctaaaacactgtatatttttgaaattgtatttattcagtataggaatcatgccttgaactattgttctgtaaatttgaaactatagccattcactactgaaattacaagtactttttctgtttgtcagtgcatattgccgaaaagctgatttgttttgtcttctaaactacatcataatatattctacttaacaaaacattgggctgctntgttatgcttttttgatgattggttgcacct

SEQ ID NO: 41442 - DNA, 302 bp, Zea mays
  Clone ID: MRT4577_137797C.1
gtaaactatcatttcactttttaattgtttaattttagaaatttcaaatgttttttgtttattaaaaataataacataatttgtatcctggcacaaacttagagacattatggaatgctatgccaaaaaagacatgacaattggaaacgttaggtttggaaataaaggcaggcgatgagctataatggaaaatgttttgaaagcaaactggtgggaattgagacaacctattaagtcaagcgcattgacattgctgttgactcattcattggcaagaccttttaccaaagcctgtaaaacag

SEQ ID NO: 41443 - DNA, 576 bp, Zea mays
  Clone ID: MRT4577_137798C.1
ctatgaatgaaatgaaactaattatccaacgtaggggatatgaaaagaggaagaagtctagttattagaagaactgccgaagcaaccgtaaatgctgcgcgtataggagccgaataaagaaaggggacttccgtaccgtcctgcgaccatacgtgaggaggaaatcgtgccaattatgcttctgctccaaggactggtaatgaggctcacacagatgggagatcggacttaatacaataattatgaatccgggaattagatattgggaacatattctgtacctacaaactacccgctatccggaaacagcctagaactcctattaacagaccacatgcgcactacacgataagcgacgaaagctctctgacaagcactcgctgcaagtgggcgggtaaaccaaacggctatgactagataggaacacagtccgacaaggtcccaaaaaaaaaaatgtggatcaaattggaactagtaaacagggctaacatggaagtattaagagaacttatataaacaaatgatctgacatatacttcatcgtgagacgtataatcgctgctataaataagaact

SEQ ID NO: 41444 - DNA, 339 bp, Zea mays
  Clone ID: MRT4577_137799C.1
caaaatacgtctgcgaatgcaggagccatgtcctcgcggactcctgcacacacggctacggctattgcgtcaacgacttatgccagcggcacatcctgccgctctgccaagaggtcgactggctcaaacatcacaaccacctcttgaaactaatgtatggacactactacgacatcgtcttgcaagtcgacaagtacccgtacagattacaactgcgtgacctgctgatacaatgacgtgaacaagatgaccatccataccatatgcacaggccgcaccatcgatatgttaaactatggtgcaaaccgagcgtcctgctcagatatcacgtgctacaca

SEQ ID NO: 41445 - DNA, 544 bp, Zea mays
  Clone ID: MRT4577_13779C.1
caagatcgaggtcctctttttgtgctcgactcgaccagaccgtcgccactgttttgccgtttcgatcagacgatgtaaatgcgggttacttcattacgataatcgtactacgatgccacatccccatcggcagcagcagcagcagctggtacgagactgcgtcgccgatcgatgccagtgcgaggccgccgcccgccggcgaaaagaatccaaacgggacgatagcatagcagcacacggtccggcacggcggcacacgcttttgcggctttttttccctgccgcgcatcgcatgaagggaaagttgggagggaaaagcaaggcacaccgaaccgaatcgcgatcgccccgactcggcagtcggcggctcacaccaaccggcaccgccaaacctcgccgacgaatcaaccacccccgcactctctcgactagtcgactcccccccacccccaccatgcgcgatcgatcgagaatgaatggcaatgcaagctgcgcagtgctggacccggtgcaaattaataaaccctagggaacggaacgggac

SEQ ID NO: 41446 - DNA, 814 bp, Zea mays
  Clone ID: MRT4577_1377C.1
accactaccacttacccagataagagtaaggtagcaaggaaaacgtagagcctaatacttgccaagaaaccatggctgccgatgacacaaattcggccagtccccacacctactcagtccctctagcagacaagcttatgtggacatacatcaaagccctcatcatcgtcgctgtgctcgccctgttccttctgcatgtgctgggatccctgcgccgaaggtcgagcaacaaggccctccacgctatcgtgttgggggtctacacgctctcctacaccctggtgagctacaccatcggtctcatgcagagatcggacatgtacgtgagggagttctccgtgtgggccgtgtgcctgctcatgctcctcggcggcaccgacaacctcatggcgtacggcctcaacgacgtcgacaactggaagagcttccacgtgaggcacctcatccagggcgcgttcgtggttttcatagtcgccgtctatgggacggcgtccagggtgcaggggccgctctgggccatcttggcggtcaatgccctccagtcatgcgtgcggatcaagtccatgaagatggcgagcaaatcacacctgctctccaagagcgtgaagccgatcgtagaccacatgcagatgcagcgtgagggccgactgcatgtggcttctggtcaacggacaaaccccgataccatggagggctaccggtatgttgtcgccggcgagcatctctggaagaacatgccggacaaccttcgaaccaatcaaaggacggcaatgttgacggcatcaccacagtggaccaggtgtggcaatgcaag

SEQ ID NO: 41447 - DNA, 733 bp, Zea mays
  Clone ID: MRT4577_137800C.1
gttcttattcaccagtgtctttggttattcttagcaaaagtttctcattggttgttcttgataatatgagtttaatattaaaaaggcgcatatctctactcctatgaagcacacttcatattcagaatcattaatatctgatttggacaaactgctaccttccatcgaaaaaatatggtttctcccatacacaacatgtatacatggaacaataagtatacatgaataccattgatgtatattttctaatattctcactcctcctcaacttgcatgtgccaaatctaattttgtatatccaggaatgtcgatagctgatttggaaaacctgcaaagtctattcacaatagataattgttatgggtgctccatctatcattttcattgatgaaaatgattcaattacacccaagagagaaaagaccaatggagaagtagaatgtcgtattgtttcacagctactgactcttatggatggactcaaatctcgttcccatgttattgttatgggtgctacaagcctacaaaccggccaaacagcatcgatcctgctcttagaagatttggaaggtttgactgggaaattgacattggagttcctgatgaagttggccggcttgaggttctccgtattcacactaagaacatgaagctagcttaagatgtaagggtctgtaatttattcttgatgcattgcactttacactgattagaatatgggttctggtttctc

SEQ ID NO: 41448 - DNA, 366 bp, Zea mays
  Clone ID: MRT4577_137801C.1
aaaatgaattttatttatacaagatagtttcaaccacccaattgttttttttttcatttgctacaaaggaaaaaaggatacatcagaattggtactagaggccaccacgtttatgaagccttggggcgatgcttatccccctaaaaaattctgagtagacagagtatcctggctacgcctcggtggtacctggatgcatgtttaaaaaagccacaaaccatgttgccatgtttggtcggaccttcaggccaagaagatgccatggcacaggttttgccagctgacttaccttattgggcaggggcaccgaaagggtcctcttgttcggaagaatgctgggaaccagcagacgcccctgccgatggc

SEQ ID NO: 41449 - DNA, 289 bp, Zea mays
  Clone ID: MRT4577_137802C.1
gtcccaaccagcaccatgcccatgatattggggtactgtgacatccgcgggctggcccacgccatccgcctgctcctggagtacacagactcaagctatgaggaaaagaagtacacgatgggggacgctcctgattatgacagaagccagtggctgtatgaaaaattcaagctggtgcctggactttcccaatctgccctacttgattgatgaggctcacaagatgaatcagagcatacgacatcttgtggctacattgctcgcaagcacaacctgtgaggggagacag

SEQ ID NO: 41450 - DNA, 342 bp, Zea mays
  Clone ID: MRT4577_137803C.1
aataacaggatcattcatgtattaacatcatggtcaagatttctatatagaataaaaagtggttttcgtttgtttgcaggtcttctccaacgttgcttgggtttagcgctgaactaatgccaaaaggacatgagaaggagagccaggctaagataaagtggtacatgacaatgatggattccatgactgatgaaggtaatttatggtgcaaggacgttcctatatatataaatctacttattctagtagtgtgctacaactttaatcttgatgcttgagttttcatctcagagcttgacaacacaattgctaagttgatgactgaatcacggatcattcaaa

SEQ ID NO: 41451 - DNA, 288 bp, Zea mays
  Clone ID: MRT4577_137804C.1
cgctcactcgctgagctataaggatgtgactgcgagagccagtcacacccgcaccaggagatagggcgctctcttgtgttaccttaaaacacccattaataaccgtacgttgcctagctatgcttgggagtcacacacaaggtccttgaacgatgatgtgagtaagaacattggcaccctcagctcgtgcttgcgctggtgaccatcatggatatggctgaggacgatgaccacaaggtgaactgcggaccctgctctcctgactgcgagcaactgccacgcttaccc

SEQ ID NO: 41452 - DNA, 310 bp, Zea mays
  unsure (1)..(310): unsure at all n locations
  Clone ID: MRT4577_137805C.1
gacagaggncaagngcaaaaaccngcaactacatatcagcggggcagagcaacagacaagcatcngcttgagaactctgggactctctccttacgacacactctaagggaaggttatggggcggatcaacctgttttttagtcattcataattcgtgacactccgaattaacataacaagaacgaaccctaaattccaattttaaaaggggcaacaaccttcctatcataattgcacaatcacaaggaatttgtccataaccataacagagattttgaaagcaaaccctgatatctctggaaacattaca

SEQ ID NO: 41453 - DNA, 639 bp, Zea mays
  unsure (1)..(639): unsure at all n locations
  Clone ID: MRT4577_137806C.1
gtccgcaccgcaaggcctctcgccgtccttggacattctccgtccgtcgcctttgcctggggcagataacaatatctgatatccctgggccttcgccgtccgggcccccctaccttctctcatccgtcctcacacaaagcagaagggggaggagttttaggggaggagggggcggcaggaggagccattattatttcttcttccagcggcaattcctggccaccaccgggcgcgctatattactccgggttcgtggacaagcatgcagaggggcgtgtccttccctggcggaatggcgaaggagtgcccgcccgccgagctctggctcccggacgagttcctggacgacgacttcttctccgaggaggagaaggcggcggtcgcggccaagagcgagagcgacgaggaggaagggatggacggcctctcgcgccgcgcggccgggctcgtcgtcgggggtggaggggacggttcccctgcaaaggcgcaagtgttagccggctcgccgcagtcgattctgtgcggcctgcatgcttccggggaggacagccccaacggcgcggcgtcgcaggtcagctcgccgccgtcgtcgccgctggagaagacgccggccgacccctgngacctgctcaaagagcg

SEQ ID NO: 41454 - DNA, 390 bp, Zea mays
  Clone ID: MRT4577_137807C.1
cggggcggacccacccgtccgccaggggggtccattaacccacctagggttttggggccgccgccgccgccgccgccgagggggaaccattgccgtggacgaggaccttccggatcaagaagaacctggcaaaaaaaatgccccagaaccgcccaatcccttactggatccgattgccccctgccattaccataaggtccaacgccaagcgcaggccctggcgccgaaccaagctcggtttttgagcgtcggaattggccggctgttgcttcggaaggctagggtttaagagctatcttccttttgtttaataaatgggtcagtttttttgtaagctagcaagggttgttttgacccttttattaagattttggtgagcggggatgttaa

SEQ ID NO: 41455 - DNA, 321 bp, Zea mays
  Clone ID: MRT4577_137808C.1
aatatatggaatatttttaagaaacacatcccggtttgagggcacaaatggcgagttccggcgggggcgggccgctccaaaaggggaaaaatttgaataaaaaaaacacaggtggccggaggagcatgcctataaaaggccccaggccccccgtcgggagggggaggacaagtaaaaggccgacgtttaaaaacgggggggccgggaaaaacaaggggggaccccccccaagcgcgagggggaaaaaaaaacaaagggccgggcgggagcataacgaagaagggagaaaaaaagagcgttccccaccatttacaagcccaa

SEQ ID NO: 41456 - DNA, 422 bp, Zea mays
  unsure (1)..(422): unsure at all n locations
  Clone ID: MRT4577_137809C.1
gggggggtggggttgggccatccatccatgcataaaataaaaaacgggctaagagacaaattctatgcacctactcctccgcgggctttacaccatgggaggataaccagccccaactccaaagaagtccatncccctgaggggggggggggttgatactttggggggggggacgagacatataatatttgctcggaacgaactggggcacgggacccctcctttcttgcttatcaccagcaaccaagcgggccatttgagcttgcatgcgggttcttttgagctggcgttgttactggggttgcgtttttggcctttggggttncggtgtacagggaaaaaccatgttaggtttaccactcgcgagcatggtcgtgtggactggttatttttcgggggggggattagggtcgtttacgggt

SEQ ID NO: 41457 - DNA, 312 bp, Zea mays
  Clone ID: MRT4577_13780C.1
ggaaattagcgtggaccttatctactgaattaactgtgggatgatgcatcaaaagtttttgtattctctctgaaggacgcacagtgtttattgatggcagtccacagttcattgatttgtttgtgtgtgtttacacgttcctcactttgtatctaggcaatagaacaacttagatcttattagatacagataacgctacacttgtacacgagttgaaccgttaacttatggctaccctcgctgccggatcttggaggatgattactgtggacctgcccattcctggacacgaagacgaagggtgagatcaaa

SEQ ID NO: 41458 - DNA, 1477 bp, Zea mays
  Clone ID: MRT4577_137810C.1
tggcgctgccgaggggccgccggtaggacccacgcgcgccgccgacgagctctgggcgacggagttcggcggggaggacggcgagaacggcgacgtgttcgaggggatctacaaggaggctgcttcggcggcgcccgggcgcggagaggcggctccggtcggaaatgacgagcagtggacgctgagtggggaccacgaggataaggatccctttgccgagtccgtgctcggggaggggatcgaggggattcaaggcgagtgtgatgggctagatgacctcggtgctggggaggaccccgaggttgagctgaagcggcagcggaacaaggagagggagaaggagttgatggagatactcaaaggtccaaatcgtgcttttggtgatctcattgaggcctctgggatcacagatggaatgattgatagtttgatcctcttaaaggaggtcagagacgttccaggctatctgcatggctacgtattttgttgtggcgggtctctgccctttgactttgatgtgggttttctactcaacacagatcacttgatctgctgttattttttccgaaggtcctgtccttttcagcttctccgacctgcgtcgggaccagggccatgctacacctcggtgcccgtgtccggatcgtgccggctgctggtttgttcttggtcaatgaaaaggagtttgatgcttacttcccaatcctggaccatagagctgaactatccatttaatgggacccgactgtgaaaggtggtggcgtatcaggacaagttggagctatccgcttagggataagcagggccttggagaattgggaaccaggatggcgtccatatctcaaagcagctggatatttgacgagagattcacgtgtggttgaaaggaaaaagcctggaaaagcgaaagcaagaaagagcttccagtgggtcaagcggtaacagagctatctgcatggctacgtattttgttgtggcgggtctctgccctttgatgtgggttttctactcaacacagatcacttgatctgctgttattttttccgaaggtcctgtccttttcagcttctccaacctgtgtcgatacgaggaccatgctacactttggattccgtttccgaaacgatgtaacagcaaaattgatgtagaaaataccatttgacctaatcaagaccgagaagttgctttgcaatgagctgccaataaaacaggctgtgccaatgagactacatgttcgtctcatcagaaggaagacccttctcgacccttatgatttaatggctgggaaacgggtttcggatgccaactgatgattatgataatttgcttcgtttttttcttcctctccgtgtatgtcttgcgcagtactggtaaaggaatgataagcgttcgttttgtgcctgaaataatagaaccaggcaaactgctttctgcgggtttgaatcatgcagtttcgaattgttgtgtcatctgcttg

SEQ ID NO: 41459 - DNA, 360 bp, Zea mays
  Clone ID: MRT4577_137811C.1
aaagacaaacggggtcttttttttaaattcgggccaaaaattttgcttatccccaaaaaaattttgaaaacccgggaatcttggccattggcaacccccgacttttttttttttttggccatagagggaaaggcccccctttttttgggagccaaaaaaagcgggggaccccccccagaggggggggggacccctgggcccaacgatgggtccaacggggggcggtatgacgggggggacctttttggaaaaaaggggcgttcgcgcggacggtagccgcccccccgcccgtttgggcccctccctggggggggacccagggttcgggcgctttttccttcggggggcctataaaaaccg

SEQ ID NO: 41460 - DNA, 213 bp, Zea mays
  Clone ID: MRT4577_137812C.1
tgtcaagttcgaggaccgcggcgtggtcgcaagggcgcttacgttggttattctgatgctgcacgttgacctacccaaaggacacgggttcgttcagctagtccatgagtgtgttccatgtggcacagaagcaacaattgttatggtacacgctgaggccacacaacttgctattgagctggaccaggaaaacgaggagtcatgcctgatggt

SEQ ID NO: 41461 - DNA, 426 bp, Zea mays
  Clone ID: MRT4577_137813C.1
tgtttcgcgtgggcgaggggatctacaaggaggctgcttctgcggcgcccgggcgcggagaggcggctccggtcggaaatgacgagcagtggacgctgagtggggaccacgaggataaggatccctttgccgagtccgtgctcggggaggggatcgaggggattcaaggcgagtgtgatgggctagatgacctcggtgctggggaggaccccgaggttgagctgaagcggcagcggaacaaggagagggagaaggagttgatggagatactcaaaggacaagttggagctatccgcttagggataagcagggccttggagaattgggaaccaggatgggcgtccatatctcaaagcagctggatatttgacgagagattcacgtgtggtccgaagggaaaagccttggaaagcgaaagcaagaaag

SEQ ID NO: 41462 - DNA, 1673 bp, Zea mays
  Clone ID: MRT4577_137814C.1
ggcgctgccgaggggccgccggtaggacccacgcgcgccgccgacgagctctgggcgacggagttcggcggggaggacggcgagaacggcgacgtgttcgaggggatctacaaggaggctgcttcggcggcgcccgcgcgcggagaggcggctccggtcggaaatgacgagcagtggacgctgagtggggaccacgaggataaggatccctttgccgagtccgtgctcggggaggggatcgaggggattcaaggcgagggtgatgggctagatgacctcggtgctggggaggaccccgaggttgagctgaagcggcagcggaacaaggagagggagaaggagttgatggagatactcaaaggtccaaatcgtgcttttggtgatctcattgaggcctctgggatcacagatggaatgattgatagtttgatcctcttaaaggatgtcagagacgttccagggttgcctcccctaagagaaatagaagatgaagctatccagaatatgagtgtaacatcaagcagagctgaagttgagcgccaaaaccaagaggccattgctaaggcacgagtaagacaggttgatgagaaaggaagagcttatggaacagggaaaaggaaatgcagcattgctcgtgtttggattaagcctggtgatggtaaattcattgtcaatgaaaaggagtttgatgcttacttcccaatcctggaccatagagctgaacttcttcgtccatttaatgtgaccgatactttggggcgtttggatgtgacctgtactgtgaaaggtggtggcgtatcaggacaagttggagctatccgcttagggataagcagggccttggagaattgggaaccaggatggcgtccatatctcaaagcagctggatatttgacgagagattcacgtgtggtcgaaaggaaaaagcctggaaaagcgaaagcaagaaagagcttccagtgggtcaagcggtaacagagctatctgcatggctacgtattttgttgtggcgggtctctgccctttgatgtgggttttctactcaacacagatcacttgatctgctgttattttttccgaaggtcctgtccttttcagcttctccaacctgtgtcgatacgaggaccatgctacactttggattccgtttccgaaacgatgtgacagcaaaattgatgtagaaaataccatttgaccaaatcaagaccgagaagttgctttgcagtgagctgccaataaaacaggctgggccaatgagactacatgtttgtttcatcagaaggaagccccttttcgccccttatgatttaatggctgggaaacgggttttggatgcccactgatgattatgataatttgcttcgtttttttcttcccccccgggtatgtccttgcccagtcctggtaaaggaatgataaacgttcgttttgtgcctgaaataatagaaccaggcaaactgctttttgggggtttgaatcccgaaaaaaaaaaaaaaaaaaaaaaaaaaaaaaaaaaaaaaaaaaaaaaaaaaaaaaaaaaaaaaaaaaaaaataaatggctggcctgatccggagctgtagacaacccccctgaggctatttccaacaggactttggatggttatttaccccaaagatggcagtaaaaaaaatggaagggaacgttttggtcg

SEQ ID NO: 41463 - DNA, 104 bp, Zea mays
  Clone ID: MRT4577_137815C.1
gcaacatccggactgtggcatcctttgtttatgaagatgaaataatcaagaaagcagaattgtcactgcaagaacccttgaggatcaccaagattgagagcatg

SEQ ID NO: 41464 - DNA, 513 bp, Zea mays
  Clone ID: MRT4577_137816C.1
ggcgctggtaaccccttcacagtccccataacatggctgcacaggcggtccccacgtcaatgccgtagccccaacccgaatgcttgccgagcctacagactggatcactgctctgcatctagtgatgaagaagacaagtgctcatgaccggggggtgaagggttttttttttgcttccaatgccatccagaatcacgccactcagatttgcatgcatcctgaggactggctccactcttattacttcaacaaatgaaaagcgctctgcgcttagcacattgaacacctgaacactgacactgccgataatactatagaaaaagtgagcccggcttttctagattaactatgatgacaaacccaggaatgctacatgctgctcctgctatagtcgtcaactactacggagaacaatctcatggccttaacatagtgcaagagtatgtcaagtcgcactacatgagtgacatgtctagcgatactctcgatttggaccatggcttaaaattatgc

SEQ ID NO: 41465 - DNA, 813 bp, Zea mays
  unsure (1)..(813): unsure at all n locations
  Clone ID: MRT4577_137817C.1
atacaaccccacacctaagggctgggaggcggcccatcacttcaccgcgtgcagattccggaagcacccttccgtcgccccctccgtcggccgattgctccgtggtgctcggctcggcgggaagcctctgcctaggaacaaaatggatgaacagagaatagctcgaatatcggtcacttggagaggcaggcaacttgacgttgatgcagacccaagctgtacggtgaaggaatttgggcaactgctccaggttttgactaatgttaaaccggagacgttgaagctcatagttccgcaatctgtaaataaaggttccaagctgatcagtccattttcagacccccattcaagcttaacactgaaagaagctgctgtcagtgagggtaagcctattagaatgatgggtgtctttgaagatgaaattgaggaagtatcagacaatggcaaaagatcagatctgcggataattggatttgaagaggaagaacaacggctgaggcaacgatcttcaggcaggccccgagtttcactaaaacttccacaggggcaatacatcttctgtgattttcggacacttcacttacccggggttgagttgaatccaccaccttcggaagctctgaaaagaatgcacatacttgcatgtgaccctggcataattgcgatcatgaacaagcatagatggcgagtgggaatcatgactgaaatggcaccagtgggatatgtaggtgttagtccgaaatgcattctaggcttcaataagaacatgggagaggagatatcccttcgcctacgaactgatgatntgaaagg

SEQ ID NO: 41466 - DNA, 796 bp, Zea mays
  Clone ID: MRT4577_137818C.1
gcgttcggccgccgtccgcgcggacgcgtgggcacgccggctatctggctctgtacgtgtgtggcacggggcgcggggacgagagagctgctgcagtcgctccaaaagagcatcaggagccggccgggtgcaggcgccggcgccgctgacagctccccgttcgccggcttcttcagcttcccgcagtactccgccaccaccacctcggcccacggaggctgctcgggcaacaacaacaacaacacgggcagcggaggaaaccgcagcgacgcggccggcgctgccgccggagcaggagcaggagcaggagcaggagcaggagctgcagggtcggcggtcgcggacgtcgaggtgacgatggtggaagggcacgccagcctcaaggtgctggcgcggcggcggcccaagcagctgctgaagctcgtcgcggggctgcaccagctgcgcatcccgccgctgcacctcaacgtgaccaccgtcgacgccatggtcctctacaccttcagcctcaaggtggaggatgactccaacatgggctctgttgaggatatcgccgccgctgtgcatgagattatcggcagcatagagcagcagcagcaggaggagggagagcccgccgtcatgtgaagctttgcactctgcacgactgcacccgcacatatttgcactctttgcatgccctcgtcctgccaatggaatccatttgcctctgtagtagtctgtacacatgtgagctagtgactgcgattgcgcccagctgggcacctgagccatacatgcagagcattatttgtcc

SEQ ID NO: 41467 - DNA, 379 bp, Zea mays
  Clone ID: MRT4577_137819C.1
aatcatgaacagaaaatggagcatccaatgcatagataagatccacaatatacagcacctacatcatagtccgctcaatggtcacgcttctaaaacatttcccgtgctaaaaaacgcgcttaaggaaaggaacacttaaactgaccactatatgggtcgttgggttcaaaagaactgacgacgaacattggttaaatgtgactaacatgacttggtcgagcagatgcacacttgatgtaaggcgctccaggtggcaagggtcaaccacaatctgcaaaccctgcattaaatgggggacggggccacccacttgaacatacagcagatagaccataggtcagcaatatgcttgttgatgcggataccaatgccatttgac

SEQ ID NO: 41468 - DNA, 603 bp, Zea mays
  unsure (1)..(603): unsure at all n locations
  Clone ID: MRT4577_13781C.1
atcaaagggaaaccagagtcatgtttagatttcactgcccgaaacaatactgtgatgactgtgcaacctagtcgaagaggctgaagcccatatcatcacagtattgtttcgggcagtgaaatcaaagggaaaccagagtcatgtttagattttaaccttattttatgttggaaagtactgcaaagactgctaattgtctctgtatttggtaattcagctgtagattgctatgatggttgggatttactcgtgaaccagagtttttctatctaaaaaaaaaaaaaaaaaaaaaaaaaaaaaaaaaaaaaaaaaaaaaaaaaaaaaagaaagaaaaaaaaaaaaaaaaaaggaaaaaaaaggaaaaaaaaaaaaaaaaaaaaaaaaaaaaagnacctnggccgggggcaccctgggggcaaaattataaaaaaaacaaaaaaanttggccttggggccggaccccccttagggggaaatttttgaaattataaaaaacggggggccccttcagcggcccttttaaagcccccattcccccttaaaggggcgggtttaacaaaacttggccgggttttaaaaaagcccggttggggaaaaccccgg

SEQ ID NO: 41469 - DNA, 217 bp, Zea mays
  Clone ID: MRT4577_137820C.1
cccacgcgtacgcgcacgcgccatcctcaccactgtgatcccattctcttactgacacccaccctcacggaacagctaactctacaatctgactcaatccacccaccgctctaccttacagtccctgacctttctctcgctcatccaatcctcattctcacctactgccacctcaacaaacctctccttctcgtcccagtacaccacagctcctcct

SEQ ID NO: 41470 - DNA, 1932 bp, Zea mays
  Clone ID: MRT4577_137821C.1
ccggccgggatctttgtggtcgtggtcctcccgtcgtcgtcgactcgtcgtcgtcggtgttgctccgatgggcaaggactcgaagccgaaggacgccaaggggaagggcaagcaggcggccggctcctctggcggcgacgacggcggcggcaagggaggcaagggcaagggcaagggcaagggcggcaagtccgctgacggactcggcacttgcacctacgtcaaaggcacgtattgtgtgagaagcaggggaagatcaatgaagcttataagaagttgcaggatggatggctgaataatggggacaaagttcctcctgctgagtttgctaaggtaaggacccgaatgacgggcagtcctccactcttctaggctcaaggatagttaggtttgcttagacgaaaagggtagtgatgcactatgcgcattgatactgacgagacttcatcgttttgcgactttgaaagttttatttacattttagtgacatttccccatcttctatttggccttgtagagaatgaataaaggctatataggttaagttactgatcttgtacttattcatgaggtacagtttgtggtctgcatcacgatcttcttgtactgatagtatcctttgattttgaatgagcttgatctttggttgcactttgatgatatcctgactgccattaatccatttgtttcatggcaagtgcagagaatggatgctgtgtatgggcagttactagttaaagacggttgctttagctggcatatgaataatgcatctatgtgtattgactatcgagaaaaaggttttgtatgattttgttgcagctggcaaggcttctggtagcttagtcttagaaattagtacttggctgtttgcttttggtttagcctttttctgacagggaactggtctgggtactactcgccaaaggaccatatatcataattggaaaggagcaaggcaagctgtagggaagatcactgcacaattatttttatattatcgttcctataaggttttgagaatctgtggttaagttgtattgtaaagctagttagtagcaaaattgtttataaggctatttgagctcttatatcttcatacacatttaatttttcgcagcttgtgaacattgggaagcccaattaaatatttgaatctgcatagagtattggaaatagtcaatagtggtgaacttttgaatgattcagttttgagactctggttggagcatgtgtagctactatttagtggggtgcatgtgacatcaaatttcgattgttgacctcatatatgttactggacttcaaaatttgttcttccattttcaatctgactaactacttcgtcgaagtttttctcatattttttgtgccattattagataccatgatgataatagatcctgactttattttttgtactacaggtagcacaagagtattctgaatgcccatcagggaagaaaggtggagatcttggttggttcccgcgtggcaagatggctggtcctttccaggaggttgctttcaacacacctgagggaactgttagcgcaccattcaagtccacgcacgggtatcactttatcctctgcgaaggaaggaagaactgatctggaaatgtcggttggggagactgcatcatcaggttgtatgagacgcaatgcaaactactcaccttctctaataagcgctggacatgtgtactttgtgttgggctattcgcattctgttccaaacaagttgccaaaacaaaagaatgtgtgattcgctgtaattaacatattgtactgataatctgatatggcatacctatctgggtcagttaacaggtgggttttagcgggactgggtactactcgccaggtgggttttagcaaaaaaaaaaaaaaaaaaaaaaaaaaaaaaaaaaaaaaaaaaaaacacaccccc

SEQ ID NO: 41471 - DNA, 658 bp, Zea mays
  Clone ID: MRT4577_137822C.1
agtatacagcataacctaacaggaattggacatcatgaattttcgttaccaaatttgtagtatcttgtattactaaatagcaagcatgccctctgtacatgtttttgctttcacatccagatcagtgcaaacaaacaacggaaactttatagcacagtagcacactaagctaacaagataagcgacgaatagagatctacaaggctaatacaacagtacggcgggacactagtgggcggcgaccaccatgtcaggcgcattgaggaactcgatgggcagatcggtgcttggaggcgacagagcgaagagcaccactgacttggccgccgcgaccttcttccgctgggggcaccggggcgcgaggagcctcgaggcgggcgcgaacacggcacggccgcgacgccctcgccgtctccagaagcaggaagaggcgatgaggaggacgccggcgcaggcgcaggcgatgagggcgggggcaggcgagtggcgcggcggagctgtcgtcgcggaggcgggcgagggccccggggcggaggaagcggaggtggtccccgctggcggcggcggacggggagcggcggagcttgcgggtggcgagccatgtggggccccggatgttggtgggggtgaataggcagacggaatggattggacgcgc

SEQ ID NO: 41472 - DNA, 302 bp, Zea mays
  Clone ID: MRT4577_137823C.1
caaagtaaaaatcaacggtaattgtccatcaaacatggtaaaatgtccacatcctaatgaacagctagggcaggctgagactggccaggccagttctgcacgaagagtctattggtccatgcccgaacgggtatcgccgcatgtatctgccccgggtcggaactcaaactcctctggtgccgtggccgcccgtgttgatcagtccactttgacgatgctgcctcggggctattaggtggacaccgtacggcagtttaggacgcggttctctcgcggaaggccagtcactgccggggatcatg

SEQ ID NO: 41473 - DNA, 304 bp, Zea mays
  Clone ID: MRT4577_137824C.1
ccctatgggttttttttttttgagaaagcaaccctttatgggggtaaaaaaaaaaaatccccccccctaaaataagtttgactgacaatcggattctttttcccgggtttttttgagttcacccgaccattttcttattttggggaacccaactacgggggttggcattgttgcctacttgaaaaaaaaaaaaagccccggggaccttttcaaaaaaaataattttaccttgaacccaaccttggaaacctatggatgtgtttttcctcaatatttttcggggaagaagcaggggccccccttt

SEQ ID NO: 41474 - DNA, 324 bp, Zea mays
  Clone ID: MRT4577_137825C.1
aataacattggaggggcaaataaaaattgaaccatacatttcctctaaaattacatctttgttttgccgggtgcagctaaggaacaagtttataggggcacgggccccacttagattaaaacaaaacgctcaggcccagttggcccagcgccaaaaacactttgggaaggccactaagccctgcccatgatctatgggactatgggtatagctaagggagacaagggcctgacattactattttatgggaaaacatttcgccagttttgggaaaaaggggccagggcattgaaaaggggaacccccggcccttaaaatcggttc

SEQ ID NO: 41475 - DNA, 471 bp, Zea mays
  unsure (1)..(471): unsure at all n locations
  Clone ID: MRT4577_137826C.1
ggcgcagnncacaagaanaaccgncagcaaccagggggnccgncgggcaggcccaggcagcacggagcngaccgnggagggaaggccanccgaccagcngggcaggagaaaccncacngacagccccgnannngacggggggggcccngacgccagccncgnggcncgcgnacagggagncgcnacccagangggcgacgngcgccagnngnacaccgncgngnnccaggagaggccgcncaagggcnccacgcncgncaccgaaggcgcgangacagaagggncagacgagngggcgancnacggnggaaccggagngnncgcgaaggcgagaggcgncanaaggagaacgnnncnngccgacacgagcggcgggaaccccgacgagcnngccgnggaggnncnccgcccggggggccgcccggcggcgnngggcncaacgncgncacagccagcagcaaaggacancag

SEQ ID NO: 41476 - DNA, 313 bp, Zea mays
  Clone ID: MRT4577_137827C.1
aagacccgacgttgcctcctcctgcagcagcagcgtaaccagaggggggtacgtcaagccgtttcgagagaggtttagggtggtggtagcagtatgggttgcggtgcgggcttcgtggtggccgtggtcgtagcgtgcgcgctcctggccagcaacaagtggcgggctgcgcggcggttggccggcacggccgcaggtcccggtggtggtggtggtgccgtccgtggcgtcaccggcgtgccgaggttgccggcggtgcaggcagtaccgcgtgtggcggtgccgccgtgccgggcgtggccagtgtcaccgt

SEQ ID NO: 41477 - DNA, 485 bp, Zea mays
  Clone ID: MRT4577_137828C.1
aatattcttccatccaagggagtaaaataaataaggggggaaaaggaaattaaaaaaccacagtacaggaccaaggccggcccagggggggaaaaaaacaaacaagcccgggggggggacagggaggcacaaaaaaaggcaagcaaaaccgccaaaacgaccaaaccaaacaagcaaaaaaaagggctaaaagagcgggaaaaaaaaggcaaacaaacaaaaggggggggctgggcgggcaaaaaagggggcacccatccgaaacaacccccaaaacggccggaaaaaaaccggaaagcccccggaggggaaagcaagcccgggcccggctggaaaggagcgcgcccagcaacccaggggcaacaaaaggagggccaggggggaaaaaaaaaacaaccccaccccccaaatcgatgggaacaaaaaaaaatatccctgggaaagaataacctggccggccctccccaagggagcccgaacgaaaa

SEQ ID NO: 41478 - DNA, 371 bp, Zea mays
  Clone ID: MRT4577_137829C.1
aagcagtggtaacagggcggggtgcgcggggaagctgaagtggggagtttgagtcataaaataaacattgtgcttttgtcccccttaaatatctaagtacacgaagtaagtgcccataatgaactgatgtaggagcagagacaaactgactcaagatgtgaaccgcatgagcaatatctggcctagtgacagtaagataaactaagctgccaacaagatgtctatatcgagatggatcctctaacggtgtcccatcagtcggacgaagagataagtgaagatccataggcgtggcaacagtgcgagtatcagtaagaccaaaaaaaaaaaaaaaaaaaaaaaaaaaagtactctgcgttgttaccactgct

SEQ ID NO: 41479 - DNA, 279 bp, Zea mays
  Clone ID: MRT4577_13782C.1
cccacgcgtgcgccaacgcatacacccacgtactggcccactcgctgatagcactctgtcacgcacgtggcactctagcagcacttgatagcggcgcaacacgagctccgggcagtgtacgtcgccgccaccagagcgcgcgccgatccggagggcgaggtgtgatcgctggccgaacaggctgcgcatattgaagctgaggcgcggctcatgaccgctgcgctcgctgcgatctgccaagtgcacacctaccaccatgtactcgcctgagggcgcacc

SEQ ID NO: 41480 - DNA, 163 bp, Zea mays
  Clone ID: MRT4577_137830C.1
gccggccgtgtcgcggaactccacggatctcgcacccgattgctggcacgaatatctccgcggcgtacgtgggggcgcgactgaggttctgtctacttctattagctcacagcctccggggcatacgtatcaccctcaccggggcagctccctcgacgccttt

SEQ ID NO: 41481 - DNA, 206 bp, Zea mays
  Clone ID: MRT4577_137831C.1
ggaataaaacgttcatgtatataagttacaacaaagtaaaaaaatagcaaacataaatctgggaagaaagtcatgggagcaagatgcagagctcccttcagtccaaacagcggtcaacgaaggggacgaggcagctcctcggtcatgcaaaccacaagcccatctcaagcatttttcgctctctcacgatcttttttttttttgat

SEQ ID NO: 41482 - DNA, 727 bp, Zea mays
  Clone ID: MRT4577_137833C.1
attgcccaaaacgatcaactcagcacgcggggttcccaggcggaggaggcgaggagcggcgccggcggctatcgatggatccaggcggcgccgccgccgccaagcttgcggtgtggtgctggatgtgggggatgcacgacaactcggacgacgcgggcgacggcaataagcagttccatctcgtggcctccgccgatttcagccacgacacgcgtatgcccggggagtttggaagccacttgatgaatataacccctgagtctgatcttgtcaaacttgtagctcacgacgaacctatttctgactctaatcaatgtgaagcaaatgggggttcagcgagcgatactgatatgcaacttgaagtgaccttgagcaccttggctattcaattcttttgccgcttttatgagaatgtccacatgcgtggtttgacttggcaggatgatgagtatatgcaatgggtctctggataccatcacatagagcgaaccaaaggcctttctgccaggtttatgaatgagctcattggagttggatgctactcttatttcccctttggaccatttgggccaggaagcactgtgatcactattcctgaaagtgcatgggctgaaatttctgttgggcttcagagcatgctcataactatgcttgactcttttcttcggtctgaacattccaatgctatgggcttgaataattctgcttgtactttaccactgaatct

SEQ ID NO: 41483 - DNA, 1003 bp, Zea mays
  unsure (1)..(1003): unsure at all n locations
  Clone ID: MRT4577_137834C.1
aattcggcacgaggcagccggcagttcggcaggcgccacgagccttatccccttgctctctccacccaccgcctccccgtcaaacggcgcgagggccgcaaggggcgtccaaggtttcctcgtccttcacccgtcgtgagtttgacactccctcccagacctctcgtccctgccgtcgcccttgttggcccacctcgccctggggcacgaccaccgactcgcttcgccgccgacccacgcgtcggctcatgttcaaccgctgccctcctcggatcccgtccaccgccctccccgcatctcggccgaacgttgctctcccgccgcaggctcccgtccggtggcgcacgacatctctacatccgtgtggcacgacgctcatctccgcgacgtgctgctccgatgcggcatcatgggtgctgcggacggcgccaccaacgtgtgcttggtaggcggcgatggcgacaactgcaagtacggcaccagcctgcagcgcatctcagatctcggatttttttgccatcaatcagcaagcgcggcaggagggagcagagccggagatggggcggtgctggtgctgctgccggtgcctaaagctgctatgcttggttctcctcccaccgctcaacttatgcttgcaccacagctgctgctccaatctgtccccattctcaccgtcgaagattcgctccattttctatggcgcctagagtcggccttcaggggaagaccgctcccgcaggccaagagtcgtggggctccgagattgccagtagcggtggccggagctcctccgatgtttccacgccatatgctacgacgttttgtgcttccacgccggatgccacaatagacaagctgaggtcgagagtgtttctcttttctttactggagacttctaatcaactgagttgtactcaaggcagcgttccttgatttttcgtctaaagtcatttgctgcatgcagctttgttnnnnnnnnnnnnnnnnnnnnnnnnnnnnnnnn

SEQ ID NO: 41484 - DNA, 544 bp, Zea mays
  Clone ID: MRT4577_137835C.1
aaaaggggacccccccctttaaaaccccaaaaatggacccccccccaaattccccaaccggcgggtaattcccccccccttttgcaacccggtttaaaaatttaattccccccccaaacaaaaaccccccctttgttacaaacttggcccccggcttttaaacccccccaaatttctgttgccccagggccttttccccaaggaggtcccaaaatcccccccccaaatgggaaacccgaaccctccccaaaaatttcggccaaagctggcttttcccaaacaaaaaaccccccaaaaccccccgggttaacccccgggggggaccccccccccggagaaaaaaaaaccccccgaaaaccatctttttaaaaaaaaacctccccccaaaaaccccccaaccccaaaggtttttcggggcccccttttaacttacctactacgggcccgggggggttttaatccccccccaccaacccccagggtttagctaaaccccggaaatcccccccctgatttttgtgtttataaaaaacggccccccttg

SEQ ID NO: 41485 - DNA, 740 bp, Zea mays
  Clone ID: MRT4577_137836C.1
ggaccctcgaggccggccgggccgggagccggcagcccagcaggcgccacgagccttatccccttgctctctccactcgcccctccccgtcaaacagcgccgcgccgcaaggggcgtcctaggtttcctcgtccttcacccgccggagtttgacactctccctcccagacctcccgtccctgccatcgcccttgctggcccacctcgccctggggcacgaccaccgactcgcttcgccgccgacccacgtgtcgattcatgttcaactgttgcccacttcggatcctgtccagcgccctctccacatcctagccagccgttgctctcccgccgcaggctcccgtctggcggcccgcgctccccgcgaacggcgaccggtggcaagccgctggcggcgcacgacatctccacgtccgtgtggcacggcgctcctctccgcgacgtgctgctccgatgcggcgtcatgggtgccgcggacggcgccaccaacgtgtgcttcgtcagcggcggcggcgacaactgcaaagtcggccttcagggagagaccgctccgcaggccaagaagtcgtggggctccgagattgccagtagcggtggtcggagctcctccgatgtttccaagccatatgctacgatgtcttgtgcttccacgccggatgccacagtagacaaggtgaggtcgagatgtttctcttttccgtactggagacttataatcaactgagttgtgctcaagcatc

SEQ ID NO: 41486 - DNA, 723 bp, Zea mays
  Clone ID: MRT4577_137837C.1
ccggccgggatcgcgctgcccgcattccggccgaccgttgctctcccgtcgcaggctcccgtccggtggcccgcgctccccacgaatggcggaaagccgctggcggcgcacgacatctccacgtccgtgtggcacggtgctcgtctccacgatgtgctgctccgatgcggcgtcatgggtaccgtggacggcgccaccaacgtgtgcttcgtgggcggcggcggcgacaactccaagtacggcaccggcctacatcgcatctcggatctcggattttttccattaattagcaagcgcggcaggagggagcagagccggagatggggcggtgctggtgctgatgtcggtgcctaaatctgctttgcttgattctcctcccactactcagcttgacagcttatgcccgcgccgcagctgctactccaatctgtccccattctcaccgtcgaagattcgctccgttttctatggcacctagagtcggccttcagggagagaccgctccgtaggccaagaagtcgtggggctccgagattgccagtagcggtggccggagttcctccgatttttccacgccatatgctacgacgtcttttgcttccacgccggatgccacagtagacaaggtgaggtcgagatgtttctcttttccttactagatacttataatcaactaaattgtgctcaagcatcgttccttaaaaaaaaaaaaaaaaagcgggc

SEQ ID NO: 41487 - DNA, 294 bp, Zea mays
  Clone ID: MRT4577_137838C.1
tccttctttaagggagggtttcgccccgctgacgtggggggggtcccagcagcaccgggccgtcacaggacccgagctcacacagcatatgtgggatgccaagaacatgatgtgtgccgctgacccttggcatggtcgtgacctcaccgcctggtgcatgttaccagggacgacgagcaccaaggcggttgacgagcacatgatctacgggcagaacaagaacttatgctagttagtggagtggatgccgaacaacgtcaagtccagcatgtgcgacatcccggccaggggcct

SEQ ID NO: 41488 - DNA, 530 bp, Zea mays
  Clone ID: MRT4577_137839C.1
aaattgtcatcttcactgtaaatgccatgggatgtgtcattccctatccacacaacatagcacttgctcgcaagtcttacacattaaggcacgtgcatgaattacacgtctggccatgcgctaacaccagatacctgacctcgaaagaggaatgagactccacgacacgaaaacatggattatacgaaaacattccacactacatgcttttaataccgattccgtttcaaagcagcacaaagcatacgataacttaaaaacctcttctttaaaagcttcacccttactaacacttgagagtgccttatagaacaggcatgcacccaagaaaggtcttacccaaaagattcatggacactccactcatggctctggactataaatgagcctgcgtgctactttcatgaagtgacataacgcctcgccgcagataggtatgacagccacgcggactaacaacaccaaaagcccctcattaacactgccttgtatcttcacaacatattccccaactgacctttcagctcttg

SEQ ID NO: 41489 - DNA, 2920 bp, Zea mays
  unsure (1)..(2920): unsure at all n locations
  Clone ID: MRT4577_13783C.1
gcacgaggcatcatcgcgcacattgaccatggcaagtccacactggcggataagctgctggagcttactggcacggtgcagcagtgtgagatgtaagagcagatgtttgataacatggacatggagggggaatatcaaggaaaaagaagatgctggagaagcaggctgcactacgtaatgaataatgagccttactggcctgaagttaattgatacaccagggcatgttgatttctcgtacgaggtttcccgctctctagctgcctgtgagggcgcacttcttgttgttgatgcttctccgggtgttgaagctcagaccttagcgaatgtgtaccttgcattggaaaacaaccttgaaatcataccggttctaaataaaatagatcttcctggtgctgaacctgatcgtgtcgcacaggaaattgaagagataattggattggactgtcgtgatgcaattcggtgttcagcaaaggaaggtataggcatcactgaaatattagatgcccttgtgacctaaatccccctaccaaaagatacatcaaaagatcctctcagggctcttatatttgacagctattatgatccatacagaggtgtaattgtttactttcgtttttttgatggcagtatgaagatagtgtgtatgcaaatcatgaggtttgtaatgttttatacggtagacagaattgtttataaagtacaatttaaagtatgaggtgggacggtagacagcactgtttacaaagtaaaattcaaagtatgaggtgtgatagagagctgctggagataaacggtttcctggaggtaggcaaatgtgtcgttcaaatcatgctttcctggcatatcctgaagacacgatgtctactgctgttgagctcgctgcctaaaggagctggtaaacctaccttgcaggttcctcacgttcttgaaccccgcgttcataaggtctgccgtcgcgaacctggatctgtttcccgtgttgcaacccacaatgacgacatcatccttcctgcactacgcagccagttcctctacaaagtgtgggttcttctccaatacttcttgcgcttaataattactgcaccaagcgtggtataccctgtgcgctgtgctgatggtgaaactgttgaatgttcaaatccatccttgcttccggagcctgggaagcggaggtctatagaagaaccatatgtgaagattgaaatgcttacaccaaaagattatattggttcaataatggagctgactcaagacagaagaggtgaattcaaggaaatgaacttcatcacagaaagcagggccaaacttatttatgagctaccactagcagagatggttggcgatttctttgatcaactgaaatcacgaagtaaaggatatgctagcatggaatattcagttgttgggtacagagaaagccaactagtaaagctggatatacaaatcaacggggatcctgttgaggcgttgtcaacaattgtgcacagggataaggcatatgctgttggaagggcacttactcaaaagctcaaggaacttatacctcggcaaatgtttagagttcctattcaagcatgtattggcacaaaggtgattgcaagcgaagccctgtctgccatcaggaaggatgtcttatcaaaatgctatgggggtgatatatcaaggaaaaagaagttgctgaagaagcaggctgaaggaaagaaaaggatgaaggcaataggaagggttgatgtccctcaagaagcattcatggccgtgttgagactggaaaaggaggtgctatgaaagtgctcatgaacctttgtgtctccgtaaattaaagacctcttcctgtgcgccactcacaagtatagtcagacgagagctttgagacaacaggcattcactatggttcaacctgtccgctctggaccataggaaccagtcaagcacagatcactcccagaacaaaagcaggtaaatctggcattcgttcgctattttttgcttttttatgtgtcaggctatgatggtaaaacaatcatgtcgccacagagttttgccaggcacatataggaaattcatatgtcaaagtgcatcatgtagtccaattccttgtaacgcatgctacagagacttgtttctacagttgaatatacattgtaaggctgggaccaacagatcgtgcatatgcaaaacagaggtttgtaatattttatacggtagacaacactgtttataaagtacaatttgaagtatgaggtgggacggtagacagcactatttacaaagtaaaatttaaagtatgaggtgtgataggagagctgccggagataaacggtttcctggaggtaggcaaatgtgtcgttcaactgcagcatccctggcataccttcaggacgtgatgtctactgctgttgagctcgctgctgaaaggagcggtagccaccttgcaggttcctcacgttcttgaaccccgcgttcagaaggtctgccgtcgcgaacctggatctgttccccgtgttgcaacccacaatgaagacatcagccttcccacagaaggcagccacttcctctacaaagtgtgggttcttctccttcccttgcggcgtgacggacaggtagtagggaacgttccgagcaccgggcgcatgcgccttgtggaagtccccccgcatcctgacatccacgtagccatggccggagctcagcagcgcgtgcgcttcgtcagcgtcgatggtagggacggcctgctccttgtcgctgctggtcactgcagacgccattgctgcagggatggatggatggatgacctgtgttatcggaataatgctcgattccgtcagcttgatgctcgttctcgcaaaaaagtcgtctctctgaccttcgatgctgcgtcgtcacttttttttcnccggccggcctcgagggtcccaat

SEQ ID NO: 41490 - DNA, 778 bp, Zea mays
  Clone ID: MRT4577_137840C.1
ccggccgggatccaagtcgagaggaccagtcaccgcgtgaagtagtggagccatggccgaagggggggtctggagaaggaaatagagaatcatcgccaggtctgccactattgtgatctccggtaccgggctgcgggattgccatgcctcagtgaggcgattgggcgcgtatgccagggcgcggcggtcgtcggtgtgtttctcctgtgcgggtatggcaagctgtggaggcggaatctctcaccggatcaaactacgccgctgtggaccgccctgctccgtgggtgatggtcatcatggcacaatcaccgataaagaggccctcatctagttcgcctatgtatcgcctacgtatagaataccgtagatcggagcttagtgctagggatcgatggttggtgcagctcaaccatggcgcctccacagttggtgtcccgccgccgtggtccgtgtctggggaacgaagataacccaattatcgtcgatgtgtatcgaacgtctgagatctaatgtagctggcccacaaagtcgcgaccatctgatcgggtattggcggtcgggattcaaactcatgtaacgattcggtccggatacgcgtgggtcgttgataacgtgaccaaggaacgagattgtattcgagcttcataatattcgaggcgtctacgtaagatcctatggtaggtaatgcatacccgttcgcatgagctaggttaaaatctgggccctcagtttttgatcagatggtgggaaattaagataccccttcgggctccaaaaa

SEQ ID NO: 41491 - DNA, 567 bp, Zea mays
  Clone ID: MRT4577_137841C.1
ttccctgcctcaccagcaatggttaaaaacggccatcctagagttaccgtgcttgctcaaagttggtcaatggaaatggatcgattgggtacctactaacgtacgtactgaacgggggaaccagtctaattctctgtgttactacatcgtctccatgatgatgcatggtcggtatatatgtacgtgcgcaggtctttctttggagccgctgatcggggccatagcggcggggaacgccgtggcgctgaagccgtcggagctggcgccggcaacggccaagttcctggaggagaacataggcgagtacttggacgccacggcggtgaaggtcatccagggcggccccgcggtgggggagcagctcatggagcacagatgggacaaggtcctcttcaccgggtgcccgcgcgtggcgcgcgtggtgatggcggcggcggcgaagcacctgacgcccgtggcgctggagctgggcgggaagtgcccctgcatcttcgacgccattgccggcaggaggaacctccagacctcggtgaaccgcgtgatcttcgccaagtggtcgtcctgcgc

SEQ ID NO: 41492 - DNA, 304 bp, Zea mays
  Clone ID: MRT4577_137842C.1
actatgacagcccaacctgtttatacacactgccaaaccgtgaccgttgagaacacgcttacaaccatcctaaggtttcccagagccacagcttaacccgaccctcatggggaacggacctttccaacctccagcaaacgacactactcccaatgtatcaaaatgatgtcaataggtgactctatcggcgctatttatggggtaccccgacacactagtcagcctcggatagatgtagagaaaccttctgcgctcgctttaaactggcacggagcgccaccagcccgcgttattctgggtggca

SEQ ID NO: 41493 - DNA, 633 bp, Zea mays
  Clone ID: MRT4577_137843C.1
accaacgcactcggcaatcagcagtcaagcaatccccactcacatctctccacttcccgattcctttctccagctcgccatggacgcctcagccaccgtagccaccgggaaggggaagaagggcgtggccgggcgcaagctcgggcggccccaggaagaagtccgtgtcgcggtccgtcaaggccgggctccagttccccgtcagccgcatcgggcgcttcctcaagaagggccgctacgcgcagcgcgtcggctccggcgcccccgtctacctcgcggccgtcctcgagtacctcgccgccgagctgctggagctcgcgggcaacgccgccaaggacaacaagaagagccgcatcatcccccgccacctgctgctcgccatcaggaacgacgaggagctcggcaagctgctcgccggcatcaccatcgcgcacggcggcgtgattcccaacatcaacccggtgctgctccccaagaagacggccgagaagtcccccaaggagcccaagtcgcccaagaagaccgccaagtcccccaagaaggcgtagattccttgcttagttaggctgtagctgggatgtatggatgggtgtgtttgaggatacttcagttcgaagtagactgttcttgctt

SEQ ID NO: 41494 - DNA, 360 bp, Zea mays
  unsure (1)..(360): unsure at all n locations
  Clone ID: MRT4577_137844C.1
aaatttccccccccgcctcnnanncgagaagaacccctcccatcttcgcaggggctaagacgnnccgnnccaggcttctgacggaggcggggtgacgtaaggaggtgcgcgggaggatccgctcgcgcccggaggaccgggatccggcgcccgtcgtcgccaacgcccatgtcggtccacctcaatcgcttcacgcggacatgtcttgaagggagctcaagtcacaatgaacgtatagaccataactcagactctgaaggctctgaagacgaaaagaatacaagaataatccctctgaagaaaaaaacaataaatgcttcaactaatacatagcactcagttcaaaagaccagaagggaa

SEQ ID NO: 41495 - DNA, 180 bp, Zea mays
  Clone ID: MRT4577_137845C.1
aaggatatccctggatattcattttttatttcctgagtggcaagggaaaggaaagacaagtaaaggcaaacgtgaccacgaccagccgcagctaatccatacagggaccaagacaaatacagaaaaaaaaaacctacattaatatacagacacaagaacaaccactgacgaagccaaaaa

SEQ ID NO: 41496 - DNA, 317 bp, Zea mays
  Clone ID: MRT4577_137846C.1
attcctgatatgattgcagattcaagcaaatacataaaattgcagaatgtttatcgtgagacagcaaagaaagatgctgctgctgtaggtaatcatgttgccaaattgcttcagtctgttggccaggcaccagagtccatttcagagatagaattaatactgctttgtagcaattctgcatttcttcgagtggtaagatgtcggtctttagctgaagagtatggtttgcatacagtcaacaaagatgacattatttctagcatggacaatccggataatgagatagtcctgtacctaatgttgcgggctgctgatcg

SEQ ID NO: 41497 - DNA, 450 bp, Zea mays
  Clone ID: MRT4577_137847C.1
acacatgaacagcatcgaatatggtcatctgttctctactgtgtgctctggtctctgtcacgctgccagcgcacaatgcaatgcatgatgccctgcccataccacggggtctataggaccttgtacggcgcttacgccggcctgactactattatgggcgccggaggactgtacccctacgcgaaatacctgtgaaacaccgaatgtaaccccgtgccagcagttccctactacgccgggtgtgagcagccgaacgccatgtttcagccactccggcaaaattgctgacgaacaaagatgaggatgatggaactccataccgttcgccacaatgctcaagacatgatcacaattgatcgtaccattcacgcaagcaggagcctgtacgagccaactatgatacatacagagtagcacttgatgccatcctagggtatcaaccgcatggcc

SEQ ID NO: 41498 - DNA, 476 bp, Zea mays
  Clone ID: MRT4577_137848C.1
tccgcccagcgtccgctgccgcgtacacgcgtgcgccttgctctctcgctctgccactgccgtccatgtagtggatgaccaatgacgagctctgctgggccccaatcgagtggactgccttacctttgcggttatgaccgtacggttaccgcttctgatagctacccctggacggtgacctcacacattgacagtcacacatctacacctgggaaactatgcaagggcttatgccgatcccaccgatcaatcaccgctctccaataccaatgatgaatttttctttcttggcaaaattactgtattgatcttacaaacatggctatacggaaagactaatgcctattacctataagctcatgacaaaaaaagagatgcactgccatatcatcacccgagactccaattaatcatgcaacctaccccatacttcacgtgtgattatgcgttcacatttgagatataaagatccaaca

SEQ ID NO: 41499 - DNA, 185 bp, Zea mays
  Clone ID: MRT4577_137849C.1
acctggtatggcaactcggcaagatcctgaccgtcgtcctggctctgatcgggctagcgatccaccgcgccgcagctccggcctccgcgcaaacgcctgcggctgcccgccacgctactgctgccgccagttcggctcatgcggcaccgcttcgactcctgcaatgccaacacgtgccagtccgg

SEQ ID NO: 41500 - DNA, 772 bp, Zea mays
  unsure (1)..(772): unsure at all n locations
  Clone ID: MRT4577_13784C.1
tcaaatcctgagtgcatctgatgttgcttagatcagaagaacggatgcatctggattaaccagagtcagtcttgtcttggtgtgcactgcagcgacaaggagcaggccgtccctaccatcgacgctgacgaagcgcacgcgctgctgagctccggccatggctacgtggatgtcaggtgcgtagagctcagccagtcagggacgcgcctatgtgtgtgctgtgatcggaggagcttccagatgaactgacgctgacggggacgaggtggttctccttcgtgcaggatgcggggggacttccacaaggcgcatgcgcccggtgctcggaacgttccctactacctgtccgtcacgccgcaagggaaggagaagaacccacactttgtagaggaagtggctgccttctgtgggaaggctgatgtcttcattgtgggttgcaacacggggaacagatccaggttcgcgacggcagaccttctgaacgcggggttcaagaacgtgaggaacctgcaaggtggctaccgctcctttcagcagcgagctcaacagcagtagacatcacngtcctgaaggtatgccagggatgctgcagttgaacgacacatttgcctacctccaggaaaccgtttatctccggcagctctcctatcacacctcatactttaaattttactttgtaaatagtgctgtctaccgtcccacctcatacttcaaattgtactttataaacagtgttgtctaccgtataaaattgtgtaaacctctgttttgc

SEQ ID NO: 41501 - DNA, 468 bp, Zea mays
  unsure (1)..(468): unsure at all n locations
  Clone ID: MRT4577_137850C.1
tttacgggatttcgcagcaatgaaatcgataatgcntcttgagactccttgcggactccgaccgaatcgatctgcatcgccccgccccgtgcgccatgttcctgcggcggctgagaacttccgccgccgtccgccggggcgcgaccgacggcggagtcctggccgccgtccgcgccgagatgtccaacgagatctcctcctcggttccccctccattccgttccgagctgtcccccgacttctacaccgtgtttgacaccccgcacttaattcgattgtatctcttgtaatagttctttttatgaacaaccctccccctcacacaccacaccatcttactttcccctttactctttctcctttctcctttcttttctttccccccttccttcccttctcccccccccccccctcctcctccccctttctcctcccccttctcccccccccctcctttttttccttcac

SEQ ID NO: 41502 - DNA, 724 bp, Zea mays
  Clone ID: MRT4577_137851C.1
ctggccgggaagtaaagcttacgttaatcaatcattcctctgcccatagacagcatccgtttccgttgctaattaacactccatcacttgaagctacaatggtgagagctgctgaggtcgcaacgaccatggcggcggcactagtcgtggtcatcgcattgtccactacgccggcggcaagcgccattgactacaccgagcataacctggcgtcggaggagtccctgtgggcactgtacgagcgttggtgtgcacactacaacatggcgcgcgacctcggcgagaagacccggcggttcaacttgttcaaggagaacgcgcaccgcatctacgagcacaaccaaggcaatgcgacgtacacgctgggcctcaaccgcttcagcgacatgaccgacgaggagttcagccgctccccgtacggacgttgcttgtttgccccggtccagcgcatttctgacggcgagaacgaagagctccagcagcatgaggacgtgtcgttcaacctcacgcacggcggcgccaccgcagcgctgggcctcccgccgtcagtggactggcgcgggaggtcggtgccgcgcgtgaaggaccaggggctcacctgcgggagttgctgggccttcgcagcgatcgcggcggtggagggcatcaacgccatccggacatggagcctggtgacgctgtcggagcagcagctggtggactgcgacaatgtggaccatggctg

SEQ ID NO: 41503 - DNA, 158 bp, Zea mays
  Clone ID: MRT4577_137852C.1
cgagatcattttaacagtgacgcggtgtttaataacccagtaacaaagcgggggaatatgagtcaacaacgttggatgggatccacacatcctcagataaatatcactggacacacacataacacgattggatctggttaaagcagattacaggattg

SEQ ID NO: 41504 - DNA, 456 bp, Zea mays
  Clone ID: MRT4577_137853C.1
gggaaaaaatcccgtattaagttgcatgggaaaaaaatgggggtttttaaaaaaccataacgtgacttgaaccagggaggcacggggggggggaaattcctaggaaagggggagctagctaaacttgaaaacaaatccgaaaggctaaagcttgtccttggcgaaggaaaaagggttcgggttcgggttctttttcttaaacttcgggtggttcttgggcttgtccttcttcaagggcgggttggggcttaaggccaggcccttttgaaccgacttgtaaatgctggacgcgaacttcttggggggggggggggggaacccggttttcataagggccgggtgggaaaacagcctggccgggggcttaaagttctcggtttcggtggcctgggggaccttgtggaggaggtttttgatgatggggggcctggggttaatcttaagaacccttttggc

SEQ ID NO: 41505 - DNA, 735 bp, Zea mays
  Clone ID: MRT4577_137854C.1
gtcgacccagcgtccggtcagggttgtgaagggaaggagtgccgatggccggtggccacccggcgccgctgcggccggtggtggttgcgatgaaaggccacccagggtctggcaagtccacgtcggcgcgcgccatcgcgaccgcgctttgctgtccgctcctggacaaggacgatgtgagggactgcatgttgcccctagagggcttggctgctgctgggctgctcaacgacctctcctacgccgtgctgtggcggatggccgagcgccagtgtcgccctggtgataacgaggaatggcgccggaggctggagagccgtgggtcggctgttgccaatggtggcggtggtgatggatggcataagccaaagacatgggctgagctggagaggcttctggaagggtaccaaggttgcacagactatgaaattggagatgtaccgaggattgtagtggatacaactgatccgacagttgatgaacaggtggtagctgaaaaggttgtggttttcattagatcccatcttgcttgtagccaaccatcttgtgggagacaggattcacctgtttgccattagaaaccaaaatgtacactagcttaagcattaggtaaagtttcgttgcaaaaggttgatctgttgtactgcaatgctcaaagttcttttttttatgggtgtaacctaaaggttctgttactgttgagacttcaaagggattttgttgttgttgttgtgt

SEQ ID NO: 41506 - DNA, 606 bp, Zea mays
  unsure (1)..(606): unsure at all n locations
  Clone ID: MRT4577_137855C.1
cagnattgagatttcaatgaccttccttttgccggcctcctcgtctcctccggttccggctacctacctgcgggacgtcgacctcgtccgtctgtcgcctagctagctgcctcggttttcgcttgaagcagcagcagcagcaagccgggagcttctgtgtttgtttcgatcggagtgagaagaagatggttgcggagtgccaaggaggaggagacttcctcatcaagctcttcgggaagaccatccccgtgccggagccggagccggagtccggcgacgccaaggttggccgtcttgcttgctgttttagtttatttccagcggagtctgctgcgtctgagtgccattttttttttgcttgcgagaaaaaaacactaaggccacgtattatgctcagactaaaaggagtttctagtcgtctccgctgaccgccttccacatcctaaatacgaatcaagcaccactactagcagtagtactaaaatttcaaatcagatgtctaatttcctaaagcagatgtaatatttttcttctacacaagaagcagccttgttgtaacccatttatcttacatgaaaatttaccattctacatttctactgaaca

SEQ ID NO: 41507 - DNA, 1068 bp, Zea mays
  Clone ID: MRT4577_137856C.1
caccccctcgcggacggccgggccgtcggctttgctgtttttgtgcctcgctagatcgttccgtaagggcacccatcgtcatagatacgattcatagcttctgccactacttgtgcgcggagagccaagaaatgcgtcaggggttgtgaagggaaggagtgccgatggccggtggccacccggcgccgctgcggccggtggtggttgcgatgaaaggccacccagggtctggcaagtccacggcggcgcgcgccatcgcgaccgcgctttgctgtccgctcctggacaaggacgatgtgagggactgcatgttgcccctagagggcttggctgctgctgggatgctcaacgacctctcctacgccgtgctgtggcggatggctgagcgccaggtaaggctcggactgtctgtcgtcatcgattcaccgctgtcacgccgctctcacctcgacatgctgacacgcctagccggtgtgcttgtggtcgtcgtggagtgtcgccctggtgataacgaggaatggcgccggaggctggagagccgtgggtcggctgttgccaatggtggcggtggtgatggatggcataagccaaagacatgggctgagctggagaggcttctggaagggtaccaaggttgcacagactatgaaattggggatgtaccgaggattgtagtggatacaactgatccgacagttgatgcacaggtggcagctgaaaaggttgtggttttcattagatcccatcttgcttgtagccaaccatcttgtgggagacaggattcacctgtttgccattagaaaccaaaatgtacactagcttaagcattaggtaaagtttcgttgcaaaaggttgatctgttgtactgcaatgctcaaagttcttttttttatgggtgtaacctaaaggttctgttactgttgggacttcaaagggattttgttgttgttgttgtgtgatctagaggtttcgtaaaaagatgttcttttttctggggttggttcctcaatctcctatctccattacatctttcacattccaatgaaatggaatatgactttcagcatc

SEQ ID NO: 41508 - DNA, 706 bp, Zea mays
  Clone ID: MRT4577_137857C.1
cgcccacccatcgtccgcccagcgtccgcccagcgtccgccacgcgtccgcaattctgagccaacatatactgcaatgtatggcaatcctgatgcaacatatactgcacaggcctatcctgatgcttataacactaatcaggctcacatgcacgctggtgccagttcctattacacgagtcaaccattttcctatggacaatacgagagccagcacaccaatatccaaagatgactgccggcacaagatagctttgactcgtctgccatctcattctcgctgtaaaaggatagtcgcagaatccaccggattaagcatgctagaaaaatctgttgcatcggagcgctggaactcctcgtggtcatgtttgcttttcttttctggctaatttgttccagaatggatgggtcgaattttggagcaaaaatctttctggcttctccatgtactaccataacgatttgtcagttaattctgcagattggtgtggtgttattcagggccgactatgatgcctctagccatttgtgtacatacgtataaatgaactaggtgagtgcccgtgcgttgcaacggaaccgtataataacacgataacttatgtacatatgtgtgttatattgttatgagaaaatgtttcaaaaaaaaaaaaaaaaaaaaaaaaaagggcggaaaaaatccaaaatctcagaggacccacgcttac

SEQ ID NO: 41509 - DNA, 294 bp, Zea mays
  unsure (1)..(294): unsure at all n locations
  Clone ID: MRT4577_137858C.1
cgtcggaccgangtcactatggtcaaacattagagttcggcagtatcagcttcacgagggaaatcataatgcggcacacgtcgttccggtcaagaancatttgaatagtgtcaggaccctgttgccatgctttgcgaaactgaagctgttcatgcgcattgtggatttcgagccatctgggtggcgccatcatgcataagacatcgaattgcctcacaactaatggacgttgcaaagagtaccttctgcatatgcaagactttggggatttcacaatctgctttcgctcgtccg

SEQ ID NO: 41510 - DNA, 343 bp, Zea mays
  Clone ID: MRT4577_137859C.1
gagctcactagttttcggttgccacggcgccagccactggttcgggcatggccttggctctatgtcgaatcgcgggcctgcactggcacgatgccaaagggcagagcctgtgtctggccaaacagggcctggtgctgcgtgctgccagctccctcgggcaggcagttggacgccgccaggaccacttacctgctttgagttaaaggacgacaggcgcgttgtaaggcacgacgggagcttccccttgatgaggttcgaaatcacttttgacgaaccggcggatctcgacggaggacatggtgactgccagaacgcccctgacagctagagccggatgtctagt

SEQ ID NO: 41511 - DNA, 1183 bp, Zea mays
  Clone ID: MRT4577_13785C.1
cattggtacctcgagccggcgggacacctcactccaccacacatgatctgcggaaaccatgtccgcgcccgcccgcccgccgtttctgcgccgcccgccgatcgtttgggtccattgatgccgcctataaatctccggcaggcctccccggagtcaggcaacacgtcgatcgtcctcattattattctcactggtcgatctgctaacacaaacagcagcagctcctcctcactagctagccttctctatttttgctactgcaagtgcaagtctgcgacgacgtccgctgagatgcggacggcggtgagccgtgcatcccttgaccagaagcttgccctcgccgagccctggtcccgagaggccgccgcgttgccggagctagcgcggcagcggtggcgactatcggctccgcgaccccaccaacccctcgggagcggccggatgcttccctgggccaacggcaacatcaacttccccgcccccgccggcgctaacctgtcgctggcgggccgcgactccttcgtggaacctccggagcacgtcgataccgtcgccgtccagggcccagtaggcccccgcccgcctctctgcaccgcaacatcatgagctcagagatctccgacccctccctcgcccccttcagtcagacatgacggccagccagtcagtcagtcagcacaagcaccagagatgatgccatccatgtctgcatgcatgcatgcatatataaaaaataaactgctaggctgatgagtcatcgcgctcgcgtgctattaatcatcctcgatgcatgtactagtgaattgtgctatttaaatatatagtttcacgaaaaataaaatgttaattctataaattaaaaataaaaaaccctgtatgatgaagtggtcatatacaactatattgagatcagatatatatatgacacatccgtcgacctcatcagtcatagagcccagccagccagtcagtcagtcagcacaagcacaagcaccagagatgatgccatccatgtctgcatgtatgcatttataaaaaataaactgctaggctgatgacgcgctctaatataagctagccgtcgcgcgcgcgtgctaatcgtcctcgatgtactagtgattgtgctatttaaatatatagtttcacgaagggtggatgtttttactttaaccccccccccccc

SEQ ID NO: 41512 - DNA, 485 bp, Zea mays
  unsure (1)..(485): unsure at all n locations
  Clone ID: MRT4577_137860C.1
cccgggtacaccactntccatctagctgatgactgctcatcggcactacagtgcgacctacgacaacggacgacgcaagcgccacactatggggtaccagcatttccgacgccgagccccggctgcacgggctcacggagctacgccgcgcccatgtccccggtgcgcagcgaccggcttccttgagggtaagcacgaagcagggcagggtcgcaggggatcctatctgactacatgggctgcatcaccaacctgaacatggcgacgacgacaacgattagctgtgcgcaaagaggttgagactggggccgttcgtgacacacatggcaactgccgcgttgaaactggacgcacgctactccggtctgtatacgggagaccccatcgggtacaccctctactacacactggactgctgaggctgatgtcacattctcaactgatgaaactctctcgggctaaataacagcagggccctaaagcag

SEQ ID NO: 41513 - DNA, 548 bp, Zea mays
  unsure (1)..(548): unsure at all n locations
  Clone ID: MRT4577_137861C.1
agcaagcgcggcgaccncgacnnnaaaaccacaangcgcacaacaanaccncncnccggngacagccgcgggaanccaataccgcaatgtcngagccnacanggnacaagaggccanccaagcaagcancnnacgggcannagcannaacccnccaacaaccanangcncnanngcaacagccanccccagngcancnggancnccaaagaancgcggcacaacaaccacaacaacaggngcnaccaacaancaancaagnagnngcagcgaaccccgcngcnaaccnccagcaacaacaggnncnnccanncaancaactagcgggggngaacccngcnancnactngcaggcacaacagcnacnaccannnaaccaactnggcgggagcccnnaagccnncnaaccgcaacaacagcnncngccannccatctgcaagctgtggcaaacattgttgctttcttgagacaacaacatttgttgccattttacccacaagttgtggggaaacattaatgccttcttgcaacagcaacaattgctacca

SEQ ID NO: 41514 - DNA, 732 bp, Zea mays
  Clone ID: MRT4577_137862C.1
gccgggaaaattagtttcgatctgtgtgtgtgaggagggtcggttgtttttaggacttcagtattatcattcacataaatacacttgattaaggtatataaacctttgtcacatggcaaattgtgcttgcatccaacaagtggccattgaacattcttcgtgtctgccgtcaggttgagtgcccgaagtaccctgggttttgcctcacaaggcaaaggaacgaatatccatttgttgaagtattttactacccagaacaggttatcattatttacttgacatttgcggattcaaatgtttcaggttctttgttttggatctttcatgcaatttccagtcattctctagttatcatttcatgcaatttatgtccactgggataacatataattgcatagtggttcaaggtgcagtttagttgtgagtttgttgcctgctacgttactatgattgtactatgatcatttgtcttcttgatttttttgttctttacaatctccatagtatgcatcgctagaagcaaaacatgattgatacatgagatgttcaacaagctggaaatctttatgctcttgtttagtaacaagttaaataatttctggtattgtaggtataaaccaagttcctggaaatatttgcccttttcatcagtccacttcatggattttgggacatcaaaatcttacttggagacctatagtttttcacttcaagaaagagctccatatgcta

SEQ ID NO: 41515 - DNA, 866 bp, Zea mays
  unsure (1)..(866): unsure at all n locations
  Clone ID: MRT4577_137863C.1
gatcccgcagcgttctgtctccgacgactccgccgcccccgtcgtacgccaggtgcggaggcctttgctggtctcttcgccggcgacgaacacccaccagcaggtatatagattaacatattcagtacctgagatcttccttcaactagcaaagggaattgggattccactccccagtcctcatcaacagagatttatttgtttaggcaactctcatttagctgcccccttttcctgttaaggaaaaaagaagctttaagttcagtttctcctagaatctctcctcaaactgtgataccagctgatttactattatatctgtttattctcttctttggaatgctatggcaacaagtcaccaaagagaataaaggaacagaatgcagtgccgccaccacttcatcgtgtaggggtgctgtctagtgcagacatgtcaactcagttatgaaaagtctgtaggctctggattgaggcgttaaaaaaaatctttatagttttccataagtggtggagccaagtacagttctgtgcatccttctgttgcggtcaattgccatcatgcaggtttggcaccacgcaaaatagtggtacaagtggagtcaagtacgtcttggtgacaattttttgctcctggccaatgccatggtatttgattgaacctagctagggtagtggaacctcgtagttgttccaaccaatggtaagctcatataattgcaccattggtaggtaaatgtcaacatgtctctctctctctgcaaccttgactattagcaatatcagcgaagtagtgcaatattattcangaaagatggttgccagctgccctagtttgaccggagagatcaatatgaagtggctagcag

SEQ ID NO: 41516 - DNA, 193 bp, Zea mays
  Clone ID: MRT4577_137864C.1
acgagaaaaccaattcgcgcaataatgaagcgaatgatgctgggtcactggccgtcggtatacaatgaaatgactggcagaacaaagtcgctactgaagataatctcctagaagaacatcccaccatttactcaagctactcgaatacagaaagatgcccgcaaggattcgaattcgcaacaatggaacagga

SEQ ID NO: 41517 - DNA, 196 bp, Zea mays
  Clone ID: MRT4577_137865C.1
tgaatgatccggacccgtacacgctagtgtcaattgcaggcggccactctggacggtctcacttagggcgaaatacaacaacaaccgtgtgggaaggatgataaacagggctacaaatttggtatccaaatcttctcgacccctttcgtgtgcctgtaaaaccccactacgatgaacactccatcatcgtttttag

SEQ ID NO: 41518 - DNA, 866 bp, Zea mays
  unsure (1)..(866): unsure at all n locations
  Clone ID: MRT4577_137866C.1
aaatttggaatgctacggcattctgtcaccggcgcgaataaaggccgccccgcaactcgcggcgttctgtgccggtctccgacgactccgccgcccccgtcgtacgccaggtgcggaggcctttgctggtctcttcgccggcgacgaacacccaccagcagctgctgtagatgtgcacattcatctccctttactgggtccgcccctggagcatatcatttgactgccgtggccacaactgcgctagttttgctttgatcatccggccttaataatccagcagatatctggtatatagattaacatattcagtacctgagatcttccttcaactagcaaagggaattgggattccactccccagtcctcatcaacagagcgaagtagtgcaatattattcaggaaagatggttgccagctgccctagtttgaccggagagatcaaatatgaagtggctagcagttatttggttggtatggtgattagtgtatatgccaagcttttacagataggcaagaattgacagtagcaaattcttgactagctccgccacctacaggaaaatctagaagaataaaagaaagtcagagatggcgatgtttcttggttgctgtcattagctgccgcttgacacctcggcgacgaaaaaggagccgtccactcactgagccttttgtccccctggacatgcaggtgagtggcatgtaaccaacctgaatgacaggaggatcattgtggtggcaacgccaggaggcagttggatattcaagatcatgacatgaaagactttgggaaggngagagggcaatctccatggatcaaggtgtctgcacatgatccaagcgcacaactgctcaaagcacac

SEQ ID NO: 41519 - DNA, 464 bp, Zea mays
  Clone ID: MRT4577_137867C.1
cttaaaaaaaaaaaaaaacaaagataacaaaacttttatatttttacaaagacaaaaaagaaaaaaaaaaaaaacctaatacccaaaacacttcttatgacaaaaaattttgagttttcatccctaatcacccctagggttcaaaatccacccaaatggccccaaactggccggtgtggagaaaacaatattcttgcgaggccggtacccccttaagggggtgtgtttagaaaacaccccccctgccttgacacaacagggggtgcaaatacccacattttcccctcctgatgtttgatacaccctccactccactattccttttcgatttgggtaagaggtaaatcacacttatcccatcccactaccggcaactattatactatataaggcacccacttttgaaaagctaatatttatatacacaaatttgtcttaaccagaacatctatcaatagataaat

SEQ ID NO: 41520 - DNA, 254 bp, Zea mays
  unsure (1)..(254): unsure at all n locations
  Clone ID: MRT4577_137868C.1
gggaggtgaacaagttttttctaggggccttcttcagattgttccgagatctgcgagaggngtttgcaagagaattcaacagtttctgggttactgattaccgttcttgtatgccaccgtggtgcctgaaggagtattaaaatcttggggtgancgtggtctggtgcctatgaagatggtgagtgcataaggtcccccattcctctacacccccgtcttaaaaaaacttacatcaggagccgagccttgccctt

SEQ ID NO: 41521 - DNA, 615 bp, Zea mays
  Clone ID: MRT4577_137869C.1
ggccgcttttttttttttttttttcttggttttttttgtttttttttttttttttttttttgggttttattttattagttttacaatttttggactaaatttttaaaaaaacaggaacattctctttttgtatttacttccctcaaaaaaaaaaaaaaaaacccattgccaggaagaccggggggggggatgcaccaaccgccaccacaagaccagagaactggccacagggaaaggaagacagaaaaaactgggccccccaaaggcaggcccaaaacgcccatccaagcggggagggcccggaggaaaaaataaccaccggaccccgaagggggacgcccccaaccccgtagaaacgaaactgggcagccgttcaatcaaaaatgccaaggcccacatccccatttccggggacaaggaggacgctttaagggggcacccccaaggggggaccctgggaaccggcaaagctaagaaccattggctggaatcctttctggaggaaaaccccggagccaaatgctttctgccctaaccagaaaagaggcaaaggggaatctgccaccggggaaaacaattagcggagaccaccttggaacccagaaacaacagctt

SEQ ID NO: 41522 - DNA, 843 bp, Zea mays
  Clone ID: MRT4577_13786C.1
cggtcgacccagcgttctttggtcgatctgctaacacaaacagcagcagctcctcctcactagctagccttctctatttttgctactgcaagtgtccaagtctgcgacgacgtccgagatgtcgacggtgagccgtgcatcccttgaccagaagcttgccctcgccaagcgctgctcccgaggtacgaggaacagggggtgggtacagacactcgccgatcgacattcaggcagccaataagccgcgcggccttaattaattaaagctcgaaatgactaacgctatgtatgtatgtgtgtgtgtgtgtgtctgcagaggcgactcttgccggagctaaggcggcagcagtggcgactatcgcctccgcgattcccaccctcgcgagcgtgcggatgctgccgtgggccaaggccaacatcaaccccaccggccaggcgctcatcgtctccacggtggccgggatggcctacttcatcgccgccgacaagaagatcctgtcgctggcgaggcgccactcgttcgaggaagctccggagcacctcaagaacacctccttccagggcaccggacgcccccacccggctttcttcaggccatgatgagatcagatatatatgacacatccgtcgacctcatcagtcatagagccggccagccagtcagtcagtcagcacaagcaccagagatgatgccatccatgtctgcatgcatgcatgcatatataaaaaaataaactgctaggctgatgagtcatcgcgctcgcgtgctattaatcatcctcgatgcatgtactagtgattgtgctatttaaatatatagtttcacgaagggtggatgttttt

SEQ ID NO: 41523 - DNA, 166 bp, Zea mays
  Clone ID: MRT4577_137870C.1
gaatcatcttacctgttcagatttcttctcctcttttcgcaacccggtttgccgaccaggtgccggctttccagagtagccaggcgaatcccgagtctggtttgcgcgatggctgaggagcattccaacccccattcccagctagctgcggagagggaggttatgg

SEQ ID NO: 41524 - DNA, 190 bp, Zea mays
  Clone ID: MRT4577_137871C.1
aggagggggcgtcgatgtggcacgaggcgctattgctggagctgaaggtccacgtgctcatggacgcggttccgcttaggacgcagcttcgtatgcgtatacctgaccaggagccgacgatacccttaacattctatgaactgctccggatctcagtggatggtagacctgatcatcttcctgtattata

SEQ ID NO: 41525 - DNA, 1643 bp, Zea mays
  Clone ID: MRT4577_137872C.1
gcggccgcgtcgactttttttttttttttttttttttcttttttattctgaaaatggacaccaaacttagtgccggatcagctgcagagaacgcagtctatcaaccgaatatcatgtggccgctttttttttttttttttcaataaagcatacagccatagcctgcagtcggttcttccataccaaaagctcaacaaaggaaagccattacatcacactacgcaacaatctaataactcgcacccatgggaagaattacaagagttaattacacaaagaatattactttttctatattttgaacacaagctgtaaacacttacaccatcaccctttcgttcctgtatgctaatacaactacaccaatgcatcattctatacaacaaacaaaacatactatgaaaccctttgagggtaggcacacttcatgcatataggagtagccaaattatgctgaggggcatagcaggcttggtgttgggattttatgcaaacccatttcaaaggctattaagaagagcccttttgcaagatggctgttgagaagtttcaggccttgaccctggtgaggtcagctctaaaactgacagcagaaaactcctctcactagcagtgaattttggggtagggatgccatctgcatacggttggaatgttgcaactgtatgagcaggggatgtgaattccaaagacggaggcttactatcttttgcaaccacatcaaaacttggggatgcaaagttttcggcgcctgttttatctgggagatttgtgtgagccggggagttgaattcaatacattgaagcctgctatcttcaacaatctcattaagaacttgtggttctggtgtttctccacattccttactcgcaaaatttgccagaacgggagatgcaaactccatacattgaagtctgctatcttcagcaagttcactcattttttcagatgttggtatttctgcacctgggcaaggtgccatacttccagaaagcacatttcggcaaatgctactatgttcttcgcagttatctgctgaacaagtttccatgacttcatcagggaccatgtctgatatcacttctatgatagtttgagaagaaccaaaacactgctcagcatgcacatcaatctgtccattctgctcccctgacttttcttcatcttccgcttcactatcatacgggtctacgagtaaatcatcaatatctgttataacaggagatatagattctacacgttgaagcacgctacctgccgcaacctggtcttcgctcaaattcccacatcctgtcatttttgcacctgggcaaggttccgtacttccagaaagcacttttctacaaagactactatcctcattgcagttatcgactggacaatctcccatcatttcctctgggaccatatttgatgttactactatgctagtttgtgaagaaccgttacagtgatcattgtccacatcggtccgtccattgtgctcgctttgcatttgttcatcttcatctttcctctcataggggtctacaattaaatcatcaagctcctctaaaagtgaagctatttcagacccactattttctggcactttgttgtgctcttttttcactaaatgatcttgcagttgctgaaaatgtcc

SEQ ID NO: 41526 - DNA, 453 bp, Zea mays
  unsure (1)..(453): unsure at all n locations
  Clone ID: MRT4577_137873C.1
gtgatgcggcgaatggagagacttttcattttgttaattgatgttgcatcgcacaatgttgtatgatatcaactcagaattgcttggtgaggattctcattttgcagtggtactattatcaacctgttcaaaaaaaaaaaaaaaaaaaagcggtgccgctcgcgatctanaactagtgactaggtgtagatcgcgagcagccccctttcaccaatggattgttacggacagcgtgacctggctcgacctggcttgtgctatcgcaaacaccattgcgggggttgctgtacgtcatgcccgatgcgactttcattatctgtggatacattctgatccccggcttcactgtgcgcgtgtgcccgctacgttttagtctggaccgtcaccagctggcgtcccagctcttgaattgccttcaattcatgaggttactcgtcggcaaaccattatttt

SEQ ID NO: 41527 - DNA, 425 bp, Zea mays
  unsure (1)..(425): unsure at all n locations
  Clone ID: MRT4577_137874C.1
atcacatcgtatttcttcccatccgatcccgccttcgcaaccaaaaccacaacgggcgggttatcgattgctttcaaggcccaaaacaaacccttgctgacaaaaccggctgaggatgagcccgcggtctagaaggcgcccgcacgcaagaagccgatagccgagaatcgggtccccgctggcaagtccgctgccaaggaaggccctgagggcaagaggcgcaagaagaatggcaagaagagcgcggaaacctacaagatctacatcttcaacgtgctgaagcaagtgcacccggacattgccatntcctcccaggccatgtccatcatgaactccttcattaacgatatcttcgagaagctcgcttctgatgccggcaagctcgcgcgctataacaagaagcctaccatcaccttccggagatc

SEQ ID NO: 41528 - DNA, 1118 bp, Zea mays
  Clone ID: MRT4577_137875C.1
ctcgaggccggccgggctctgcttcaaaaaaccgctgatagaatccatttacttttcatctgattcctgagtacaagcattgaaaatataccatgtcttccgacaaaggacagttcgagcagggcttccagcctgatgtccagcaccagcaggtgcctggcctacagtccaagcttgaccccacgcccaaagtggatgagcttcccacacctgaaggcggcgccgaaaagtacaaagctgccggcaagctaaagggcaagaaggccatcatcaccggcggtgactcgggcattggccgctcaatagcagtcttgtttgctatggagggtgccgacagcttcattgcctacctgcccgaggaagaaaaggacgcccaagagaccaagaagatggttgaagagaagggccaaaaatgctatactctcgccatcgatctcaagccaaaggaaaactgcaagaaggtcattgacgaggctgtcaaggccatgggcggcattgatatccttgttaacaaccacgcttaccagatgatggtcaacgatatcagcgacctctccgaggatcaatggctccacaccttcaacaccaacatccacccattcttcttcctctccaagtacgccctgccacacatgaagcgcggcgctaccatcatcaacaacgcctcaatcaacgcatacatcggccgcccaaacctcctcgactacacctctaccaagggcgccatcatctctttcacccgtggtctgtcaaaccagtacgtcggaaagggtattcgcgtcaacgctgttgcccccggccctgtctggaccccactcatcccagcgactatgaacgatgaggctatcaagcagttcaccgcgccaatcggcaggccgtcgcagcctagtgagattgctacttgctttgtcttcttggccagcaacgacagcagctccatcagcggtcagactatccacgccaacggcggcaccattgtcaatggttaagccgtgcgctggttcccacgacacccgcgattttgatttcagaacaagatgcatgttacgaagttatgagtaaattaccatagttcattgaatgagaatttaatcaaaaaaaaaaaaaaaaaagcggcc

SEQ ID NO: 41529 - DNA, 272 bp, Zea mays
  Clone ID: MRT4577_137876C.1
agacgcggtccgcgggcgctgccgccgacggggcggctgaagcacattatcgcccgtccgacggtcgagatcaggccgtggcagtctgtactaggccgccggcgctacccgttatagcatacaccatcagcggggcaccgcggtgctgcccctacgagggcagctggcacgccgtgtgtcttcatagcgcacggcggccgcctgcatgcggggtggacacgcttctgccacgagcccatcgtcaaccaaacagcgcactgagcaacaccgac

SEQ ID NO: 41530 - DNA, 794 bp, Zea mays
  unsure (1)..(794): unsure at all n locations
  Clone ID: MRT4577_137877C.1
aatctcataagcagcaattcatcttaatttatccaaagttctaacacaggccatacagccttgacctttatctaccccaccgtagcaaataaactcgcttcgcttcaagaggctttataatgttcattcatggtacttccttcttatggcacgaaataaannnnncagaaacgcttggattggacagttactcagccacattaaccaattcatactctattagagacaggttgttgtcttccttcaccgtgaaannnnnnnnnnnnnnnnnnnnnnnnnnnnnnnnnnnnnnnagtcgctgctgcattttaatcagtaaataaaatgtatctatctgttaccaatcatctacgctatggttaagtaataaaatagatggatcttcatattagaaaacacgcagactagtatttatactactgactagagaattgcaggcatgaaaccgcagtcatgactcaggcccaccttacatagtcccattgagttgagttgacatacacctccagtccagaagaccttctgagcgccagaccctttcagttttcacctcatccttaaaatgcgacacgtagtttccttatcagaaattggtaatatggtctgatcagaacaagatgttgccaggaacactttccaaacctcgtgccgaattcggcacgagggccatacataactttgacaagcataataagacctctatattacaaaccgcaggtcatcattcctttatttgccatggttgaagaaagcaggcgctccatctgatccgggaccgagacggcgattctatc

SEQ ID NO: 41531 - DNA, 2608 bp, Zea mays
  unsure (1)..(2608): unsure at all n locations
  Clone ID: MRT4577_137878C.1
gccggccgggctgcgggaaggcccgccgctgcccgccccttcttccttcccgtcccacacacgccgccgccgccgccggtgcggctcgcttcctccacactccccccggcccgcgcggggcgggctgcctgcgcgagcagggaggcagggcacgcggcaaccacgtggggaggcgacgacaccaccctctatgctctctgtcctcgcccgcagggtaagattgcagcagcagtgaatttgggagcttgaagcgttcatccgagacatggaaaaagtgatctgccgggcatatctccttcaatgcaagcgattcttttcgaaagaaactcttgattggtgtgtcttagcccgtgggaacacccatctctcctctctggtgaactacacatagtggttatatgctcctctatgctccacaacaagcaggctgatgcgatattttcctgaagttattatattccagtctatgccagacatctacatggttaatatatttgccatcttcagcctacatctgttgctgccctaattagttgatttgtcttctgtgtactatctgaggcaagatattgatcagctagaacttggcaaacccttgcctttcgtgtctgttcatatttctcgtggcttggttattctgaagggtaaaacttgcacaaggcagctttgatattacaacaatggatagattcaagttgattaaggaagttggcgatgggacttttgggagtgtatggcgtgctatgaataaacagaatggcgaagttgttgctgttaagaaaatgaagaaaaaatattattcttttgaggaatgtatgagtctacgtgaagtaaagtctttgcggcgcatgaatcatcctaacattgtgaagctcaaagaggttatcagggaaaatgatatattatacttcataatggaatacatggagtgtaatctctatcaacttatgaaagaaagggtcaagcctttctccgagtctgaagtccgcaactggtgttttcagatatttcaggctcttgcatacatgcaccagaggggctactttcatcgtgacctcaaacctgagaatctgttggttagcaaagatgtcataaagctagcagactttggtcttgcaagggaagtctcatcattgccgccatatacagaatatgtctcaactcgctggtatcgggcaccagaagtcttgctccagtcatctgcttatgattctgcagttgatatgtgggcaatgggtgccataatggctgagctgttgacactccatcctctctttcctggaaccagtgaaccagatgagattcacaagatatgcaatgtcatcggtagtccagatgagcaatcttggcctcaaggattgtctcttgcagaagcaatgaagtatcagttcccacagaccaaaggcagtcaactggccgaggtgatgacaacagccagtagcgatgcaattgacctcatctcatcactatgctcatgggatcctagcaagagaccaaaggccgcagaagtcctccagcataccttcttccagggttgtacatgtgttccgcttcctgtccgtccaaaagcttcatcacttcctagaacacctccatgtgttggatcaaaaggaaattcagagaacagtgtggctagaagattctcaactggaactctatctacaatgaaatctcatagcaatgcacctgcaaaatcaaacggtttatctaggactggtgtacaaagaaaacttcacttggatcgtcagccaccgcagaagagtacaaaaccgaccgagaatagcaataagctagctacaaatcgggtcccagcccggaacagcccagggaatcctgtacttaggcattcacgcagcttgcctgaaactggtcgacgagcagtacagaaggtctcatcaatcacagagaaactgtcgcaaatgtcggtgacctccagaacacgaagcgccgtgaagcctgccgccccgacgatgaaggccggacatggcaagtcagacttcctggggaagtctgacgatatccctccggcaaagaggctgacgagaaaattggtcagctaaacaagggtacgtagagtgaaaatccgatcatctgcaggagggtggagggatatggtgtatagtgtgcaggaaccagtgtgccgaagagaggctagctcatcctgagcgtttgcctgtcgatggtcgcgcggatttgccatcgccacagttttgctgcatcgagtcatcttaggaatggctttgcaaactcctttgtggagtgctagagcctgcttcgagccttaaccctcttcctggccttcgatctgccttttgcctgcgtcaactttgcccccatgttttaataaacatgatgtgtgctattaatttaaaaaaaaaaaaaagcggcagggacgttcgcaaattcctttgtgaagtgctagagccttcatcaagccttctccacttccgggcggttgttctgcnnnnnncctgcgtcaagcatgnnnnnatgnnnnnaataaccatgattgtgctattaatttggtttggtttgccttgcaatgttatcttgcaccaatatcgctgtcacaaactgtatgcccatttaacagcttgtaaatccttga

SEQ ID NO: 41532 - DNA, 818 bp, Zea mays
  Clone ID: MRT4577_137879C.1
cattggggccctcgaggccggccgggcaactccatcaccatctcccctcttccatacctgcatcaatctcaattggttgcagagctaccaaaatagtctcttgagcagctgcagccatgttctcaagggccatccgccagtcgagccgccgggtcgctgcaatccctgctaccagcaggattgcttcgactcgcgctcctgcattcaccaacgctacgcgcttctacgcttccgacgcaaaggcgaccccaaccgaagtttcctccatccttgagcagaggatccgcggtgtccaggaggagaccagcctctccgagactggtcgtgttctctccgtcggtgacggtattgctcgtgtccatggcatgaacaatgtccaggccgaagagcttgtcgagttcgcctccggtgtcaagggcatgtgcatgaacttggaagccggccaggtcggtgttgtgcttttcggttccgatcgtttggtcaaggagggcgagaccgtcaagcgtaccggacagattgtcgacgttcccgttggcgaggctctcctcggacgtgtcgttgacgctctcggtaaccccatcgatggaaagggtcccctcaagaccactggagcgccgtcgtgctcagctcaaggcccccggtatcctgccccgccgttccgtcaaccagcccgtacagactggtctcaagtccgtcgacgccatggttcccattggacgtggtcagcgtgagttgatcattggtgaccgtcagactggaaagactgccgtcgctctcgatgccatgctcaaccagaacaggtggaacaagggtaccga

SEQ ID NO: 41533 - DNA, 217 bp, Zea mays
  Clone ID: MRT4577_13787C.1
ttatttctactgagaaaactagaataggggcgggctgtggccacaataaacatggtgccaactcggaaggcgatgaacgcgcggagatctcatgaattaggagaacacactaaataaccagtctaaacgtgtgagttaaatggctaatcatctatgagccaaacctagtggcgtgacgttccaccgagaactctagcttctaatagaataatgttgt

SEQ ID NO: 41534 - DNA, 832 bp, Zea mays
  Clone ID: MRT4577_137880C.1
atacgcggggatttgccagcactgcacacccagccgcaccccaagaaagaaagaaacccagcgaggaggaggagcaacagcaacgacactgccagttgccaccggaaccggagcgtcctcccttccccacatctctccctcccggaatatacctcctccgagccaacccagcctcccgcgctcaccccctttgcctccggccatggcggcggcggcggaggaggagggccgtgcgccgaccaagtacgtgctgatcaccggcggcgtcgtcagcggcctcggcaagggcgtcactgccagcagcgtcggcgtcgtcctcaagtcctgcggcctgcgcgtcacctgtatcaagatcgacccatacttaaacacagatgctggtactatgtctccctttgagcatggtgaggtgtttgtgcttgatgatggtggagaggtggacctggatttagggaattatgagcgtttcttggatgttactcttacgagggaaaataacattaccactgggaagatatatcagtctgtcattgagaaggagaggaagggtgactatcttggaaagacggtccaggttgttcctcatgtaactgatgaaataaaacaatggatacaatcagtatcctctgttcctgtggatgggcagactcgtccagctgatgtttgtgttatcgaattgggcggcactgtaggtgatattgaatcaatgccattcattgaagctctacgtcagttgtcattttctcttggtaaggacaatttctgcctcatacatgtgagccttgttccagtattggggtgtagttggtgagcaaaaactaagccaacacac

SEQ ID NO: 41535 - DNA, 852 bp, Zea mays
  unsure (1)..(852): unsure at all n locations
  Clone ID: MRT4577_137881C.1
aaaaaataaaattcccgtcccacacacgccgccgccgccggtgcggctcgcttccgtcccccccggtccgcgcgggctgcctgcgggagcagggtggcagggcactccggcaaccacgtgggtggggaggcgacgacaccaccctatgctctgtcctcgcccgcagagtaagattgcagcagcagtgaatttgggagcttgaagcattcatctgagacatggaaaaagtgatctgctgggcatatctccttcaacgcaagcagttctcgaaagaaactcttgattgctgtgtcttagctcgtgggaacactcctctctcctctctcgtgaactacacatagtggttatatgttcctctatgctcaacaacaagcaggctgatgcgatattttgctgaagttattatatttcagtctatgccagacatctacatggttgatatatttgctgtgttcagcttacatctgttgcggccctagttagctatttgtcttttgtgtactatctgaggcaagagattgatcagctaggacttggcgaacacttgcctgtgttggctgttcatctgaaggggaaaatttgcacgagacacctcggatattacaacaatggatagattcaagttgattaaggaagttggcgatgggactttcgggagtgtatggcgtgctataaataaacagaatggtgaagttgttgctgttaagaaaatgaagaaaaagtattattcttttgaggaatgtatgggtttgcgtgaagtaaagtctttgcggcgcatgaatcatcctaacattgtgaagctcnaagaggttatccgangaaatgatatattatacttcataatggaataca

SEQ ID NO: 41536 - DNA, 588 bp, Zea mays
  Clone ID: MRT4577_137882C.1
gtctgacgatatccctccaggatagaggctgacaagagaattggtcagctaaatgagagggtatgtggagtgagaattcgatcacctgcagtaggggtgttgtgtatagtgtgcagaaaccagtgtgccccggccgggtagtcagcctgagcgtttgcctatcgatggttgtgcggatttgccatcaccacagtttcgctgcgtcgagacatattagaatgggtttgcaaattcctttgtgaagtgctagagccttcatcaagccttcctcacttccgggcggttgatctgcttttttcctgcgtcaagcatgcccccatgtttttaataaacatgactgtgctattaatttggtttggtttgccttgcaatgttatcttgcaccaatcttgctgtcacaaactgtatgcacatttaacagcttgtaaatccttgatcccaacaagggatggacatttcacatttggtttgaatgcatatttaacgcagtgaggtgccaatttggcgtacgtcttgtaacgatggcaaacgtttcctcatcactagtaaaaaacgcaacaccgaaaaaaaaaaaaaaaaaaagcggcc

SEQ ID NO: 41537 - DNA, 948 bp, Zea mays
  Clone ID: MRT4577_137883C.1
cagacagacaggcagaggcaggcaggcaaggccaagagcccaagacggtcggggcggagcgcgagaggcaggcgacgcgaggagaggaggcggtgctgtggtggcctcacctgccctgccatgattataaaaaataacggagcgcgacgcgggtagaaaccggaaggcccgccgctgcccgccccttcttccttcccgtcccacacacgccgccgccgccgccgccgccgctcgcttcctccaccccccggtccgcgcggcgcgggctgcctgcgcgaccagggaggcagggcacgcggcaaccacgtggggaggcgacgacaccacaccaccctatgctctctgtcctcgcccgcagggtaagattgcagcagcagtgaatttgggagcttgaagcgttcatccgagacatggaaaaagtgatctgccgggcatatctccttcaatgcaagcgattcttttcgaaagaaactcttgattggtgtgtcttagcccgtgggaacacccatctctcctctctggtgaactacacatagtggttatatgctcctctatgctccacaacaagcaggctgatgcgatattttcctgaagttattatattccagtctatgccagacatctacatgtagatgatgctcatataagggggggttaatatatttgccatcttcagcctacatctgttgctgccctaattagttgatttgtcttctgtgtactatctgaggcaagatattgatcagctagaacttggcaaacccttgcctttcgtgtctgttcatatttctcgtggcttggttattctgaagggtaaaacttgcacaaggcagctttgatattacaacaatggatagattcaagttgattaaggaagttggcgatgggacttttgggagtgtatggcgtgctatgaataaacagaatggcgaagttgttgctgttaag

SEQ ID NO: 41538 - DNA, 216 bp, Zea mays
  unsure (1)..(216): unsure at all n locations
  Clone ID: MRT4577_137884C.1
gccggccgggttcgngaccgcggttgagcttcgcgttgctgatccttcgctttggtgcgtgctttgcttgctcctgacttgtgcttgtcgagagctcatgtcgccgacggcggcgtcgtcggggccggaaccgccgttccggncacgagagaaggtcctcggagaaccagaggcacttccagagcgcgcacaagccgacgtacctccagggccgct

SEQ ID NO: 41539 - DNA, 3313 bp, Zea mays
  Clone ID: MRT4577_137885C.1
tacgccaaattggcgcgggactgttttaaatgtgcattcaaaccaaatgtgaaatgtccatcccttgttgggatcaaggatttacaagctgttaaatgtgcatacagtttgtgacagcaagattggtgcatgataacattgcaaggcaaaccaaaccaaattaatagcacaatcatgtttattaaaaacatgggggcatgcttgacgcaggaaaaaggcagatcaacccaccggaagtggggaaggcttgatgcatgctttatcacttcacaaaggaaggccgccctttttttttttttttttttttttttttttttttttattaatagcacacatcatgtttattaaaacatgggggcaaagttgacgcaggcaaaaggcagatcgaaggccaggaagagggttaaggctcgaagcaggctctagcactccacaaaggagtttgcaaagccattcctaagatgactcgatgcagcaaaactgtggcgatggcaaatccattcaaacctaggtgaaatgtccatcccttgttgggctcaaggatttacaagctgttaaatgtgcatacagtttgtgacagcgatattggtgcaagataacattgcaaggcaaaccaaaccaaattaatagcacaatcatgtttattaaaacatgggggcaagcttttcgcaggaaaaaagcagatcaaccgcccggaagtggggaaggcttgatgcaggctctagcacttcacaaaggaatttgcaaacccattctaatatgtctcgacgcagcgaaactgtggtgatggcaaatccgcacaaccatcgatgggcaaacgctcaggctgactatcctcttcgggcacactggtttctgcacactatacacaacacccctcctgcagctgatcgaattttcactccacataccctcatttagctgaccaattttcttgtcagcctctttgctggagggatatcgtcagacttcccaagaaagtccgacttgccatgtccggccttcatcatgggggcagcaggcttcacagcgctccgtgttctagaggtcacagacatttgggatagtttctctgtaattgatgagaccttctgtattgctcctcggccagtttcaggcaagctccgtgaatgcctaagtacaggattccctgggctattccgagctggtacccgattcgtagttagtttattgctagtctcggttggcttcatacccttttgggatggctgacgatccaaattaagttttctttgtacaccagtcttagataaaccatttaattttgcggatgcattgctatgagatttcattgtagatagagttccagttgagaatcttctagccacactgttctctgaatttccttttgatccaacacatggaggtgttctaggaagtgatgaagcttttggacggacaggaagtggaacacatgtacaaccctgaaaaaaggtatgctggaggacttctgcggcctttggtctcttgctaggatcccatgagcatagtgatgagatgaggtcaattgcatcgctactagctgttgtcatcacctcggccagttgactgcctttgatctgtgggaactgatacttcattgcttctgcaagtgacaatccttgaggccaagattgctcatctggactaccgatgacattgcatatcttgtgaatctcatcagcttcactggttccaggaaagagaggatggagtgtcaacaactcagccattatggcacccattgcccacatatcaactgcagaatcataagcagatgactggagcaatacttctggtgcccgataccagcgagttgagacatattctgtatatggcggcaatgatgaaacttcccttgcaagaccaaagtctgctagctttatgacatctttgctaaccaacagattctcaggtttgaggtcacgatgaaagtagcccctctgatgcatgtaagcaagagcctgaaatatctgaaagcaccagttgcggacttcagactcggagaaaggcttgaccttatccttcataagttggtagagattacactccatgtattccattatgaagtataatatatcattttctcggataacctctttgagcttcacaatgttaggatgattcatgcgccgcaaagactttacttcacgcaaacccatacattcctcaaaagaataatactttttcttcattttcttaacagcaacaacttcaccattctgtttatttatagcacgccatacactcccgaaagtcccatcgccaacttccttaatcaacttgaatctatccattgttgtaatatccgaggtgtctcgtgcaaattttccccttcagatgaacagccaacacaggcaagtgttcgccaagtcctagctgatcaatctcttgcctcagatagtacacaaaagacaaatagctaactagggccgcaacagatgtaagctgaacacagcaaatatatcaacccccacttatatgagcaccatctacatgtagatgtctggcatagactgaaatataataacttcagcaaaatatcgcatcagcctgcttgttgtggagcatagaggagcatataaccactatgtgtagttcaccagagaggagagatgggtgttcccacgggctaagacacagcaatcaagagtttctttcgagaactgcttgcgttgaaggagatatgcccagcagatcactttttccatgtctcagatgaatgcttcaagctcccaaattcactgctgctgcaatcttaccctgcgggcgaggacaagagcatagggggtggtgtcgtcgcctccccacgtggttgccgagtgccctgccaccctgctcccgcaggcagcccgccccgcgcggaccgggggggacggaagcgagccgcaccggcggcggcggcggcgtgtgtgggacgggaaggaagaagggggaagcggcgggccttccggtttctacccgcgtcgcgctccgttattttttataaccatggcagggcatgccaccgcagcaccgcctccacttctcgcgtcgcgtgcctctcgcgctccgcccccgccttggtctcgctggccttgcctgtcttccgctcgtggcgtctccccttttttgcctgctttttaaccgctccctgctcgttttttttggggggcttgctcctccggaggccaaaacacacgtcgtcttctctttctactatacggagccgcctgctactggcaacttggcatcagggcgtttgctcgggaagaggagttggcgtcgatgctgccggctggcttgagatcgcgcgctgcctaatcccggccga

SEQ ID NO: 41540 - DNA, 409 bp, Zea mays
  Clone ID: MRT4577_137886C.1
gaagaacccgctcgacaccatgagggtgttgctcgctgcccttgctgtcctgggtctcgctgcaagcgccacctccacgcatacaagcggcggctgcagctgccagcctacggcgccggctgatttaccgacaacagtgcatatgccaactccggataagctgacagctacggagcatctcacaccgccgattcacctgccgacgccggtacacctgcaaccggcagaacatgtgccgacgccggctcatctgacgacgcaactatgccagtaccctactgaaccgagccggcgtgagcatgatccccaagcacacacatgcgcgcgccaacagccggatccaagcgcatgccagatgcatggaacctgcagcgttggcaggacgccgaccctgagacagtgcgaagag

SEQ ID NO: 41541 - DNA, 2337 bp, Zea mays
  Clone ID: MRT4577_137887C.1
cgggggaaggcccgccgctgcccgccccttcttccttcccgtccacacacgccgccgccgccgccggtgcggctcgcttcctccacgcccccccggtccgcgcggcgcgggctgcctgcgcgagcagggaggcagggcacgcggcaaccacgtggggaggcgacgacaccacaccaccctatgctctctgtcctcgcccgcagggtaagattgcagcagcagtgaatttgggagcttgaagcgttcatccgagacatggaaaaagtgatctgccgggcatatctccttcaatgcaagcgattcttttcgaaagaaactcttgattggtgtgtcttagcccgtgggaacacccatctctcctctctggtgaactacacatagtggttatatgctcctctatgctccacaacaagcaggctgatgcgatattttcctgaagttattatattccagtctatgccagacatctacatcacatcaacttcagaaaagtttcttttcaggtagatgatgctcatataagggggggttaatatatttgccatcttcagcctacatctgttgctgccctaattagttgatttatcttctgtgtactatctgaggcaagatatggtccagctagatcttggcaaacccttgcctttcgcgatattcatgcttctagttattatattacactccatgccagacatctacatggttgatatatttgctgtgttcagcttacatctgttgcggccctagttagctatttgtcttttgtgtactatctgaggcaagagattgatcagctaggacttggcgaacacttgcctgtgttggctgttcatctgaagggggaaatttgcacgagacacctcggatattacaacaatggatagattcaagttgattaaggaagttggcgatgggactttcgggagtgtatggcgtgctataaataaacagaatggtgaagttgttgctgttaagaaaatgaagaaaaagtattattcttttgaggaatgtatgggtttgcgtgaagtaaagtctttgcggcgcatgaatcatcctaacattgtgaagctcaaaaggttatccgagaaaatgatatattatacttcataatggaatacatggagtgtattcttttcggcgtggctattctctccgtcatgtttttaatctcactatttagtgaaccctatgagattcacaagatatgcaatgtcatcggtagtccagatgagcaatcttggcctcaaggattgtctcttgcagaagcaatgaagtatcagttcccacagaccaaaggcagtcaattgtctgaggtgatgacaacagctagtagcgaggcaattgacctcatctcatcactatgctcatgggatcctagcaagagaccaaaggccacagaagtcctccagcataccttcttccagggttgtacatgtgttccgcttcctgtccgtcggaaagcttcatcgcttcctaaaacacctccatgtgttggatcaaagagaatttccgagaacagtgttgctagaagattctcgaccgggactctatctacgatgaaatctcatagcaatgcacctgcaaaatcaaacggtttatctaggactggtgtacaaagaaaacttcacttggatcgtcagccaccgcaaaagggtacaaaaccgaccgagaacagcaataagctagctacgaatcgggtcccagctcggaacagcccagggaatcctgtacttaggcattcacgcagcttgcctgaaactggccgaggagcaatacagaaggtctcatcaattacagagaaactatcccaaatgtctgtgacctttagaacacggagcgctgtgaagcctgctgcccccatgatgaaggccggacatggcaagtcggacttttttgggaagtctgacgatatccctccagcaaaaaggctgacaagaaaattggtcagctaaatgagggtatgtggagtgaaaattcgatcacctgcaggaggggtgttgtgtatagcgtgcaaaaaccagtgtgcccgaaaaggatagtcagcctgagcgtttgcccatcgatggttgtgcggatttgccatccccccagtttcgctgcgtcgagacatattagaatgggtttgcaaattcctttgtgaagtgctagagcctgcatcaagccttccccacttccgggcggttgatctgcttttttcctgcgaaaagcttgcccccatgttttaataaacatgattgtgctattaatttggtttggtttgcccgccaaaaaaaaaaaaaaaaaaaaaaaaaaaaaaaaaaaaaaaaaaaaaaaaaaccgaggaagggcgccggtacc

SEQ ID NO: 41542 - DNA, 926 bp, Zea mays
  Clone ID: MRT4577_137889C.1
tcttttatgatgattgacgcaacaacaaaaatgcacttcatcgattatggcggctaccccgactgacataatgcctacctttggctcctgtcctctagtctcatgttcgggtgcaaaaacaagcaatgcgctctagcacttgcgtgcacaaattctaggactgttagaccaactccagcaaaggtggctccgtatccgtaaaatacgtaggcgcgatcaccattgcggagcctccaaccgcgggcgttccagcagatagactccgtatcacactcgcaaccgcgggcgttccagcagatagactccgtatcacactcgcacaccatatctgcatgcaagtgatactgacagatgacagatgggtcctacgagcgtagacttttattgctacgttgctcagatatgtgcgcagaggagaaataatacatgggaaaagggagcgcaaatacacggcgtacattttgtggagagggatacggagtcagttggactgatgaatagtgcacagtgcaaaaggagattgggagccacatacggaggctgctggagttggtcttagtgacaagactgctcacttctctttttttctagcgcttttatgatgatcgatatagaaacaaaactgcactacatcgatcgtgataactatattgactggcataatgtctgttgttgggtatatttgttctttcctttggtttaaatcacgtttctctatactacattcatgttcatcttgtcaaatttacacatacatctttctgttgtcactaactcttttagtattagacttggtcatttatgagttgtatgagtacatagacttgtatgttaatggagtctatagtgactacgaatagacttatttattgagacttttgtgataaaaattgatgtgttgatttgagctgtgctatatataatgt

SEQ ID NO: 41543 - DNA, 334 bp, Zea mays
  Clone ID: MRT4577_13788C.1
ttttggttttttttggctatatttttatgccgccccaagaagcaccattttttgcttaggattaactgagaacaaatcctgacaggagtgaccaaattcatctatccacagcccatgctggttgatgcatgggtctaatggaggcgctgattaacacctggctaacaacttgcacatgaggtccttggaatcaaaaacacaggtgggggacaacttacccgacgaacgcatgtaaaccctgtggactagggtaaacatcaccgaagggaacaggataacttggaccggcgggccccaccggttagtttctgcagtttccgtaggagttggcata

SEQ ID NO: 41544 - DNA, 110 bp, Zea mays
  Clone ID: MRT4577_137890C.1
actaacagacattcaggctgttttccttaaacaccagccgagagcaagagccgaacgggaggctagccggacaaaatcaccgcaccaggacccggctagcccagaagccc

SEQ ID NO: 41545 - DNA, 280 bp, Zea mays
  unsure (1)..(280): unsure at all n locations
  Clone ID: MRT4577_137891C.1
cgcgtccggctttttnctctcttcccggcggccatggcgaggaaccccggctgcaccgagtgtcatatgtaacgttgttgagaaggttcccganaaggttctatatgaaattcttattcaagtagggcgggttgtagacctacacatacctgttcacaaggtatattacccccccacagggaatgcctttgctgaatatgaaatcaaggaaatcaggaagttagcgcttaaactattttttggccttgttcgactatctaataaaacaccctacatttgc

SEQ ID NO: 41546 - DNA, 2278 bp, Zea mays
  Clone ID: MRT4577_137892C.1
gccgggatacgggctagattcagtcagcgctctccgtctccctgatccggacgtcgttatccggacgagcagcggagaggagaaagccccctcccccgggcgctcctttttcctcccctcccctgcttccccgtcccctccccgtctcgtcctcctccctcgctgcggtgcgtggatacgggctagattcaatcagcgctcatgagccggaggatcgagggcaacaaccagcgcggagcggcaaaagcctcacgtgtccgggatctcttctccgcccagtaggcttccttgctttcgggcggttcccaggttggtagcatgtgagagtgatggcggccgccgaagcgagggctgcctggcagcgcgctgccaaccgctgcctggtccaggaggatgccaagcgagctcccaagctggtatgctgcccaccgcccctgcgaccgcatgacacgagcgatggaaatcctccgagtccgcaagatctccatgcccctacatttgtgcccatcaactggaacctgatgaactccagtctgcccatggaaacccagtggtggctccagttgcagcccagctttgggtgccaggcagcccttgctagggagcacctcaactatgtaggtgcggaagccgctgagaagaaaacggagggtctagcgccagtacctaaacttgaggatgtccaagcaaacaaggccgcagatccttttgagcctccatggatcatttccgcggctgtcatgaagcaaacatctggaacgggtttggaagagttgaagaatctcgcttgctataccccggtgagcctcgactgcaaaggtagtgccaacaagtgtatttacgaggataaagagtttacagagttcaaagcttttgatcctctgtttcctaacaagccacaaaaggaacactgcgaaatgcatgccccttgggaagaaaccaaaaaatctcagccatggtggcaagtagctgatgtcgatggtttggcttcccttgtcgctgaaagagcaatggaaaacattgtcaacaatgatctgccaagacccactcagacagtccgggttcatggacctcaagtgaagggccctgaaaacaaggatgattatgggatgtctgttgtttctgggggccaagagccagatcctgtacatgacactatggagtgcagctacagtgtttcaagcaccaccaatgacatgaattcttctgacgggggacgttggcagcaccacgaaagaaataatgtgtccggggatgcacggggttcttatagttccaccaacagtacaccgggcagcaagccaacatatcaggatgcttctgagagagccaagctgctagatgctctccggcactcgcaaacacgtgctagggaagccgagatagctgccaagaaagcgtatgacgagaaggaccatgtcatcaagctactgttccgtcaagcctcacacctcttcgcatgcaagcagtggttgaaaatgctgcagctggaaaacatatgccttcagctcaggttcaaagaacaccagatagcaaccatgttcccggaccttccatggatgttggtgaaggaaaaggtagcaccgtctcaagagcacaatgaaggggctaggaagaaaggcaaaaggccaaacaggaaaggtggcctctgcgatgccgttgcatttgctgttggtgttggtatcgttggtgctggattgcttcttggatggactcttgggtggctactgccctagctggaagttccatcgacttccatgaccgtaaaggtgacaggataaatgcctcctgtgcacactagattgaatggcaatacattgcatggcaataggtaagttccaagtgtgtgcttcatggagagagagatggggcagctttttggtattcttccatgatactctgttgatttggtgatgatagcttgatgccttatgttggttcatgcatatataggaaggatctggtgtacgtactgccagaaactggatacctaggttggtagtgtgggtgtggatgcgatggttgtctgtgtgctgtacataggggtcagtggtggtctggtggaaagatgaaatcagccgacttcaacaacacatgtgctagtactgtaaatctgtagcttttatttgcttaatgtagcccgaattgtcctaatccgcttgctgtaatgtgtggaacgtatttgcatgtcttgtttacttctggtggatatggacccagtatctatttatcattctgtggattcagtttcaaaaaaaacatattctagactcgcgat

SEQ ID NO: 41547 - DNA, 548 bp, Zea mays
  Clone ID: MRT4577_137893C.1
ggtaccgcggcccttcctcgagtttttttttttttttttttttttttttttttttttttttttttttttttttttttttttttaaacgggaagttaatttgttttatttaactttttgagagacaaagggtacatatttaacaagcctcaaaataggtttgccagacccggatcccttacttgcatatggaacgaggaaagggggttgaactgaaattgaccaaacaaaggttaaatccaagtgttgtttgggaagggcagcgcatttaatatttgggggaaagtttttcctgttctttgaaccacatggggtattggtaggcccccacaacgggggtgaggaggagcggggagaaaatccatttttcggggaccttgggggggatcttgggggggatgtccttccacagccccggctttaccttttgttggaagggggacagcgcgtacacaaccgtttttatccgcaccggggttttccccatgttccccccggggggccggttgttttcctcctcgggacgggatgctccgcctcgggccgaatt

SEQ ID NO: 41548 - DNA, 315 bp, Zea mays
  Clone ID: MRT4577_137894C.1
cagtaccatcaatcatcatttttcttattagtataggcaccaaatcaaatgggggacatcaattatctaactccaaaaaccatgaagctggtgcttgtggttcttgctttcattgctttagtatcaagtgttccttgttcacatacttgcgtctgtagctgttgtcaacatcaaattcatgagcattaacatcatccacaacaacatcatccacaaaaacaacaacatcaaccaccacctcatcatcaccatgctcatcatctccaacaacaacaagttcacatgcttccacaaatacatcagctacaacatgat

SEQ ID NO: 41549 - DNA, 618 bp, Zea mays
  Clone ID: MRT4577_137895C.1
ccggccgggaaccaaatctatgcaagccacaaatttgccattcttgcctgctcttatttatctgccagtacaagtgaatctacatgacgactccactgatactcaccggtactctggctgatatcgacatcctcggaacactccatgaatgctcgtccttctggccctgttgcaacaactgatgcgctagtatcaataatcatccctataaatagtaattgcgatgacgtatcggtcaacgtgtgccagtccggagcgcatgaactgaatctagcccatggcatgaattcgatcccgatatgtgccatgcacccctacgacacctaccggtgtgactacgttctcacaaacttcatggaaataacttgtccccatatgcctgcgtcatcaggcgcgtagatcgatgactgcttctgatgtacggcatgggacgccaagcccaggttgcttctctccaatttcttcatacaataaaaataaataaatatataaatgtcgccgaacgctctgatcagtgcttgctcgttgttcaatcgtccagtgcattcacactctcctttatctattactttcttgaataaagagccatatgctgcatatgccatggtcagagcactg

SEQ ID NO: 41550 - DNA, 483 bp, Zea mays
  Clone ID: MRT4577_137896C.1
gctccggttcctggcgtcccgctccaaggccgaggtcgtcgacatgctccgcaagcacacatacttcgacgagctcgcgcagaacaagcgcgccttcgccgccgcgtccgcggccaccgcctcgtcgctggccaacaacccttcttcctacgcgtcgctctcccccgcgaccgcgacggccgccgccgccgccgcgcgggagcacctcttcgacaagacggtcacccccagcgacgtgggcaagctgaaccggctggtgatcccgaagcagcacgccgagaagcacttcccgctgcagctcccgtccgccggcggcgagagcaagggcgtgctcctcaacctggaggacgccgcgggcaagggtgtggcggttccgctactcgtactggaacagcagccagagctacgtgctcaccaagggctggagccgcttcgtcaaggagaagggcctccaagccggcgacgtcgtcggcttctaccgct

SEQ ID NO: 41551 - DNA, 390 bp, Zea mays
  Clone ID: MRT4577_137897C.1
gtaagctcggaattcggctcgagtgaacatcttacaacacggagacctcgcgaccacactgctgattcgctaagtagagatttgagcacgttgttgagttgtaactccgatgtgttgtttcttgtgctcttttcttgacccgtgtgcgtgtgttgctgcgatttgagttcttgtgtgtgttactactcccccttactcttgtgctttgattgagatcatttgtataaggcgtgagagactttaatttgtggagattcctcataaagggaaaacttgatataaggaagaaaatcgtggtactcaagtttgatctttggatcacttgagaggggttgagtgcaacccttgaccgaaggaggtcatcataatgtgaagtaagcattggccgaa

SEQ ID NO: 41552 - DNA, 1066 bp, Zea mays
  Clone ID: MRT4577_137898C.1
ggggtacacctcgaggccggccggggcgaagccacatcccatcctcctctcctctggccatcttccccgctcttcattcgctagacgacaccgcgttcagccgctctagaaccctagctccccgccccgcgagatggccactgccgacggcgagccccagcccgtggccaccgaccccgcccaggtccaggctccggcaccggcaccggcaccctacccttccccggccaagcgcaagcccgaggcggatgtggaagccgacgccaaccttgcgccccctaaagccgcgcgtcccgacgtcgacgaggaggccgccgctgtggccgaggctgccagggccagtgctcgcgcggctgacaagggtaagggcaagatggtagtcgaggaggaggaggaggaggaggaggaggaggaagacgacagcgaggagagcagcgacgacgacgagggcggcggcggcggcagcagcgatgacgacgagctcgttgaagacccgatggccgaggtagacctcagcaacatcctcccctcgcggacccgccgccgcgcccccccgcagcccggggcgtacctcgtcactccggaggaggctgccgcggaggacgacgacgacgacgctgacgtggttcctgaggaggatgagggagcggagggagaggagagcgattaaggctgcctcggcacggactcactaggaatgatgaatggtggcttttggtgctgggtatctgtaccatcctgtgcctggggaccctagtagatgaacgtgctttctgttaggttttgttcgtggatagcctaatcttcattcggcaatcattatgagttgtgcctgtcaccatgatttatatggcatcagtagtagggtgttacttgagggacacacgtttagttctaactttgtagtaaggcttagtatctggtgaacgatcatgattgaacagttaacggttcgcctctgcggctccagactcgcagcttccagcagctattgaccttatgcttttgatggcgacgcaacaaaagcttatgggcgaattccggcgctctgccgcccgctgctggt

SEQ ID NO: 41553 - DNA, 225 bp, Zea mays
  unsure (1)..(225): unsure at all n locations
  Clone ID: MRT4577_137899C.1
aatcctcatcngtttnnttttgcatggcgnctcccccccgcggctagtttatatttcaaccgcccagagtctccttcaactcccaccnnatgacccaacgtgcctcttgcgtgcctcccttgtctgcaaagcttggcgggagctcctctctatccccatcttcctcccccgctaccgcaaatttcacagcgcgccccctcttctttgttttctctacaacatcta

SEQ ID NO: 41554 - DNA, 203 bp, Zea mays
  Clone ID: MRT4577_13789C.1
gccccacgcgtcaccaagccgtacctgaagggaggcacgtcggataatacgatggaaaactatgtctaggcggagaagcgcgtggtggagaagaattccccgaccgaggctgccgccggcaccggtcctgacggtaccgggagacgcgaggctctgagtgtaatacccaggaataaggcggccgccgtcatggtggtactcgg

SEQ ID NO: 41555 - DNA, 266 bp, Zea mays
  Clone ID: MRT4577_1378C.1
gaaacactcttttgtctacaaaatgcttctagtccaggaggcacaaccaagaactgggattaatgaagcattttgtctcatttacacaaatagtgatttacttttggagatccttgtcagttttattttctatttgataagtaagactgtggactctatccagagccagatagtagggggaagccacagcatttccttttaactcagttcaatttttgtagtgagactgagcagttttaaatccgttgcgtgcatgcatacctcat

SEQ ID NO: 41556 - DNA, 374 bp, Zea mays
  Clone ID: MRT4577_137900C.1
gcaacacaacaaaactatttaaaccttataacgcatagagacagcttgattgcccgaaaggcacccaatactacaatgaacaaatgcatggggggagaacaacgtgagcaacactaccgatggttcgcatccataaatggcaccacggtacatacatgcagggggagcaagaaggccatcgagcatcggaagaatgttggtcgattgaactcctcgctctattgctcaaaaatactagcctctggatcgatggcaggataagcatcacatcaccacagaagaaggcacttattcaactttgccgctagtaaactaccttgtcataccacaacctaagtgctatagcgcgctcactcagcacatattgaacaatg

SEQ ID NO: 41557 - DNA, 373 bp, Zea mays
  Clone ID: MRT4577_137901C.1
aacgagggccttaatgggattttggattagacaaaaaagggtaactttaccacatttgtgggaaaataacaatcattttttactgctggcggggcaggctggggagtcaaaacttccattaggaaaccctatgggggtttgacccctaaatagcgaaaaggggttaagcctgcaataatgtggccaattaacataaccaaattttttttgtttgtttagagaactaacttcagaacttcagaaccaggcggaattgctttggtggtaaagggtatttggttcacctaggcagactgggggggcttctattaggggggctttggcctttgcctttgggggggctgccaaaaataaattacggggggaccctggt

SEQ ID NO: 41558 - DNA, 1288 bp, Zea mays
  Clone ID: MRT4577_137902C.1
ccaccaagaaacaaaaaaaggactctaaaagctgcccaatgacgcaaggttatcgttttcgccctaacctgaacctgaccaaacaaaaactaaaacagccaaaaactgcatcgtcagataaactaagggattgcgacatcgaaccacttcttttatacaaaagcacgcagcacagagctaaatggaacacagcgtcatcgtcatggtccgtaaccatcgtcccatcacgcatctagtacaacgccgctaccataccataccaccatctttagctggcccccggattcacgcttccttattttcagttcagttcggaaggtgatccaaatccagagtcaccaccggcaaagacgagctcgcgcgcgcgcgcacacacacactactggccctctgccagcggctcggcctctggcgccgacgaaaacaccttggcgatgcgttcggtggggatggcggggaggtacttggcccccgcgtagccgtgctccgcggcggctgcgaccgccctgttgtacttgtcggcccagtgcgcggcggtgggcacgacgatctccgcgacgtgcgggaacaccggcaggccgttcagcgagcgccaggcggagacggccaggtgctccgccgcgggctcgtaccgcacgtagaggtccttggccacgggctccacgcggccgtacacgtcccgcgccaccggctccgtcatcgcgagcgccgcacgggctgcgcccctcacgcccgaccgctgcgcctcggccgccagctcgcgcgccacctccggcacgccccgaaccaccgcgtagacatgcgccgacgccgccttcagcgcgcccgggaggtgcttgtccacctcgtgcaccgtgtcgtccaccttgcggtcgacgaaggcgaggacgtcgagcggcaggccgccgaagtggtcggagacggggcaaacgacgcccttgacagtgttatcgacgatggcaaggctgaggcggagggggccggcgttttccaaagcgaggccacagagcccagcgaggcaaccatgttcccacgtgaccgccacaatttcttcaccaaatagatgctcagggtcttcaaccttgcagaactcgaagaaccaggtcacttggtcaccgaagcttgatcgtcgattcctcgaagctcgaaaacggatcataatctggtaacagttgcccttcacgcctgcgatctggatctggggaaacgatctggatctgggggaagtcaggaggttttgcgacggctagagcagtattggtagaaaagagaggatgtgggacgcgcc

SEQ ID NO: 41559 - DNA, 266 bp, Zea mays
  Clone ID: MRT4577_137903C.1
ctgaagtggaccgagtacacaccagatcctaaccatggcttctatgtcagcccatctgtcctcagcgcccttgtgcccagcatggtagcagccaagccagtggactgggaagagagtcccctcttcaacagcctgttcccagtctctgatggctctaactactttgtgcggctctacacggagccgctgctggtgaacctgccgacaccgggattcagcatgccctacaacgtgatctgcctcacgtgcactgtggtggccgtgtg

SEQ ID NO: 41560 - DNA, 488 bp, Zea mays
  Clone ID: MRT4577_137904C.1
ctgaagtggtcccgattaagaactgaacaggttggttcatgtgcaagccagcctgccgccgacctgaggcgcacctggaagaaatcgttgttgactacggtcgaccgccagctctggccctactaacacacttcacaaggtaataaaactgattgatcaatgtgtgtgtacttcacgctcgttaactaatcgtggcatagattcgacccactaaggcattggatacactctcttcttaccttaaacttccccacactgatgttaagattctaatgttagcatggataatggtctttgataagtaatgctattttaccttaaatgaatgcagaactggcttgaaagctcttgccatctgcattattagtaatctgaacacagcattgcctactgttcaagagttaccgggcatcatttgcagatttctacatatattcaagccattttgcctcacagagataataataaatgtatatgaaataccagct

SEQ ID NO: 41561 - DNA, 402 bp, Zea mays
  Clone ID: MRT4577_137905C.1
ctttttctttcctttttttaaactggatttcgattcgtctagttttaactggattttataagcgcgggtagtaagtaactggtgtcgaggattgaacttgctatttgtgaatgactggagtacaagctaggtacaaaatgaatgaattaaactaaactagtctccggacgagccagattagcaacgctgacagtggactaaaaagctgcagctggcgaaagcagttcttttggaattacgaaatacgtagtaaagtcacctcaccacttcaataggcagcatcgctgcagtctgtaggagctcgatatcctgccgcggcagatttctgaaatgtcataatagttccccccaacatgtcaatgttggaagagtacagcaactcgcatctacatgtggcagagc

SEQ ID NO: 41562 - DNA, 635 bp, Zea mays
  Clone ID: MRT4577_137906C.1
ggtacccgggccccctcctcgagtttctccccccccccccccccccccccccccccccccccccccccccccccccccctcctctctttttttttttttgcccccagaacaactggatagtttaaattacaatttacaacacagtacaatttgtttttacaacgggtttgacaaaaacccaaaatcagaaggggcccccagttcctcccagttgttagttagttagttaggagcaggggggtgacccctccacgttttttgtactcaaacgcgggggtcacgagggggcccccccccaaaccacaaagttgttaagcccgttgcatacaacaagggatgatttttttacccccactttgggggggcacgaggggaccccccccgaacgaagtttgttggggagcgcacatttgcatgaagggggggtaaataaacacaggttgaccgagggatcagcgtcacaaaaaaaaaaaacacgtacgtactccttggtgggcgctaaaaaccagcccccgttggttttggttagcagggcataacatagttagttaaaaacgggggccccttggaagcctccgggccgggaaccactccccaccattgtcctcgccgtcgccgaactttggccccgggtc

SEQ ID NO: 41563 - DNA, 350 bp, Zea mays
  unsure (1)..(350): unsure at all n locations
  Clone ID: MRT4577_137907C.1
ataggaaagacgagaccttttatttaaattatttttaattcaaagaaggtaggggggggggggccaaaaggggaaacccccattgggggggggggacggggggggaaaaagggagaggtgggggggaggccccccccggggactcccgggttggggaaggggttgagaagtttaaacgggaaaaaccctggttcgaaccggttcttgagctccgggttgggggtgcacttnnagaaaaaaccctcgatctccttaatccggggggcgaatttttggaaagccgccttaaacaggggctcctccagccacgaagggttcccaaaatttcccaagtactcctcgngggggga

SEQ ID NO: 41564 - DNA, 612 bp, Zea mays
  Clone ID: MRT4577_137908C.1
agtaacttcccttcgtctgcttcccagagaccagccatggcgatctcccagatctcaccgcatattcctggccatccttactcctggccgacgacttcgccgccgccccagctgcgcttgtgtatggcgacgacttggtgtcccttaccgaatccacgttctacaacgaggtattaaaggaccgcggcgccctcgtcgagttctacgccccctgctgtggttactgcaataagcttgctcctgagcatgatagacttggtggaagttgtaataaagatagtctgtcttgcacttcgctaacgttgattgtgatgagcacaagagattgtgcaggaagtatgaagtttccgtccatccaacaatcctagtgcttcccgaagggatccttggaggccagaaagtatgaaggacaacgcactgtataagtccttgctgaatttctcaatgactgaaggaggtacataatgtacagctgataatcattccttcaagtgttgcggttctcaacccagagacctttgactctattgtccgtgatgatagcaaagatgaccttgctgagctctatgacccatgatgtggtcactgcaatagtcttgcaccgatacatga

SEQ ID NO: 41565 - DNA, 298 bp, Zea mays
  unsure (1)..(298): unsure at all n locations
  Clone ID: MRT4577_137909C.1
gagattgtccaacgtcactgggccgcgcccgggccagtccgcattcgccgcaaacggacgcacgcatccccgttccccccgcccgttgtggtcgccacgagtgagtgctagggtggcggcgtgcggagcgggcggtggagggcattccgatgaaggcggatacagggggtgggtggtaggcggacgaggccctctcatacgccgaggagggcgaggtaagggagaggcgcaggaagtaggcggngcgcgacacgcgcaggagcagcaggccacacaccgatccggagatcccgccgga

SEQ ID NO: 41566 - DNA, 666 bp, Zea mays
  Clone ID: MRT4577_13790C.1
gccggccgggacgcacgcccagacagacgagaccatatcggggaccctcgcggcgcccagttcccgagcgaacccaacccactacccacagccagaagcaaaagcccctcgccttttccgcgccttggttctcctcccgtccatccgcggcgagaacgaccgacgacgacagggcgagatgtgctgctgcccgagcaaggcgtgctgcatctgcacgctcatcgtgctggtgctggtggccgtcggcctcgtcttcggcttcggcgtctacacccgcggcttccacaagctcaccagcaacatgcacctgcaggacgatgcatacggccgcggtggcgccggcggctccttccgcgcctacggccactttgccccgccgccgtactagaaggaccgccgccccttctccgagatctagggcctggatgctgggcgattcgagccccgctccgctctcggtggagttggatgaactgccgccgccgccgccgcctgtaaaaaggaaatgtatcatgggattttcgttgtttgctgcattttggttttgtttgaaccaatcgactggattggctagtaattcgatttgttgaagactgagtgagattcgacaacatattatcattatcccgacataacaaaaaaaaaaaaattgcggccctcagcctc

SEQ ID NO: 41567 - DNA, 185 bp, Zea mays
  Clone ID: MRT4577_137910C.1
atgcgttggacttctttcataattgttatctatgtcaaaaatatgagcccgtcagcttagttgaacaagttacttttctaatgcaattttccttccatatgcatccactctggcatgtttcaagaagaaaggtttactcgctacaaaggttttcaaggataggtgccttaaaaaaaatttctttt

SEQ ID NO: 41568 - DNA, 841 bp, Zea mays
  Clone ID: MRT4577_137911C.1
ccttccgggaaggcacgggcgcctctggtttcgtcgtctccgcccgtttgttcccccctcttccatggcgtggcaggcagggtcatctcggcacctggctggctataagtagctcacctggctgcatccatcactgcaatcaagcacgcatccgcgaaatccaagagcagcagcagcagcagaccaagatcgagggagggaggaagacagacagacagacagagagatggagcggatgagctcgtcggtgcagtcctgggtggaggaacacaagctctcgtccatcggagccgtgtgggcgacggcggtgggcgcgtcggtggcgtacagccggcggagggcgccggcgcgggccacgagcctgcgcctcatccacgccaggatgcacgcccaggcgctcacgctcgccgtgctcgggggagccgcgctcgcgcaccgctattacggcagcagcgagaggaggcagaggcaggaggacctggactacggcttctactcccagctgccgccggccaccgacgccgagggcaacgagaacgagcgctggagctggtagtggcagggcagactagcagtgagtgaccagtgagccagtgacttccgccttcagatgcatacatcagatcagagagaaggaaggaagagggacaataaatagattaattagtactagtagcaataataataattgcttgcctgtttgccaatcaatgatacatgacgtggcgcctgatcctgttcgtcacggcccataaacccaggaagcagctagcccatgtatgtgtggcctgttatgcgttaccgtacttcgttttcactcgttaatagtactctagatttc

SEQ ID NO: 41569 - DNA, 295 bp, Zea mays
  Clone ID: MRT4577_137912C.1
aaaccaaagtttccttagaattttttttttgtaaaaaggggtccttttttgtttccaacgattggagggctttttggttttttacagggggactgataggatctaaatgggttgagataggggaatagcctataaaaatggtttacaaaacatacaatttttattggggcctagggtcactacaatttttgaccacttgtttttttgaatgcctttgggaaggttaacaaaataaagttttctgttttttaaaacccccttttcaaatggggggattatccacacatttttttta

SEQ ID NO: 41570 - DNA, 219 bp, Zea mays
  Clone ID: MRT4577_137913C.1
atgtcgcgtggggaaaaatagacaatcccttgcattactgaacttggaggcaagctcagggttctttaatataaattctttatttgaggatacggtggaattacttgcctcaaccggaggagaaatacaacctttgtactgtgtactgaaagataactatactgccttactttaaattgggaaatcctatagaaattataccaagatttttatcatgat

SEQ ID NO: 41571 - DNA, 610 bp, Zea mays
  Clone ID: MRT4577_137914C.1
aatcaagcacgcatccaccgaaatccaagagcagcagcagcagaccaagatcgagggagggaggaagacagacagacagacagacagagagatggagcggatgagctcgtcggtgcagtcctgggtggaggaacacaagctctcgtccatcggtgagttaattaattactggcaccgaccgaacacccatccatcgacagcagatcagaccctgcaggccggccggcaatggtgcgctatcctagatccaccaccgttcactgactagacatgctgcttgctgggcgcacaggagccgtgtgggcgacggcggtgggcgcgtcggtggcgtacagccggcggagggcgccggcgcgggccacgagcctgcgcctcatccacgcagggatgcacgcccaggcgctcacgctcgccgtgctcgggggagccgcgctcgcgcaccgctattacggcagcagcgagaggaggcagaggcaggaggacctggactacggcttctactcccagctgccgccggccaccgacgccgagggcaacgagaacgagcgctggagctggtagtggcagggcagactagcagtgagtgaccagtgagccagtgattccgcca

SEQ ID NO: 41572 - DNA, 381 bp, Zea mays
  unsure (1)..(381): unsure at all n locations
  Clone ID: MRT4577_137915C.1
aaaaaaaaaaaanaaaaaaaaaaattaaattttaaaaaaaaaaaaaaaaaaaaaaaacagaacagataaaaaaaaaaaaaccaaaacacccccacccccgggggggccgcacaaaaggaacaacccaaacccccccgggcacgcacggaacaacccccgcataggggaacccaaaaccaactacccgggccgccctataaaacggccggacggggaaaaacccgggggacaccccactaaaaccccgggaggaacacccccctttccccagcgggaggaaaaaaaaaaaggccccccccgagccccctcccaaaacatggccccccccgaggggggagggggaccccccctctcacggcacaaaaaacacgcggggggggg

SEQ ID NO: 41573 - DNA, 368 bp, Zea mays
  Clone ID: MRT4577_137916C.1
agcaaagagacgaatatgaaagaactgttgaagaagaacgcaagagaaaggaacttgaacctgaagtccctgaaatcaccttcaaccttcttagagccaaatacaatgatttaaagagaggaatcgacaatactgattatataaagaaggctttggaaatctccagtaacagaaaacaagaaaaggaatatttggacgccaagtatgattataaaaataaaagagttgtcaaggaacccactgaagaagataaggctaatcctgatgttattcttggattcaagagcggtattttggaacaattgaatactggaagatacaagatttctcaaaatgaagtcttgagatctcagttagaaactggaaaa

SEQ ID NO: 41574 - DNA, 111 bp, Zea mays
  Clone ID: MRT4577_137917C.1
ctcatgcgttcgccatctcgttcttgcacacatccaacaaaacctgcggactaactctgatcatatacgtcgtattatacatcaggaatggtgatggccgttcgtctaggt

SEQ ID NO: 41575 - DNA, 378 bp, Zea mays
  unsure (1)..(378): unsure at all n locations
  Clone ID: MRT4577_137918C.1
gggggggggggggattcttacttaatactttctcgctttggcccggccgcggccacccactctcgggtcaaacattgacattcttatcaggatttttttggggggaaaatgntatgttttttttgttcctnnattaannacaaaaatttggggttgagggagttttttttttttgnggangagggaggagagtgctgggggaagaaaagcatcgagggctggaggaagaaaagcaatggggagcaacctttactttttctcttttctcctcctgtgtctttcttctctctgtgaattggtcggggctctacaggatcttaatccttttccgctccatcgggggggggggggcgggggccccggggggggctgtgtgat

SEQ ID NO: 41576 - DNA, 191 bp, Zea mays
  Clone ID: MRT4577_137919C.1
ctcaacacattgctgcgcgtcccttccgccccaggtacttttttttttttgacccctaaaggctactcctccgccgaggccccagtcctgccggaatataaatcccggagcaacttgccacggctcatccctccggcgctgaatcgacaatcgccactcgacaaaaagcccggccgaaacccacccgaacc

SEQ ID NO: 41577 - DNA, 120 bp, Zea mays
  Clone ID: MRT4577_13791C.1
gtgagatgagacattgcaacaaagctctaaagaagcatacttccactgtggatagaataacgcgcctgaaagtcatccagcattcaagcgccgcccatattcgatggcacctgctaaaaa

SEQ ID NO: 41578 - DNA, 216 bp, Zea mays
  Clone ID: MRT4577_137920C.1
cagtctggcgtaggtatgtgtgttgacctcaagaacggggagctctcatctaaggctgtctactctatgctgcggattgagcagcttcatatacgcaatggattacatattcgaccagctgtttcatctgccgcctttctagcggtctagactgtttgacgacatgatacacgtacttgttgccctcaatatgagctgagcacgctggatgtttca

SEQ ID NO: 41579 - DNA, 317 bp, Zea mays
  Clone ID: MRT4577_137921C.1
ctcctttattacctaatagaaactacgtagggctatgttttgaactgtagaatctaaattcccaatcaaacacatataactatctattgcagatgatataagaatgaaactggatactgaatagttaagtatcgaactgtaagcataatactactgaacttacactatcattgctgttaagtaaaggcaccaagttcgtttccaattgctatttaccgaagttatttcataaaccgctccttggttgtaaccttcccgcatgaataagatgcatgtttttgagttaaaaaacatggacatagctgtttcctgggcga

SEQ ID NO: 41580 - DNA, 355 bp, Zea mays
  Clone ID: MRT4577_137922C.1
ccagccgacacgggcgcgccacgggggagcccaaagcccgcacgcgcagtccccggactcccgctgcgccccggcccgcccaccgctcagaaccggcgccaaccgccggcggagggacgctaaccccgacagacataggcaacagagcaggcagcaacctcaagcagcccgcggaaatcaaccagaaggaacgccccaacctaaggacaacccaccagggactgcacccgagacagaagcagcaaacaccgcccagacccccgatagaagcgaccacaacaacggagaagcaagcccaacaagacctcgccactgcagcccaacaaggaaacaagcacaaccgggacaaacacac

SEQ ID NO: 41581 - DNA, 171 bp, Zea mays
  Clone ID: MRT4577_137923C.1
accttaaccagttttttcaaagttaccatatgccaaaaacattttaggcgaaagctacaaaatttgatcacacaaaacaagtatgctttggctcggaaaagatacatggttcaaactgtccaatgcacatgtttgcttttttcaaaaaactacattatcttctaaccctaa

SEQ ID NO: 41582 - DNA, 449 bp, Zea mays
  Clone ID: MRT4577_137924C.1
aaataaaaatataacccgggcgtggggttatatagacaaaaaataacaccccatacccaaacatataaaccaaaaaaaggtgaaagactaatgccaccactcacgaacagaaaataccagcctgacacattaagggaacatcaccaaagagcaaatgaatcagccataccaaagcaagtcacttattgggcaaacaacgatctgacacgaacaaaacaatgccacgccagctacacaaatgaagaggggcacgctccaaaagaagcctaccacctaaaaagggcaagggatgcataacttgtgagcacattcacaaccaaaagaggtagcacaaacactacagcacctttaagaagaaaaacgcagcccactgcagatgctaccagaaaacaaaaacccatgtcggcagtgcacaaaggggaggaatgacattagaccacttccatgtc

SEQ ID NO: 41583 - DNA, 588 bp, Zea mays
  Clone ID: MRT4577_137925C.1
gcagggatgcaccccagcagcaaggaagagaaggagcacaaggctgtcacccacctcaagctcgcggtaatctgacgtcgatcacctctttgacgtggatgccgatcccggcagagacgatatgaccggcggtatcggcagaaatccagcgactgctctggttcaaggggaacgaaaccctaaccccgcgcttctctcacttcaggagacctgccttatgcccttcccagatctctggtatcgttagcatctggctgcaacctcctctacctctcccaaaaggatctcccacctccacgtgcatctctccttcatgggctgcttctatcgcgtctcactccgccgtcgagatcaatccgatgctcctcagccggaaccttgaggatgtggtctagactaacataggattcctactgcagcgcggcctaaatgcttctaatgttctagagttcccggtgttgatacgcatgaggcccgacagtgtcaggaaaagggtgctatgcggtgacaacattggtgtgacgcgcaagacagggatgttcaagagtgtcctgtggcgcgactattgcgctggtcccaactccagtg

SEQ ID NO: 41584 - DNA, 394 bp, Zea mays
  Clone ID: MRT4577_137926C.1
atgagctacaattacagtccttcaccaccaaggggctacaggagaatgcgtcgcagggcaagtcctgatgatcattatggtattcgcagtatggatctcccaaccagtcttctggtcatgaatctccgtcgggactgcatgccacaatacctgcgtctcccatttggacagtttggtcgagctaaagatatatatcttccaagaaattattacacttgactcatcacaatcctaaaagattattgttgcagagaaggaagaaatagagaaattcaattaaatgatctgcaacttaaaagagttctcattactgctcaagacatgggaaaaaatatagttacaagtttaagagatactcacatcatgaagagtttcaagtctgaatttaaactct

SEQ ID NO: 41585 - DNA, 642 bp, Zea mays
  unsure (1)..(642): unsure at all n locations
  Clone ID: MRT4577_137927C.1
ctttcactttatgaaatctctattaactatttttatctgccttttctaatttatcatttgttttgctgtggggtgcatgttgcattagctgtggcggattgactgtactgtatactagctccatatataagctttcaccatacattcagatttgtagcatgaaaagtgacactgggcctataaagcgactaaggctgttgtttcgcttgagataatagttatatgtttcataatgttatttccttcaattaaaaaccaaatgacatggattttattttcatattttgtaatttttaatgggcataataaggcataggaataataacttacagtgattttctgagacaaattagttgttgaatattttccttgtgcgaaacaacacgatagagtaaaatacaccagaggtacaagtacaacttaagtaggttatagatcttacaaaatgctcaatcgggtcacaattgtttttttatgagtgcatttgctacatggattgccacttatcacgttcttgtgatgccattttgacaaaggaaaccttgctgtaccattttttagcaaatagggctgctttaccccaagtcattttcactgttttgtaatagtttcttagaatggactatgtgatggntccatact

SEQ ID NO: 41586 - DNA, 1894 bp, Zea mays
  Clone ID: MRT4577_137928C.1
gcatgaagtgttcgagtaacatcgaaggaaccctaattccctagaccaactttaaaaccctagccgccgctcccagctccggagctgtctgttgccaccccgtccttggctaccgtagcagttcctattgaagaaaaaaacttcaccggtggatttcgtctggtatctcatgaccaccgaacctcaaggatcacatcaacatggttctaaacgtgatttgcattcatgccgaaaaaatgtacccggcacatcattcgtctcagatttgagagatcacatccacgagttcatcaacgcctcttctgatgaacacatgacatgcttcacaaagactatcaagaagatgttcgggatgtcaaagactgtggcacataaatcgtcggaagcagagcaagctgggccctcatgattacatctcaccatttcatatttgactaggtagcagccagtaaacatatcttgtgttgataacactttgtccacacttttgactgattatgtacacttttgactgataagattatgtacagttacatgggccatttctgtaataattttactgtccaaataccaaactatcaaaggagagacacgtctctcacacacaatttgtgtgcaaaaacaaagataaaatcccacaagagattctctcctgtagcaggatcattgtgttttttcattctgtttctgttcttatcctttttgtgtattatagacatgtctatctacaagtgcgtcactagcatgaccagaactgcacaaactaatctagccgaggcaggaagccaactgctccctcccgacgccatggaggagtcctgctggtaaagcgagctgaggctgaatcccgggttggacccatacagccactggacgccttcgatgtcgtcgacggtgagctccgccttcttttcccgcgggctgaggctcgggtacatgaccgccttgggtgacgacgagtgccccagcccgaggacgtgcccaatctcgtgcgtggccacggactccaagtcgacggccgagtgcaccgtttccgtgtccatgtcaaccgcccacctctctgcggcgtcgaggtggaggcgcccgttcttcggggagaaggcatggccgagcacgccgagcggtccgtcgagggggatcccatcaccgtggctgcccacgtagaagcccaccctgatgtcggccgcctcgtagtcttcggtctcgacgaagcccacggggatgacccgcgcccaccgcgcgaacgcgcgccggaacaccgcgcgcacggtcccggcaggcaggtagtcgacggtggcggtcggcgagatggcgtacgtgagcacgagcgggtccggctgcgtccaccgcggctcacccttgaagaacgtgaaccggctgacggcgccgtccgggctcgccgccgccgaccccgagagggataccggcacagcgtggccgccgtcgccgacgccgcagcgcggggccatgatccggtccagcgtggtggagtcgagctgccccgtgaccggcaggctaagcatggactggtaccgccgtacggcggcctccatgtgcgcgtcgaacgcgtcagtcgtcggctcgtgctccgcccccgccccaggcatgtacccgaacctcgccaggtagcgcttgagctcgccgaggccctcaacgtggctgcctcgccgcgcgtccagcagctgcttgaacgagcgccacgcggtgccgtcctgccggtgaaccgtcgccgtcacgggcccgtcggcggtcacgtggaccaaggagacggggagggggccaagcaacaggaacagcaccgatacgatacgaggcgcgcgcgacatggcagcatcagagccaagcaagctgccccgttaggctatgcgcggggcgggcggttattcccgttgca

SEQ ID NO: 41587 - DNA, 999 bp, Zea mays
  Clone ID: MRT4577_137929C.1
cctcgaggccggtcgggccgggccgctccccttcgtccacctcgcgtacgcgacaaactaggccgaccgccgccgccctacgctcagctgcccacctgccctggtcttcgactcttcgtcgtgcgctttgccggcggcgagcacccatcacaccaggtgctttattgggtccgtccatacggcaggatggcgctaaggggggtctggcagctgcagaagctcgtggtaaactactgcgactggggagggagcagcaggggcatcagggccttcatggaggcacatcttccagcctttaaggaaaagaatccacacttagaggtggtgacagagcttgtccgcggtcaacatcctaacttgaagggaatttacaaaaaccataacgagcgagtggtatgcgtgagaaatttaccgccagaggaaatactcctgcaagccaccaggctaaggaactctctgggcaggaaagtggtgaagctgcggaccagacatgtaacgaaacgccccagtgttcaggggacgtggacgacggaactgaagatgtgaagcaacaagccaaggtgtttcattgttctttggtggtctgattgcagaaaatgtcagctgtgtcgataactttggtagagctgccgttaggcttgcctgtttgaatagctaaaccgtttactccatttgttccggagtacaatctggtaataacataggagtacacttgactttcttagaccaggccgtcacatttgatatttcagtctggtgatatctgtctcctatattagaccagtacaatgtttcaactcgcgagatactgcgaacacagaattttgctatgctatggccattaccaaggccgtttctaaggcccatgtttaaaaaaaaaaaaaaaaccatgttcctgatattgacagacagttataatgcaaaaagcgacattattttcattcagctgttaagttgggaaaaaacaacctgcttcgtatattagtcccatgttttcat

SEQ ID NO: 41588 - DNA, 369 bp, Zea mays
  Clone ID: MRT4577_13792C.1
aatcccaaaagtcgcccttgcccccaaccctattgaacccgaatccacgggggcggagcttggcgctgtatggtgggcgtgtacgaaagccgatgtggaggcggacgacttctagctataggacgacgacctcatggactgatacgccgggacggatccagcaacgtgccccacctcgcgtatccgatccaccactgcgcggctgcacgactggccgagtactaccgggtcacgcggcttgcgcgaggactctcctactcctccgcgccccgatgctcatgcattggcgcgacggtgaccgccgatctctagtttttcggggggcagcttatcatcaaatgaatgtgaatgatggactgcgttggctac

SEQ ID NO: 41589 - DNA, 6051 bp, Zea mays
  Clone ID: MRT4577_137930C.1
agtgatgaccaagttggtaattgagaattccctagttcagagatagaaagaagttgagaatgagaagcaagtgaggcgcgtttgctgggaagtggttcttgtgaggtttaggagttcacccttcttttcttccccttctagaaatggagatggtcctacggtcgcagagccctctctgccttcggagtgggccggtgctcatttttcgaccaaccgtcgcgggcggaggagggggcactcagtctttgttgaggactaccagatttgcgagaagaagggtcattcgatgcgttgtagcaagtccaggttgtcctaataggaaatctaggacagcgtctcccaacgtaaaagtagctgcttatagcaactatgcgccaagactcctcgttgagtcaagctccaagaagagcgaacaccatgatagcagcagacaccgtgaagaaactattgatacatacaatgggctgtcaggttctgatgcagcagaattgacaagtaatagagatgtagaaattgaagtggatttgcagcacatttctgaggaggaattgccaggaaaagtatcgattaatgcatcattaggagaaatggaaacagtggatgaagctgaggtcgaggaggataagtttgaggtagatacctcaggaattgtattgcgcaatgttgcagttcgggaagtggatccaaaggatgaacataatgctaaagatgtatttgtggtagattcgtcaggaactgcaccagataatgctgcagtggaggaagtggtagatgaagctgaggttgaagaggatatggttgatgtggatatcttgggacttgacttgaataatgcaacgatcgaggaaattgatttgatggaagaggctttactggagaacttcgacgtggattcaccaggcaatgcttctagtggtcgaacctatgggggtgtggatgagttgggtgagctgccttcaacatccgtggattgcatcgccattaacggaaaacgtagaagtttgaagcctaagcccttgccaattgtcaggttccaggaacaagaacagatagttttaagcattgttgacgaagaagggttgattgctagttcatgtgaagaaggccaaccggtggtagattacgataagcaagaggaaaactctaccgctttcgatgaacagaagcaattaactgatgatttccctgaagaaggcatatctatagttcacttccctgagccaaacaatgatattgttggatcctcaaaattcttggagcaaaaacaagaattggatggttcttataaacaagatcgatcaaccactggattgcatgaacaagatcagtctgttgttagttcacacggacaagataaatcaattgttggtgtgcctcagcaaatccagtacaatgatcaatctattgctggttctcatagacaagatcaatcaattgccggtgcacctgagcaaatccaatccgttgctggctatataaaaccaaatcaatctattgttggttcttgtaaacaacatgaattgattattcctgagcctaagaaaatcgaatccatcatcagttacaatgaaatagatcaatctattgttggttctcacaaacaagacaaatctgttgttagtgtgcctgagcaaatccaatccattgttagtcacagcaaaccaaatcaatctactgttgattcttatagacaagctgaatcaattattggtgtgcctgagaaagtccaatccatcaccagttacgataaactagaccagtccattgttggttctcttaaacaagatgagcctattattagcgtgcctgagaaaatccaatccattgtccattacactaaaccaaatcagtctattgttggcttgcccaaacaacaacaatcaattgttcatatcgttgaaccaaaacagtccatagatggtttccctaaacaagatctatcaatcgttggtatctccaatgagtttcaaacaaagcaactggctactgttgggactcatgatggattgcttatgaagggtgtggaagctaaggagacatctcaaaagactgaaggggatacacttcaggcaacgttcaatgtcgacaacttgtcacagaaacaggaaggcttaactaaagaagcagacgagataacaattattgagaaaatcaatgatgaagaccttgtgatgattgaagaacagaaaagcatagccatgaatgaagaacagacgattgttaccgaagaagacattccaatggctaaggttgagataggaattgacaaggccaaatttttacatctgctttctgaagaagagagttcatgggatgaaaatgaagtgggaataattgaggctgatgaacagtatgaagtcgatgagacatctatgtccactgaacaagatatccaggaatcacctaatgatgatttggatccacaagcactatggagtatgcttcaagagcttgctgaaaaaaattattcgctgggaaacaagttgtttacttatccagatgtattgaaagctgattcaacaattgatctctatttcaatcgtgatctatcagctgtggccaatgagcctgatgtacttatcaaaggagcattcaatgggtggaagtggagatttttcactgaaaaattgcacaagagcgagctggcaggggactggtggtgctgcaaactatacattcctaagcaggcatacagaatggactttgtgttttttaacggacacacggtatatgaaaataataacaataatgatttcgtgatacaaatagaaagcaccatggatgaaaatttatttgaggatttcttggctgaagaaaagcaacgagaacttgagaaccttgcaaatgaggaagctgaaaggaggagacaaactgatgagcagcggcgaatggaggaagaaagggccgcagataaagctgacagggtacaagccaaggttgaggtagagacgaagaagaataaattgtgcaatgtattgggtttagccagagctcctgttgataatttatggtacattgagcccatcacgactggacaagaggctactgtcagattgtattataacataaactcaagacctctagttcacagtactgagatatggatgcatggtggctataacaattggattgatggactctcttttgctgaaaggcttgttcatcatcatgacaaagattgtgattggtggtttgcagatgttgtcgtgcctgaaagaacatatgtattggattgggtttttgctgacggcccaccagggagtgcaaggaattatgacaacaatggaggacatgattttcatgctacccttccaaataacatgactgaggaagagtattggatggaagaagaacaaaggatctatacaaggcttcaacaagagaggagggaaagggaggaggctattaaaaggaaggctgagagaaatgcaaaaatgaaagctgagatgaaggaaaagactatgagaatgttcctggtttctcagaaacacattgtttacaccgaaccacttgaaatacatgctggaactactattgatgtgctttataatccttctaatacagttctaactggaaagccagaggtttggtttcgatgttcctttaatcgttggatgtatccaggtggggtgttgccacctcagaagatggtacaagcagaaaatggttcacacctaaaagcaacagtttacgttccacgagatgcctatatgatggacttcgttttctcggagtcagaagaaggtggaatttatgataacagaaatgggttagactatcatattcctgtttttgggtcaattgcaaaggaaccacctatgcacattgtccacattgctgttgagatggcaccaatcgcaaaggttggaggtcttggtgatgttgtcactagtctttcacgtgctgtgcaagatttaggacacaatgtggaggttattcttccaaagtacggttgcttgaatctaagcaatgtcaagaatctacaaatccatcagagtttttcttggggtggttctgaaataaatgtgtggcgtggactagtcgaaggcctttgtgtttacttcctggaacctcaaaatgggatgtttggagtcggatatgtatatggcagggacgatgaccgccgatttggcttcttctgtcgttctgctctagagtttctcctccaaagtggatcttctcctaacataatacattgccatgattggtcaagtgctcctgttgcctggctacacaaggaaaactacgcgaagtctagcttggcaaacgcacgggtggtattcaccatccacaatcttgaatttggagcgcatcatattggcaaagcaatgagatattgtgataaagccacaactgtctctaatacatattcaaaggaagtgtcaggtcatggtgccatcgttcctcatcttgggaaattctatggcattctcaatggaattgatccggatatatgggatccgtacaatgacaactttatcccggtccactacacttgtgagaatgtggttgaaggcaagagggctgctaagagggcactgcagcagaagtttgggttacagcaaatcgatgtccccgtcgtaggaatcgtcactcgcctgacagcccaaaaggggatccacctgatcaagcatgcgattcaccgtacactcgaacggaacggacaggtggttttgcttggttcagcgccggactctcgaatccaagctgattttgtcaacctggcgaatacgctccacggcgtaaaccatgggcaagtgaggctttccttgacctacgacgagcctctctcgcatctgatatacgctggctctgacttcattctggtcccatctatatttgagccttgcggcctaactcagctcgtcgccatgcggtatgggaccatcccgattgtccgcaagactggagggctcttcgacactgtcttcgatgtggacaatgacaaggaacgagcccgagatcgaggccttgagcccaacgggtttagctttgacggagctgatagcaacggtgttgactacgcgctgaacagggcgatctcagcttggttcgatgcccggagctggttccactccctttgcaagagagtcatggagcaggactggtcgtggaaccgacctgccctcgactacatcgagctctaccgttcagcgtccaaattgtaataatccaaccaacggccaatgtagtgtgttgtctgcaggtctcagatgcagccattcagcttttgcaggttcctgggcattgctgtacagcctccttgtctttagttagctccattccccgaggagcacagtgcaattttttatcctcagttattatgcatagattgtctcagtagaatgctttcttcgggcatgtatgtttgtttcctctgttgttgaattctggtgttaagtcgtgtataggaatctacaggaaatgaaaaagtccatttcctgcttcaaccttttagggctaccatgcacatgagacctttcaagtgcaaagaatattaggactagactactagtatgtgaactctatttttccaagagatttcaatttttccaatgaaaaataaactaatttttcttggaaaaatggaaatcccttggaaaaatggggttcccaaactagcccgtagagtatagatcatagaattggtctagtggttcctcgagagagaaaaaaacatagacttttcttgtcatatgcttatttaagtttattttgtacaaactttgagaaccttcaaaaacaccccaatggctggttaagtgaccagggaaataaagaggatctatagggaggaatcccccgcctctctctcacagatgttgcctagcaccggccagcctcatccgtccagtggaattaaggttggttgcgacgacagcccatcaatggaaaccaacctcgtgccccgtgccgggatctaccttccttcctcaccaccacgccgatctcaccttccataggagcttcctatgcactgttacctattataggtacatgacattgtacatctttgtatgaacttacatcaatgccaaaaatccggaattc

SEQ ID NO: 41590 - DNA, 286 bp, Zea mays
  Clone ID: MRT4577_137931C.1
ccggccgggaaaaaaaattacattttgtctatccgtgaagaagaagagtatgcaagactggcacacacaccccaaaccaagtccaaaacacccccgttgacatatatactactgcgtagtttagtactgcttgtcggcccaacattttgtggcgatgtaacgagctgcttgtactgcttccaagttagttactacatattcatgtttgtacagctacttgtgtaatttcgattccttcttctgcaaagttcgaactactctgaaaaaaaaaaaaaaaaaagcggcc

SEQ ID NO: 41591 - DNA, 168 bp, Zea mays
  unsure (1)..(168): unsure at all n locations
  Clone ID: MRT4577_137932C.1
ntgttattttgtggtacatgtaaagcactgcaatggcatttttaatgctttttggccaccagcacgccgggcatagcaatcgaccgacttaacaatgagctactctaccaacaaagcaaaacaaaccactatacatttcaggacaatttcagacggggtcgcttcttc

SEQ ID NO: 41592 - DNA, 483 bp, Zea mays
  Clone ID: MRT4577_137933C.1
cctctctaatggtagctaagctgctgctccaccggggcggcagtcgatctagaactcgaggatcccacttgctgcaggacttccgcacgagggtggtcttaagacatcatgtatagaaactgctgggcaacttgcaaaggcacatattgattatacatccaggcctgccattgtgttcacgatatcagcaaagaatgaaaagggatatggaccagctacacaagttcggaggcttcaaggtaacaataagaaagcacctttaaatcgaattggtttttgtactgaagctattgcgatgatgattatttattataaactggctatgaagatttcgtatataaaagagtattctctggctggatttccagcagaaatgaactagagtttgtaaattgctcttaaaaagtattcgctgaattattgatccaaataaaagaaaagaagcatagactctctgaaaattagtatatgagttctttctta

SEQ ID NO: 41593 - DNA, 303 bp, Zea mays
  Clone ID: MRT4577_137934C.1
ttgttttttttttccgacggacggaaccggcaactcaaggggggccggtgccgcgatggccggaacctgcgcctctcgcggggcgcagaagattacgcccgcggagcacccccctgccacaccgcacgcctaagcgggcgggggggggggggtgactataacggtcggttgcagcgggggcagcgcagcacgggggcaccctccggactggcggccggccgggtaccccagcgcctggagcctggggccagggccggcgctgccggcgggggcggccccggccgtggcggcggtggcggccgt

SEQ ID NO: 41594 - DNA, 473 bp, Zea mays
  Clone ID: MRT4577_137935C.1
atggttacatgagtaccctgggaattacggaccaaaacccgcaggcgggccagcccgcccgagagggagggggagcacaggggggcggaaaaaggggcacagggggcgccggggggaaagggggagccggggaaaagggcacacagcacaagagccggaaacagaaaaagcaaggcggaggggccaaaagagcgagcgaacaaaaaaaaaaagaaaagagccaaaaggccaaaagccaggagggaaaacagaaaaaccaaaaacacaaaagaaacggccaacgcacggaaagaggcaaagtggggaaagggggccaggggggggcttcaaaaaaaaagggaaacgggcaaaagaggaaaacccgaaaccgcctggccccgagaaaggtgcatcaagcagaaaaaccgggaaagccccaaagggcgaaaaccccgagcgctggagagaaacgggggaacataacacgagcgggg

SEQ ID NO: 41595 - DNA, 174 bp, Zea mays
  Clone ID: MRT4577_137936C.1
ggggcggacttcccgggcgagtctttgcatttctacactttcgtgcccttcgttcccctgcctccgccgtcgtcgcagccatggcgttgcggcgctgactactacgactactcttgagccgtctttttcctgagagatcttaattctttgttccgggctttattggaacaagaa

SEQ ID NO: 41596 - DNA, 915 bp, Zea mays
  unsure (1)..(915): unsure at all n locations
  Clone ID: MRT4577_137937C.1
aatatcaattactgatcagacatttgaacatatgtgcttcctgctattcacacagaacacaatttagtactataatgaaaaaggttactacttggttaaccaagatgttcatatattgtagttaataaaaagttgtgtaaacaaaacttcatcagaatgtgcaccagggcccatgttgaaatcttccataccacagatccatgtattggtaaggggcaatgctcacaagcagaattgttgacagcggaagctccatttcacctgcgtttccatttcacctggttcagaatcgatgggggttgaattaacaatcgaaaaaacaggacgtgccgaagtgaagcttaatctaaaaaatttagcagacaataaatcaactcacacatacacctcaggacccaacatcagagcttggagaacacaccgtttacaagctgtctctgggaacttttctacagaaggcatagcacaagagctgataaagttaacagatccaagatagcatcatgcaattatatataaagtaccaaaccgaagcagcagccggacaaacaaggtcgcaccagaccatgcaattttcaggtaccaccgtaccatagcggactgatgtggaaacacaaacaccaaactaccaaccaaccaggcttctagccatcgagttgaagcgtctgggccacgccaccacaaaagggaaaggagatgacaaggccttcactcccgaatcccgatgcctctgctcctcacctcacccgccccttctcacctgcgcttcctcacctctccagtcctcctcgcctcccgccgagtcggcgctctcctcctccaccaccaccactagcgcagcgccggctcggtccacttcctcgcgccgcgcaggaagacccgcccgcccccgcgatgagctggttncggaagctg

SEQ ID NO: 41597 - DNA, 320 bp, Zea mays
  Clone ID: MRT4577_137938C.1
cttctctcagcgtcaccatggtgcgaatgaatggtctggcagatgctctcaagtagcatctacagcgcggagtacaggggcatgacgccaggtcctcatcaggccgtgttccaaagtcatcgttcggttcctaactgtgatgatgaagcatggctacattggtgaattcgagtccattgatgatcacagagctgggaagattgttgtgaacctcacaggaaggttgaacaagtgtggagttataagccctagatttgatgttcaactcaaagacctagagaagtggcagaacaatctgctcgcatcacggcagtttggtt

SEQ ID NO: 41598 - DNA, 756 bp, Zea mays
  unsure (1)..(756): unsure at all n locations
  Clone ID: MRT4577_137939C.1
cattgggacctcgagccggcccgacggccagagcgggaggagaggcgggtactactactgcgccgtcgagcacgtcgtcaacgagctgcgcgccctggcgagcggcggcagcctgtgctggctcctcgggttcgggacgtaccaggcctacacgaagtgtcgggtggggcagccgtcgctggagagcctgtgggggctccagacgctcaccgtgcccgccggcagcctcgcgctcagcctcacctgcgccttcgacgacagtgccctaggcacagtcaatcagtccctgaaagcgggctctgacgcggatgggaacgggccggcgtcttgctggccgcttttgggcggcagccagctgagctccagatgctgcggcgccggcgattgctctgccgcgaggatcgacacgaaagcggcgttgtctcggcccttcgtctcgtcgtccagcctcccttcctggcttcagcattgccgtgatcatcaggagcctgctacgagccatcttacggatcttagcaagagcaagacttggagctccatctgcagcaggccgtcgcagcggatgaagctgcattttntccgcaccggtgtctccggcctcctccatatcctcctacgagcacggcggcgaccagtcgtcgcagacgccgcctcagcactcggggnttcctcgcttggtctcgacgcgcgnncactaaccggtgggaacccaagcgcgagaccagcgggaataaggccgccagcaggtcccacgac

SEQ ID NO: 41599 - DNA, 179 bp, Zea mays
  Clone ID: MRT4577_13793C.1
ctgccgcaggacatcgggcgggacctcatcacccccacgtacaatgagtaaacggtccgcaggatgctgaaacactaccagggagtaatggcacgcgctctagagggcttgtatttgttaaggcgcgttggcacagtcgtgggggggggtggtgtgaattgtgatgcacatcttcggct

SEQ ID NO: 41600 - DNA, 202 bp, Zea mays
  Clone ID: MRT4577_137940C.1
gaaataaaaaatatatgctagaaagatttgtttttattgtatgcttagattacaagggagggaggtgtgcagttagctggtagtgtatcctgccgttatcgccttatttgtacatggggggaaccgcttgataggctccattgtctgaccggatggtctaatattaatttcttggtcctaggggaacaaaatattaattaac

SEQ ID NO: 41601 - DNA, 544 bp, Zea mays
  Clone ID: MRT4577_137941C.1
ggaacacgtccatacgtgtgatgggcatacatcaaaatctgtcattctggcacctcttctgttaccagtagcagcaggggagcctgtttggatgatacatatgtaaatttgttctgcaattatgcttcctatttctttacattgtttaagttcatgttggatcaatatgtatgcagattagatgtatatagtaataattaaaatatactcatcgatttgcatacgccttctctacagttatgcacttatgctccaagccttgttccgttcaagtttgcttcacatagtaaaacatgtctccctttcacttgaacctaaactgttggatatgcagtttagttccttcgtgttcacatttgtctaaagttatggtttgttgtaaagagtgactttgcaaagatgcatgccccctgccattcttctttttggttaggcacaagtgatggtgcccttgacttgtctttttttcgttatgagttaatgcaactatatggactgattcaccgtggtaatatttggctttttctggtgcctttaggttaat

SEQ ID NO: 41602 - DNA, 300 bp, Zea mays
  unsure (1)..(300): unsure at all n locations
  Clone ID: MRT4577_137942C.1
cggatcgtggacgagacgcgtgngctcgataaaataatctcttgttctagatcgcgagcgccaccctttttgtgtacaggtgtgtttttttgacaacagaaaacaattgatcaacgtgaacaaaattgtaatcaagtcgaccttcaagtctcgctacgtagcagtgcaataaaaagagcagccgcgatggcgagcagcaccatggccctctcctccacggccttcgccggcacagccgtgaacgtgccgtcgtcgtccgccatgcgcgaggcgcgcgtgacgatgcgcaagactgcggcg

SEQ ID NO: 41603 - DNA, 182 bp, Zea mays
  Clone ID: MRT4577_137943C.1
cactttatgcttacaaggatctttcttctccaatggataccctacataagtgcgatatgtgtgacataccacgctggagttgcaactgatgatgccgctcgatgacttgacctcaaatccattaaaacaggttgcaactctgaattctcacattaaatcgatatgcatattcacccaaattg

SEQ ID NO: 41604 - DNA, 733 bp, Zea mays
  Clone ID: MRT4577_137944C.1
cccctgcgggggacgcgtggattgtccacagggcgcaggcagcacccagcaccacaccacagaccaaaacgaccaccgcacccgcagcagcgaagtgtccaagcggcggcatggcggagagcaaggcgcgtgtcgcgctgttcctggcggcgctcgcggcggcgagcctgctggcgctggccccggccggcgccgcgacgacgtgcgcgccgacgcagctgaccccgtgcgcgcccgccatcgtcgggaacgcggcgcccaccgcggcgtgctgcgccaggctcaaggcgcacccggcgacctgcttctgccagtacaagaggaaccccagcatgcagcgctacgtcaactcccccaacggcaagaaggtcttcgccgcctgtaaggtgtccctgcccaggtgctgatgctgagtgagtcgtctgccgccccatcaggtcgatgtcgatccatcctgctcgatcgatcgatcatgctactacttgagcacctttgggcagagtttagtattgctcgagaataataaacggagacgtaccactcccagtacttggtacagtgtgagttcgatctgctctctgcagaaagacttggtatatatgccgtcatgtatgtatacgtgtcacgtgtactactatgaactatgatgttacaaagacgaatacaggtgttgccacttgaaaaaaaaaaaaaaaagcggaaaaaaaaaaaaaaaaaaaaaaaaaaaactcga

SEQ ID NO: 41605 - DNA, 724 bp, Zea mays
  Clone ID: MRT4577_137945C.1
ccacgccgtccgccacagcacccaacaacatacacaccacagaccaaaacgaccgccgcaccttcaacagcaaagcgtccaagcggcggcatggcagcgagcaaggcgtgtgtggcgctgttcctggcggcgctcgcggtggcgagcctgctggcgctggccccggccgaagccgcgacgacgtgcgcgccgacgcagctgaccccgtgcgcgcccgccatcgtcgggaacgcggcgcccaccgcggcgtgctgcgccaggctcaaggcgcacccggcgacctgcttctgccagtacaagaggaaccccagcatgcagcgctacgtcaactcccccaacggcaagaaggtcttcgccgcatgcaaggtgtccctgcccaggtgctgatgctgagtgagtcgtctgccgccccatcaggtcgatgtcgatccatgctgctcgaccgatcgaccgatctcgcgtcgcgtatggtactactacttgagcacctttgggcagagtttagtattgctcgagaataataaacggagacgtaccactcccagtacttggtacagtgtgagttcgatctgctctctgcagaaagacttggtatatatgccgtcatgtatgtatacgtgtcacgtgtactactatgaactatgatgttacaaagacgaatacaggtgttgccacttgtgacttgactttggataaagctccccaatgccataacatttaaggg

SEQ ID NO: 41606 - DNA, 297 bp, Zea mays
  Clone ID: MRT4577_137946C.1
ggccgcttttttttttttttttttgggggggaggaagggataaatataaatataattgaccgggcctacttgaccatgtaataccaacagcaaatatacttatatatctgcttccaacatgacctgagcactcacggaaacgcatgcttctcttctttatttatctccttagaacccattaatcaccggggggggcctgccgtcttcaccctctggaggttcccaacaagaaggttacgcagtcagtgcaccgacgagcgcccaccccctgaggtggttactgcgacaagggcccat

SEQ ID NO: 41607 - DNA, 783 bp, Zea mays
  unsure (1)..(783): unsure at all n locations
  Clone ID: MRT4577_137947C.1
cgggtaaactcacctcgcatgttgctagcaccatcatatccttggcctctaacttgttttaagcccagcttaaattccgcaagtatttatgtaatctccctttcgccattctacatttttcaatatacctcaagaccatggccatttgatctttacaagaaacatcccttgactcatcaactaagcaagcaaaagacatcgtccccaagttcttcaagaataaattgtagaatttcatttgcaaaacagtctataatgttggtctgagtttcatgagccaccatacaactgttacctgcaagacccactgcctttcccaaatttgaatcatgctctgctaatcaatcaaaaacctccaaaaaattccatttgttcaaagactccttcgactcatcatggccatgaaaaggcaagccttgctcgaatagtagcctagcagtattaatggatccattcaatctagtaaaataagcccttttagatgtttcacttttcttatgtaaaataacatcaatgtgctgatatctctataacaaatcatcagacttctttataggaataaagtgtgatccaccaacattgccaacatgtatctttagccgctcttttctgtgataaccattccagcactcaacaacgaaatccttatatcatgtatccttcttttctctgaacaagaaataacaaaaaaatatgctctatcttttgattcactatattcaagccaacttccaaaatcatcgaaccattcttgttgaaaactncttgnattgccttttcccc

SEQ ID NO: 41608 - DNA, 1321 bp, Zea mays
  Clone ID: MRT4577_137948C.1
ccgtccgggaacgccgcaccggccgggaaaaaatatataattaatttagtgcacacggagtggggaaacgaaaaggaaagctctctcattgccaaattgcccccgactcaagccccccgcgccgccggcgttggtggaatcgatcgacccggcctcgccggacaatccaccagcgttggtttcacctcaggtttttgtgcatggaagatgacaatgaggtcactggagagtcacctgtggctgatgaatgggatatgttgtccctgacttcatcaatatatgctagcccattattccgaagaggatttgatccaattaatttgcctggatatgggaatgtgattaatattcaggaaggcacacaaactggattagtcatgtcagatggcttcgtgttccctccaagtgagcatgaaaatttgccaatagaaccagagcatgaggatttgccaatagaaccagggcatgatgaatcaaatacaaacagcgttgaaaaggaaagtagttgtgctggaaataacgatgatgactggtgtcatgtttcacctgaagaaatcgatgacgtaagtaatgaaaatctagctgacaacagtgacttgcctactgccagtgaagctacggtaccagattcccagcctacagaaataaatgctaagcgagagaaagatcataggacatgcaaggctgatcatacttgtgaaagatggtggaaaaagaaaaccacgtatctatttcatcatataaaaggagtgactacactctgctcagttgtggcagctggtgctgttgttggttttgttgtaatgggtcagaggtggcagcaggaccattggcaccttcatcaatttaagttcagtgtcagcggtgagagcatgaatcgagtcattggagcattcagtcgtttgaaggatgggcttcctgggagtgagcaactaagatctatgctgccgactcgcgtactcccacaacagccgctgagcgcttgagtacatgcaccaaattttggtgggctgcttctagtgtcaatttttgttgcttatatgatcttgagaaagttcattctttttcttgtgctacttgattttatgttactgtaaattagtggtcgagacttctcacggtgctgttctttaaaacatagcaaccgtgaagggacatggtggaaacacagagggcactataacaatatgtatccatatcacctgttttactttctatctcaataaaatgtgcttgtagtttggcttgttcgtgctcttacgcttgtgaagctgtgtccagtggtgacgattttgaaatcaatagttctaaatttcaagcc

SEQ ID NO: 41609 - DNA, 260 bp, Zea mays
  unsure (1)..(260): unsure at all n locations
  Clone ID: MRT4577_137949C.1
gggctcgcccgggccgacggngccgngaatgcagcagctggactncagcgaggcgccgagggacgaggccgccggctgcgcgctcaccaagnacccgncgaacgagaacgacggggacacccaccacgccaannaancgacgcccccgggaggcgggcgggcgggcncccnnccaacccacacngccggggggcagcnggaggagggnnaaagaaggnnaacggncgncgcgcanaagggaaaanagacanccngcgcgg

SEQ ID NO: 41610 - DNA, 340 bp, Zea mays
  Clone ID: MRT4577_13794C.1
cttttctttatgctgtggatgctcccaatgtgttcgtgttcccgtatttgtaccccattacgcctttctctatctttttctgtagcactgtctttcttttccagagggatcaggaagaggagtttttcttcatcaaaagcacgcacaacaaggtgcaagttttaaaaaagcccgcgcgaaaaaacccccataagtgcggtagggccccatcctattgaagccgccacgcaacgagcagcgcactggcgctcggcaccagattaagctaaaaaaacaagatcaactaccagtcccaccgcgtggtccccaacggccaggagcagtaccttcaccccaagga

SEQ ID NO: 41611 - DNA, 547 bp, Zea mays
  Clone ID: MRT4577_137950C.1
ttttcaaaaaaggtgcatccatcaaccattccccatgggaacggcagcagtactgacgctacctacttcaggatgagcgacgccgcccgtagggacgcctccccttctgatgtcttattgagctttgccgagggggagttcggcggtgtctccctctgcgcggcgggtgtcattcttaccggcgagtggtgctcctcgacaagaagcaggagctccagcccctagtcgagtggcgggggtctgcgcgcacacacaaaaacacaaacgagaaaaagaaagggcaaggttgcgtacacaatacgaaaaaactacagtgcgagaacctgcagaaacagaacatgcgacgacaaggatgaaagcgcttccacaagctacgcctatccaccaggaacctctagaccatctgataatgacgggctcgactccgtgggatcgctaggccgagatcgacttctccaataagagagcacatccgactacgagtaaagatattgtgtggatgacactagtttagaattcacatgcacaatcgacgtgtcgtctgtat

SEQ ID NO: 41612 - DNA, 337 bp, Zea mays
  Clone ID: MRT4577_137951C.1
cggacgcgtgggtcacaaccaatcggggagaggtaaaacacagaacttcaagcctgcgtgaagaaagaccaattcaggttgctacaaatgcggttcagccaagcctgtgaagacataaagtgttttttttttctgtagagggatcctcaagctgcattccgttgatgtgaatactgttgctatgtaatgtactgctactactactgctagtgttgtacttgggtttttgacccaaacgcatctgtggggaaggtgtaatttgtaagaactggtgtttatagcgtagactacataggagcgacaggaaggggaagggccgaaagggaacgaggaaaaa

SEQ ID NO: 41613 - DNA, 301 bp, Zea mays
  Clone ID: MRT4577_137952C.1
cgttagagctatagggggattcgacgtgcaaagcttttgccttttgggggcatctccgtctcttcttgactgaccgccctgatcggtaggtgtcaccggcaatcagaatcaggaagacgctaactagatgcacatgatcaacagatctttctgcggatcttcaataatggagccatgataaccaaggcccgtccgcgtgtgcgattctctgcgcattagtatattcgctctgcattttggaacaaattgtttattcagaacacaagtgacgaactaaacaactggagcagtttagcttttt

SEQ ID NO: 41614 - DNA, 397 bp, Zea mays
  Clone ID: MRT4577_137953C.1
ggccgcttttttttttttttttttctttttttttttttttttttatttcctttttttttatttttcctttttttcttgtcagaacacccgatatatgcacaccacccttatcctcgaaagaaccatgggaatagaaacgcccgggggggcaacgcattaagcctgggaaaaaaaaggggctgatttgtaaataaagacggcccccataaacaacaaggaagtttttatgctccggccccggctggatacccgctcaaaggcataggtccccggggcctgcttgttacaccgccagggccatgagggccaaaaatctacacctattgatgaacagtagacaatggacaactttagacacccatgggttaactccacagacttgcattgattttgccgt

SEQ ID NO: 41615 - DNA, 207 bp, Zea mays
  Clone ID: MRT4577_137954C.1
tcggccacgcgttcgatcctggcgtgggatcccaggcaccggcggtagaagaagagctcggcgattcccaggtcccgcgtgaatatgccgaaacaaatccatgagattaaggacttccttcttaccgcgaggaggaaggatgcccgcttagtgaagatcaagaggagtaagggtggtgtctaggtcaaggtgcgctgttccaagtac

SEQ ID NO: 41616 - DNA, 585 bp, Zea mays
  unsure (1)..(585): unsure at all n locations
  Clone ID: MRT4577_137955C.1
ngtttctcctccattctctcgaacgccagaggtgccctagcatcccaacgcccctggacgcatctatgacagttcgatgcaccaggcgtgtcgatccacgacctcgcggcgctgatggcgcggcaactgcaccgacgcgtggagttcccactgatgaagatactccacgagcgcgagctctacacgatgcaggacatcctgcagttcaacatccgcctcctcagcttcaccaacatgcgcgactacaacttgtacatcaacaaggccctcttcggctccgaccacgtgctcaacgatctggctcaccgcatggtcaaggtcttgacgagactaatttcgttcgacgagggcgcaggaccactcttctgcttacctccagaatgctgaccttgtgctcgaatgcaagctcgacattgaatacatcatccacatgctgcatataacgatatgatatctattatgatcatatgtgggctctgtatcagtatgccggcctttaggttgagcgaggtacactactctggtgctgttgatgacctttaccagcatcgttgtttgagcactaacagtgagtgaaatgtgagt

SEQ ID NO: 41617 - DNA, 176 bp, Zea mays
  Clone ID: MRT4577_137956C.1
ggtttgaaccttaaagctctgccactgtcaccagacactgctttggatttgtcatctattgtggtaaaatcagcaccatttgtaaaggtttactcttgtactccctgatgtacagaaatcacatgaataaaagttccatattgagtgctaaaaataaaaaaaaaagagaaagatta

SEQ ID NO: 41618 - DNA, 236 bp, Zea mays
  Clone ID: MRT4577_137957C.1
tggagaacaatagcacctttcatttaaaccactttggatatttttacagctggactttctggacatgtggtgggagaataactatttttttacacattttgaagcacacataacttcatgaatgattcctcattcttattcactccacatgtaaattgtggacccttccaaataaattgtgaacaatacaccgctggaagagatagatctaccatcattttactactaaaagttca

SEQ ID NO: 41619 - DNA, 151 bp, Zea mays
  Clone ID: MRT4577_137958C.1
agtaaaattacggaatctaacggggaggggttctttatagatgctcaaccttacacatgcaacaataatcagaactactcttaataacataatctcgacgctacaagacacgcgggttgacccgataatttacaaacaatcactgtacact

SEQ ID NO: 41620 - DNA, 396 bp, Zea mays
  Clone ID: MRT4577_137959C.1
cccagcgtccggcaatgcacatatggactcttagtgagaagcactctgatatatcttgtttggggttttacggttaattattctggttggtaggtgtaccattattcataattgcaggcacctacacatggagacaaactcaaacttgaacttaggagggaccttacacacagatactggatgggaatcatgtatgcgtatcacatgtagaaaacgatgacggctcacaacctatgatggtcatttcatgctacgatccacacaactgttagcccttccagctgaagactctgataatgattctgcaatgcattagtcgatagaagagacatttatgaccacccaatctgcatacttccaagtgagattgctatacacatcatcctgtggtgaaag

SEQ ID NO: 41621 - DNA, 870 bp, Zea mays
  Clone ID: MRT4577_13795C.1
ccgggctaattaatgtatgtagataagtacgacaagataacaccatctaaaatgacaataacaaaggaaatatagataataattaaatatattaaaataataaaaaaagtgaataagaaagcaataaaatagaacaagtgctttcacgtgtgcactgtaacttcacgtacatgtacatgcatgtgtgctagttagagaatgatttattttctatctcatagattaatcaatgcaattaaaatataaataaaagtgcccacgtcaggaaaaggcttgtgcgcgcttagaatattcaaatcaaatcaagtcgaaccgaagccacgtctagtctgttgccaagaccaaatccacgcacgtctgcacgttctcaaagtcactgtgctcacgtattcaaatcccacgtcgtccagcgtcattggcgcgaatgccaaaatcaaattagaagggcgcgcggctgcataactgctgctagtacttgcttctataaatacagggtatgggagcaggaaaggctctcggctccccagttgatagtgccgtcaggctgccgctttgcatcgctaaaaccaaacactgccaggctgctgtgtttccaatccaacaacgcgggaggagtgcaagcaggctgctgaagttcttcatcgagaaattactgcttcaacaggctccatcgacaacaaaaaattctccaccagcacccctctctaaggcataccttagagagaaactggttccagaaacctcaagggcatacccttgaggaaaatcgcgtcgccgggttatacacaatcttaagggcatacccttgagatagatcacactgcaagggcatatacgccgttgtggcccatcggaaaggtctactgcaag

SEQ ID NO: 41622 - DNA, 387 bp, Zea mays
  Clone ID: MRT4577_137960C.1
cggacgcgtgttctagggttctcatcctgccgccacagcgatggccgctgccgccgccggcgaggacgacgcggcgtgggagcgcgccatctccgccgccacgctgcgccacctcgacctagggaacaaccggttcgcggaggtccaggagctcgcgccactcgccggggtccgggtcgagtcgctcgacctgttccagtgccccgtcaccaaggtcaaggggtacagggatgaggtcttcgcgctgattcccagcctcaagtacctcgatggcgctgacgctgagggcaacgagcgtttggagacggatgacgacgacgacgaggaggaggacgacgaggagggagaagaagggccggagggagaggaggagggcgatgaggatga

SEQ ID NO: 41623 - DNA, 1172 bp, Zea mays
  Clone ID: MRT4577_137961C.1
aatataaactgggatctcgattagtagcatcaggaagtcacaccaaacaaaacacaccaaacaaagcgtatatacgtgctggggacacatcctactcatggtttcagagtcagacaacttccagaatccaaacgatacttcagaagtggaaccgcctaaaaaaaactatgctctagtctattacaagtgcgggaaaaaaaagactcgaaaagcatacaaataataatcagtgcacaggaacgtttccgaagttcaggaaaatactactttccctcaccgttttacttgtatccattggcatcatcctcgttattccttttcctcttatttggcagggaagatcctgccttgctttcgatgttctccttgtcttctgcgtctgcgtcaagctcgtcatcctcagcttcgccgtcttcgtcctcagcctcctcatcaccttcttcttcgtcgtccccttcaccgtcctcatcatcttcttcctctccatcatcctcatcgccctcctcctctccctccggcccttcttctccctcctcgtcgtcctcctcctcgtcgtcgtcgtcatccgtctccaaacgctcgttgccctcagcgtcagcgccatcgaggtacttgaggctgggaatcagcgcgaagacctcatccctgtaccccttgaccttggtgacggggcactggaacaggtcgaccgactcgacccggaccccggcgagtggcgcgagctcctggacctccgcgaaccggttgttccctaggtcgaggtggcgcagcgtggcgccgcatgcctcagcgacggtcgcgagggcggcggcccccgagaggcggttgtcggggagggagaggcgccggagcgccgggaggcggggcaggcccgcgagcgaggagaggcgcgcccccgcgacggagagctcctcgagggaggcggcgaagcgctcgaggagcgcggcggaggggaggccgcccatggaggacttgacggcgccgtcgagggtgagggtcttgggcgccgaggtggacttggtggcggcggagatggcgcgctcccacgccgcgtcgtcctcgccggcggcggcagcggccatcgctgtggcggcaggatgagaaccctagcaaaacccctggttaaggctttgccgagtactttagaacccggccggcctcgagggtcccaa

SEQ ID NO: 41624 - DNA, 284 bp, Zea mays
  Clone ID: MRT4577_137962C.1
acgttcagagctcacaccagtgacgacgacgagctgtgaggacagggcaaagacacaagcctgtgaggaatgcggcgatggagacgtacgaggtgatcgaggacataggatcgggcaacttcggggtggtcaagctggtcagggacgtcaggaccaacgagctcttcgacgtcaacttcatcgagcggaggatgaagattgatgagaatgtccagagggacatcatgaacctcatgtcactgaggcatccgaacatagctaactttaaggaggttgtgctagct

SEQ ID NO: 41625 - DNA, 1617 bp, Zea mays
  Clone ID: MRT4577_137963C.1
tgggtacccctcgggccggccggggattcctccactccggccttgcccgacgatctccagctgtccttcaatcaaattatcaacccaacgccatttcggcgctcccgcttcccacaggagtcacagctcaacaaatccctacccaaatccacctccccgccccccaccgccatggctcccccaccaacccggcgctgcctcgcacgcagacgcgggcggatgggcgccctctgcgccgccgcgccgccgcgttgcagggggagctgcggcggctacgcgaggccgccgcggcgcacgcggacagcgacaaggttgaggaggacttggatcgagcagcgtgcctcatcgctgaaggtgacgttgcgtcgctgctcccgagcaagacgcaaggcgcttttctgaaaatgttcttgggaccagtaaatttgcgtgcaacaaggaaggaggggcagctcaaggtgaaggaggagtacaatagctacagggacagaactgccttgctgtttcaagtcccggttcaaggcgaagatgaagaaatccaagggcagacgggacctcgacacatgcccctcgccaacaggttcatcatcgcttggatagattcagcgaccaccaaagcatgaacaaggccaagaggaaaaggtgcccgtgtttaacccgggtgtgttaccactgtaaagcattttagtgtttttttttcttggccgttagctggtaatcatgtccgtcgtctgtgccacagctcattgtagtgtaatcaagcagcgtggaacttttcctttgctgggccataatgcaaggatttgtcatgatgatgcagaatagatatcagcgtcaaagattatatactaggattgctttggggaaggctaaaagaatggatgttgtatggggagagactgctggtgttgaaggtcaattgttgctgttgtgccctctccttttcctcctgcagggattcgagggttatgttgggtttttacttctgcgcacagctcatactggcgtcgtccctgagtggcaggttgtggtatgcgggatcctgctgatcgcgatggcaatcggtaactttgcaaacacagtggacaccctggtgaccaagtcccggttcaaggcgaagatgaagaaatccaagggcagacgggacctcgacacatgcccctcgccaacaggttcatcatcgccgatagattcagcgaccaccaaagcatgaacaaggccaagaggaaaaggtgcccgtgtttaacccgggtgtgttaccactgtaaagcgttttagtgttttttttcttggccgtcagctcgtaatcctggccgtcgtctgtgtcgaagctcatactcgtgtaatcaatcatcaggcaagtaggctgctgatggttctaggctggaggtgaccgagaataaacttgtggtgtttgtttatatacctgtaccctgaatgaacatcgagtgggctagggtggtgggcttaggactatgtaaggcttagcaaaattttccaagtatagttgtgagacaggcaggcatttgtcacaatgaatgaaacatgcgaagttgtatacaaaaaaaaaaaaaaaaaaaaaaaaaaaaaaagtactctgcgttgttaccactgctt

SEQ ID NO: 41626 - DNA, 1421 bp, Zea mays
  Clone ID: MRT4577_137964C.1
attgggtacctcgaggccggccaggtaattaatgataggtgtcaagtggaagtgcagtgatgtatgcagctgaggcatcctaacagaccggtagacttgaacactctctaccagtctaccctaaccagcccgacaccgccgccgtttctccatcttcctcgcagcgccggcactacatcttccgctcccactccgactcgcgctcaacacgcaggcgacggcggcagcagtcccagactcgggctctcagggacggcggggcagtcccagactcggcgtcgtcgtcagcggctacccttcccgcctctcgccaatcgcctcgcgccctcgactccggtcctccgcacaccggcctgcgaccctgccaatagtgtataacttggagatatggatttgcaagagaagacgaccccaactcataaaggaaaaggaaagaaaaaagaaagcgcaaagaaaaaagaaagagcaaggaagagaacgtcatctgttttggattccactaatgacacagtcatcagcgaggaaatgccagagtataatcttgatgaacctactatggaggaaaaactggcaaccctgaatttaatcaatagagagaatgaaatacatggtagtgagaagcaatcgctctctgtggcaccaccaagtgcagattcagtccatatcttgctgaagcaagctcttcgtgctgatgatagtgtagcactgttaacttgcttgtataatagagatgagaaggttattacgaagtctatatcactcctaacaccagcagatgttgtgaagcttctcaagttctttgtcttgcaaatacaatctaggggtgcagtgttggtttgtttactcccgtggctgcaaactttattgaatcgacacatgagcagcatagtgtctcaggagtcttctctgtcattgctcaactcgctctaccagcttattgatgcaagaacgtcaacatttaagtcagcattgcaactctctaccactctagattaccttttcagcgagattgctgatgatgaagctgatgaggaggtaccaccaccgataatctatgaagataaggacactgatgatgacgagtccgaagttgatgctatggaaaccgacagagaagaggctgaagagctaggtgctgttactgatgcctctgaaaattcagatggaagtgagatcatgagcgactgattgccttttactctcccaactgctgaagtccaaatatcaacatcaattattcacgtaagatggaattcacgataattgctcaagatagttgtgcttgtactttgtggatcttaattgagtgaatgtttcaaatagcttttggatgacatattgacatttgagctgagaaaagggtagttaatgcaattgattgagcataataaagtttatactatctgatagggtaattatct

SEQ ID NO: 41627 - DNA, 385 bp, Zea mays
  Clone ID: MRT4577_137965C.1
ccggccggattcattcttcccgtcaccaccgctctagactactcttgaactacacgacgaccaacatgaacgtccgatacgtctttcgcttacccagcacaacaggatgaccgccgaggacagagccccggaaaagccaccgaccgccgttccgttgctgctccctcctcatgcacagagtactacaaagtactacgaaggatgcccccggcggctcttggatgaggccccaacgactagcgaccgccgtctccctacctccatctcttctacatctgacccggctgcctcgacgacgaactgccggaccggacactgcgcccttatctatactccatgatcatcgacttggaagtggggatataggagcaaaatcttgctcctt

SEQ ID NO: 41628 - DNA, 673 bp, Zea mays
  Clone ID: MRT4577_137966C.1
attgggtacctcgggcccggccgctctaccagtctaccctaaccagcccgacagccgccgccgtttctccatcttcctcgcagcgccggcactacatcttcgctcccaccccgactcgcgctcaacacgcaggcgacggcggcagcgctcaggctcgggctctcagggacggcggggcagtcccagactcggcgtcgtcgtcagcggctacccttcccgcctctcgccaatcgcctcgcgcccgcgactccggtcctccgcacaccggcctgcgaccctgccaatagtgtataacttggagatatggatttgcaagagaagacgaccccaactcataaaggaaaaggaaagaaaaaagaaagcgcaaagaaaaaagaaagagcaaggaagagaacgtcatctgttttggattccactaatgacacagtcatcagcgaggaaatgtcagagtataatcttgatgaacctactatggaggaaaaactggcaaccctgaatttaatcaatagagagaatgaaatacatggtactgagaagcaatcgctctctgtggcaccaccaagtgcagattcagtccatatcttgctgaagcaagctcttcgtgctgatgatagtgtagcactgttaacttggctgtataatagagatgagaaagttattacgaagtctatat

SEQ ID NO: 41629 - DNA, 508 bp, Zea mays
  Clone ID: MRT4577_137967C.1
accaatcttcggttgtttcaaacagatctttgtattgactgactcccggttgcctagggtgccaattatttatgctcgtgagttcgcttacatctttctcaggtcttccctgaaagaactgtctctcaaatgcattaaataatcgctacacaattgctatgtttgtgtgctatgaagctctaaactacggaacagaatagatttgcagtttgctatcggtcagatattgcgctcttgtacaaccatcatggggaaaaaaaatttcccgactgacttcatacctacgcaggtggcctttcatatctgggttcaccttgacatgggtgcaaagcacgattttagtgggctgacccccgagaaatggctgcttggcgctgttggtgcggtgagggttgctgtgagaggcttgtcggcatcaggtagcctgttgagaccaccatcccaatatcagttttagtctcctcgccgtttcatgaccacggcgaccggccttccacgatgtacattg

SEQ ID NO: 41630 - DNA, 565 bp, Zea mays
  unsure (1)..(565): unsure at all n locations
  Clone ID: MRT4577_137968C.1
cggacgcgtgggttttttccagcttattgatgcaagaacgtcaacatttaagtcagcattgcaactctctaccactctagattaccttttcagcgaggtaagtttccttctcagcaacggacgaccactttcgaaattacaattaatcctactattatgatccagattgctgatgatgaagctgatgaggaggtaccaccaccgataatctatgaagataaggacactgatgatgacgagtccgaagttgatgctatggaaaccgacagagaagaggctgaagagctaggtgctgttactgatgcctctgaaaattcagatggaagtgagatcatgagcgactgattgccttttactctcccaactgctgaagtccaaatatcaacatcaattattcacgtaagatggaattcacgataattgctcaagatagttgtgcttgtactttgtggatcttaattgagtgaatgtttcaaatagcttttggatgacatattgacatttgagctgagaaaagggtagttaatgcaattgattgagtaaagcaaacattacccatctaana

SEQ ID NO: 41631 - DNA, 405 bp, Zea mays
  Clone ID: MRT4577_137969C.1
gtcgcttcgcgcgggtagattgctcattttcttatcacagggatccacgacgactggatgtacgatgacatcgaaaacgcagacaccatgcaattcgaaggaagaatatatcgcatatagaattgggcacatatcgttcatgcccatactgtacctggacccggaaacgaacatcgactgaaggccaatgatttgtctaaaggaagaggtgtacttgtgctcacttacatgagctctagcgtcaaccttgcccatgttgattacactgctggtgtcgtaatgattgctaagcagcattctgattttgtgaaggcatccatatactctaatactgagtattgcgcaactgaaccaacaatcaccacacttatacatgccactcccggaggccataatgccacacga

SEQ ID NO: 41632 - DNA, 157 bp, Zea mays
  Clone ID: MRT4577_13796C.1
aaatcggttcattttattattaaacacacatcttgattgtccaaacccatacaaatggattcattctatccaacctttccatattatattttcacattacaacacacgggggggaaaacacaacataaacctaggcaccttatagacaccgaagagg

SEQ ID NO: 41633 - DNA, 799 bp, Zea mays
  unsure (1)..(799): unsure at all n locations
  Clone ID: MRT4577_137970C.1
ccggccgggactctctaccagtctaccctaaccagcccgacagccgccgccgtttctccatcttcctcgcagcgccggcactacatcttccgctcccaccccgactcgcgctcaacacgcaggcgacggcggcagcgctcaggctcgggctctcagggacggcggggcagtcccagactcggcgtcgtcgtcagcggctacccttcccgcctctcgccaatcgcctcgcgccctcgactccggtcctccgcacaccggcctgcgaccctgcgtacgcgcctcgcgctcccctcccgcctcaggtggaccgtcgacggcgcccgcccccgtcggctgcactgcgcgccgcgtgcggccggtgggcagcgggagccagcagcaactgtttcaccaaggcggccgcaccacttcggtggcgcttatgtcccaaatgaagcgttacccgtccgcagcacgatgaagcatgcgcttagtgtcgttttttggaaccctggtcactgatcaaaattgttattcctctgcagcaatagtgtataacttggagatatggatttgcaagagaagacgaccccaactcataaaggaaaaggaatgaaaaaagaaagcgcaaagaaaaaagaaagagaaaaaggcccctaagggagcgaacgtcatctgttttggatccactaatgacacagtcatcagcgagggaatgccagagtantatcttgatgaacctactatggaggaaaactggcaacccttgaattatcaatagagagaatgaaatacatggtagtgagaagcaatcgctctc

SEQ ID NO: 41634 - DNA, 346 bp, Zea mays
  Clone ID: MRT4577_137971C.1
gcttgggttaccatgtgccccagttaccatggttgtgggccacggacccccagttcccagggggtgcccaaaaaaatggctggcccaaaagttgggaaaaacaaagggccaggtacagtaacacttaatttagggggaggcgccttatgccttaattaaaggagcacttttttgaaaaaaaaaaaggggaacgggggaaattttcctggggcgaaatttccctgccattaaagccccaaccggggggggccctatctggagacggacccggccggaaaaagacccgaacctacaggggccagaaccaaaggctggctaaacaaaccctgtgccgaatttctgctag

SEQ ID NO: 41635 - DNA, 347 bp, Zea mays
  unsure (1)..(347): unsure at all n locations
  Clone ID: MRT4577_137972C.1
gggtttnctatntttgagtntgtgtnatgttagcaattaggatgagacaggatatggtctccctncagcgcaaaaacaacagaggctccttgcccccccttttattgaaaaaattagcggtaacgggcgggtaagacgcgagggtggtttccttctttgggggggcactttaaaaaaaatagcgatataaaaagctggaccgccccccccttccttatttttttggggggagggcccacgggtggacctggggtttggggaattggccttttccacttttcagggtttgggaaggcgaaaaaaggatgagggttgtgataaaattccccccgcctcttttttttttt

SEQ ID NO: 41636 - DNA, 296 bp, Zea mays
  Clone ID: MRT4577_137973C.1
cccactcgtccgaaaaaaaaaaaaaaaaaaaaaaaaaaatattttaaaaattataaaagaataaaaaaaaaaaagatacattggaaaaataaaatagatattatcatactaaattcaatccaacatacccaaacattcaaactacttaactatctatatcctcacgttacttaactacaattatcatttcatttcatatcactttacactttctaacctctatttcttacacatcttaatcgattatccttacaacctcttttactcccttaccatctttcgcaatacgccctttc

SEQ ID NO: 41637 - DNA, 368 bp, Zea mays
  Clone ID: MRT4577_137974C.1
aagccatcccaaatagtccacaattaagtcatccatccaagacaacgccgtcctcgcattgctcgccgcgctttgcttctccggctcggactctccggcggcgacccccccagactcgcggctcctcagcgccaaatgcactaaaccctgtgccccgacctctgcgcgctcacagccctcggcctgcctagctctgacagtgtacaactgatattggttgactgcactcgctttcgctgaagagctttcgatcgcagcctgcagtactacctgtccctcatcacctcattctacaactatctcccgatgattaagtgcgaatgcaacacttgtctctataaaccttgataaagcgatcaagaccaatg

SEQ ID NO: 41638 - DNA, 634 bp, Zea mays
  Clone ID: MRT4577_137975C.1
cgcgtccgcccacgcgtccgaattgagagaaaacttgctgaaagtgataaaaaagcagaaagatggttgagcaaagtatctcaacttcaagattcagctgacttaagtagtctagcagaagatgaggactttcctgagattatgcctatgcgcaagggggtgaataagtttgtggtgagcatgcacaaaacaccactggaaagaaggcttacaaatgcacagtacagaagtaacaatagccccccagcatccgacccaaagataagtcaaactttggacaggatacttgggcgttcaactcctactacagccccaaacaatcaatctgttactagtgatgcacctactgaagctctgaagaaatcaacagaccacctcggtggcattgatcctgttccgtttgtgcccctgtctgcagatctctttgcaaaaccacagactaataatggacagagcaatcagaatggaaaaatcaatgcagaagatgacagttccatggtaaataatgcagtccctttacctgagaggcaaagcacaggatcattagataccgctgagatatggtctgagaaagtagcagaacctgacaatgcaaaggattccccaagtgcagtttctgatgaaaattttcctg

SEQ ID NO: 41639 - DNA, 231 bp, Zea mays
  Clone ID: MRT4577_137976C.1
gcacgagatcattctcactttcttcccacaatctcatggggtggatgatcgccatagccttctctccgacttccaggttctgtactcctaccaaggggcaacgtgaggtgtccacaggggcgaggccgtgcctccgtcccgccgcccccgacaatgatccccaccggcactttgtacgaaagcacaatattaggacttttttatgatcttttatcttttttatttgaaggc

SEQ ID NO: 41640 - DNA, 326 bp, Zea mays
  Clone ID: MRT4577_137977C.1
gcgcgaggacccttcgtgctcttagtggctctcactcagctacatgtgcttcattcactgtcgttgattatgtatccatcctcggttattatttttgcagacaataatctcgtgcgccctcccggccattgtattggatggcaggcgttgtatcaccaatttatgtgctacctaccttctaatctttattataattgttattactaacaacaactactggtaatatccatcatagacccacgctttaccatcgttgcttcgtttcacttgtcctttcctttcttgctagctggtggtgtatctaccatctaaatctatcaataaca

SEQ ID NO: 41641 - DNA, 975 bp, Zea mays
  Clone ID: MRT4577_137978C.1
ctcgaggccggccgggattccctcacacatcgtcacccccgggctccctcccgggccgggctccccaaaaccgaataaataatcgccaccgctctccgcaccgaaccgaagcagcggcgatgtcggcggagaagccggctcccgtgcgcgtgctctactgcggcgtctgcggcctcccggccgagtactgcgagttcggccccgacttcgagcgctgcaagccctggctgcgcgcgcacgcgcccggcgtctaccccgacgaccttgtcgccgcctcctcctcacccggcggcggcgacaaggacgtcgacaaggtcggggatcgcctccagggcgtcgggatctccgacggctccaccggcgccgcaggggatgcttccgcgtctaagccccaagaggcgaaacgcctgcctggtggtaagctcaagaaaaaggagaagcaagaagtggtcattgagaagattgtccgtaacaagcgcaaatgtgttactgtggtgaaagggcttgaattgtttggtgtaaagcttagtgatgcttcgaagaagcttgggaagaagtttgcaaccggagcttctgttgttaagggccctacggagaaggagcaaatcgacgtacaaggggacatctcatatgatattgtggagttcattacagatacatggcctgatgtacctgagtcggccattttcttcattgaagatggaaggaaggttcctgctgcttgatgccatatggtttataaggcacgagaccaggcatatagggccataccagctcgtctcttgtccgaagtcatgaactgttgttccggtttttaggcctacttcacaagtggcatttttttttaccaccgtcacctgcttccatgtatgaaatcaaatctatacagttaccaatttactatgactgatgtctgttgtatcaaaaaaaaaaaaatagacactgtgtgtgaaaaataagatcatcggttaggct

SEQ ID NO: 41642 - DNA, 1173 bp, Zea mays
  Clone ID: MRT4577_137979C.1
ccggccggggattccctcacacaatcgtcacccccgggccccccaccccaccccacccgcaaaaccgaatccaaataatcgccaccgctctccgcaccgaatcgaagaaagcggcgatggcagcggagaagccggctccggtgcgcgtgctgtactgcggcgtctgcggcctcccggccgagtactgcgagttcggccccgacttccagcgctgcaagccctggctgcgggcgcacgcgcccggcgtctacccccgacgacctcgtcgccggtccctcctcgtccggcggtgcgggtggcgacagggacgtcgacaaggtcggggagcgcctccagggcgtcgggatctccgacggctccagcagcgccgcaggggatgcttccgcgtctaagcccgaagaggtcaaacgcctgcctggtggtaagctcaagaaaaaggaaaagcaagaggttgtcatcgagaagattgtccgcaacaagcgcaaatgtgttactgtggtgaagggacttgaattgtttggtgtaaagctgagtgatgcttcaaagaagcttgggaagaagtttgcaaccggagcttctgttgttaagggcccgaccgagaaggaacagattgacgtgcaaggggacatatcatatgatattgtggagttcattacagatacatggcctgatgtacctgagtcggccattttcttcattgaagatggaaggaaggttcctgccgcttgatgtcattatgaggcgcaggacgaatggatttacaattataacacagagataaagcaaaggcgtggctgtcaaggcatgtagcgaccataccagttcgtctctctgtccgaagtcatggactgttcttccaagttttatcaggagtggcgttttgtttaccaccgtcacctgcttccatgtatgagatcaaatctatacagttaccagtttgttatacgtgtgatgtctgttgtgtcaccatgtttcgtcaaatatacataccgcggtccgtggcctgtgttagcaatagcgtggaggagaagggaagaggagacgaagaaaggagaggaacacgggaagcgcgtgcaggtggtctgcgacatccaatccaacactgctctggtgtgtaaaagacacatgatgacttgtttagttcgaacaataatacctcgatgttaatattgg

SEQ ID NO: 41643 - DNA, 255 bp, Zea mays
  Clone ID: MRT4577_13797C.1
ggtatatagcagaaattttattggtgcgatttacaggttgtgctcataatttttacattattacacacggaatagtttcttttttggctcgttagtggtgcaaaaaggcacccaaaccttttggctacaaacccctttttttcttttccaatccccccccaagcggttttggggggggggagattttttttttccctccaccccttgaaagagcaaaaggggggggttaaaaaccaaatatttcccccccccggg

SEQ ID NO: 41644 - DNA, 1719 bp, Zea mays
  Clone ID: MRT4577_137980C.1
ttgggtccctcgccggccgccggtgataaaaagagactagtgtagatcaatttacgtctcctccgaacgggcccggggccggccttcgaagaaagcgacgggtgccggatccagactttattccccaaaaaccaaaataatcgccaccgctctccgcaccgaaccgaagcagcggcgatggcggcggagaagccggctcccgtgcgcgtgctctactgcggcgtctgcggcctcccggccgagtactgcgagttcggccccgacttcgagcgctgcaagccctggctgcgcgcgcacgcgcccggcgtctaccccgacgaccttgtcgccgcctcctcctcacccggcggcggcgacaaggacgtcgacaaggtcggggatcgcctccagggcgtcgggatctccgacggctccaccagcgccgcaggggatgcttccgcgtctaagccccaagaggcgaaacgcctgcctggtggtaagctcaagaaaaaggagaagcaagaagtggtcattgagaagattgtccgtaacaagcgcaaatgtgttactgtggtgaaggggcttgaattgtttggtgtaaagcttagtgatgcttcgaagaagcttgggaagaagtttgcaaccggagcttctgttgttaagggccctacggagaaggagcaaatcgacgtacaaggggacatctcatatgatattgtggagttcattacagatacatggcctgatgtaattcatctctacagtttattatgctttacatcttttatttgcttccatgtatgtaagatttctgatactgtatccgcacaaaccatttggtgtcacagcacacagcagtaagtggagcacatcacctaaatatttcatgtaacaagtatatttgtatcgaggaatgaaacaaatttagttaaataatctacttctagactgataaagtggaaagcaccaatggatttacaaatataatacagaggtaaggtaagggcatggctgttaaggcatatatagggccataccagctcatctcttgtctgaagtcatgaactgttgttccggtttttaggcttacttcaaaagtggcattctattgaccatcggcctttgttctcagttaagtctgttaacacataaacacagcaagtgattcttccataaatcttgcttgtcgtagaaattttagcgaaaatctacttgtttagttgttttgatataagaaaataatgttgctgtaccttccctttggctaataattattaaggagtagactccgatggcattttcagttctctagtgaactgtgcatggctcaagtatgtggcaagttgccatgtaacactactgaaaatgataacctgtgatttctgagaagtttatgtgcataatatgattgcagcagtcaccatgtgctggagttggttaagaatgttatagcttccatcagaggcaggttgaattttgttattgaattgtcattgcttttgtcctttatcaggtacctgagtcggccattttcttcattgaagatggaaggaaggttcctgctgcttgatgccatatggtttataaggcacgagaccaatggatttacaaatataatacagaggtaaggtaagggcatggctgttaaggcatatatagggccataccagctcatctcttgtctgaagtcatgaactgttgttccggtttttaggcttacttcataagtggcattctgtt

SEQ ID NO: 41645 - DNA, 702 bp, Zea mays
  unsure (1)..(702): unsure at all n locations
  Clone ID: MRT4577_137981C.1
ccctacagatactcgtagcagtatatattaatactggcagccgctgccagtgctccgagctcgacgccatcgcgatctccctccagtctcccctccgcccatcacccgtcgccgtcgcagccccgcccctaaaatactcccgcgcccctcctagccgccacccgccatccgtcccccgaaaatctcccagcgcagccgtactgaggtcacccgccctccccctcggccgatttactcctcggcttccctcccctgtttgaggcaatggcggcggcggagaacggcgggggcggggagagcaaggcggcgttcgcgcggatctacgacgcgctcaaggcggagctgctccgggaccccgccttcgagtacacggagtcgtcgcacgagtggatcgaccgcatgctggactacaatgtactgggaggaaagtgcaaccgtgggctctccgtggtcgatagctataagctgttgaaaggtgtcgatgttcttagtgaggaggagatgtttcttgcctccactctcggttggtgcattgaatggctccaagccttctttcttgtgcttgatgatatcatggacgacacccacactcgacgtgggcagccttgttggtttagggtgtctcgggttggcttgattgctgtanatgatgggattctccttcgcaaccatatttcgagaatgcttcggctccactttaag

SEQ ID NO: 41646 - DNA, 344 bp, Zea mays
  Clone ID: MRT4577_137982C.1
gaagagtttccagtcgtcttcgtcgtggagaagcggcaaggcgagtttgtcggagtctcacgccccgttcctcgtcgacggtggccacgggacgtgacagtggtatcagagccgacgttcatctgcaggggtgcgaaggtcggattcgggtgctgcagaggtcgcgtacatccctggcgtggatgggtgacagcggctccaccgctacggcgcccgtcacccagccttcggtacagattcgattcatcctagaggcatttggggatcgccatattaagtgtgcaggcggtgtggatgaacaagaacgagttgattggggtattggaagatgggccgagttcaat

SEQ ID NO: 41647 - DNA, 192 bp, Zea mays
  Clone ID: MRT4577_137983C.1
gagatcagaccatgagttacaggacatatcgtctgatcatacgacatggacagggacagcgtatcgtacatgtggggggaatatgaactttcgatgctgggactggggccgagcactgtggatactgctgccagagacttactaaaagaacatatatatgcagctctagagagtggctatacatgcaaggaa

SEQ ID NO: 41648 - DNA, 308 bp, Zea mays
  Clone ID: MRT4577_137984C.1
tttagtttttttttggagtgacgcaccctatctatagcgcatttgtgtaccaattatcatgattgatgattacatacattaggccacatctgccatacgaggggatgtgccaaccaaatcaaacctatccggggagtaatatgattactcagaaacatatggttggtgtgggcgccctgctatgatatcttttgctggtggacttggacctaaccaataccaagccatgagacaagtactgaataccaacccccccctgacgcgaggtgataccttattgcgagccagctgctggacacccccggcca

SEQ ID NO: 41649 - DNA, 360 bp, Zea mays
  Clone ID: MRT4577_137985C.1
gcacaggaagggccattattgaaaaaatgaaactgaaaggcattgttattccaaatgtcaaggggcgcgtcacttaaaaaggacacgggaattatcagcccccgtatataaagagagatctagcaaagtggcaaccaaaaacaactggattttgggctccaaataaaaacattgaaagggaacaaaactttcctttgggccttaacgtttaaaacaaaccttgcacttttttttttaacctgaaaaaatgggctccacgtaaaaaaaaaatggcctggcccggaatgcacccacctcgcccaataaattgctggcattccctgggagggagtactgggagtatcccaaaaccccaaggag

SEQ ID NO: 41650 - DNA, 632 bp, Zea mays
  unsure (1)..(632): unsure at all n locations
  Clone ID: MRT4577_137986C.1
cttctttcgtaccccgtcagggctgacccatcacgcgtttttttgtttctacccanngcgagcggagggcgggcaaggcgagggggcatcttnttcgtcatggaccctctctccacagagacaaccaatgnngccccgaagggggcccatgcattactgctcacgttggtacccggacacccgaactnnncatctagggtctagtccangcnnagctatcagccggtggcctgacctgcaatcnnatggtganatctcacgcgcncgcgatacgtccggtcggtcactccacgttctttcgggtaaccgggcccagaggcgttcaatgctncttcgcgcctgtgcccgtccgcatacctctgctaggngtctcaggctctgnttcgacacattcgtnnaatcatgnngtcatagctcggtttccctgctgtgaacattcgttatctcgcttcacacattctcaccacanatcatacnngagctcggaagccataacagtgggtaaagctctggcggtggcctaaatgaggtgggagctacactcacattacattggcgtnntgcgctcactgggcccgcttntccaagttcgggaaacccctgtcgtgccaagctgcatttaaatggaatcg

SEQ ID NO: 41651 - DNA, 177 bp, Zea mays
  Clone ID: MRT4577_137987C.1
gtattaacacttacacatgattcttctccgcgagtggttcgagaccgacgcggtgctcatggtcagcctcagcaactacctcttcttcaccatcctcaccgtcatcattggtcgtgataaaggtccataatgacccccgtgacttgatccatcacggcggttagttggccaagatct

SEQ ID NO: 41652 - DNA, 372 bp, Zea mays
  Clone ID: MRT4577_137988C.1
gatgccactgtctgtgtgtctaactgttggatctgacataacagttgatctttggtgatgcaggtttttacaccggacaatccggtgtcacactggacagtctaaatctggtgtcatatcgacactggatagtctgaatctggtgtcatacctgcagtgaggtggcttctctccctactaccactagaaactagccgttgggctacagttccctggtgcatcggacaatccagcgtgtggctccggacagttcggtgtccttgatcggatagtccgccagtggcaacatatttctttgtttcttggactttgcttaatacttgttgatcttcactttgatctttataatgtcttcttttgaggtgttgtttt

SEQ ID NO: 41653 - DNA, 240 bp, Zea mays
  Clone ID: MRT4577_137989C.1
cttgtgttagtttttttgattgagggaatttttgggaggaagggagtaaaaaaaacagcgggggatttaaagcatagacattttgtcaatggagctatcgtaacaaatgtaggggcacccctccggtctggagagatttgagaagtggcccggttaatccattttgaatcaccaacatggtggccaccttgcaggacgtcttgataatagatccaaagaagggtgctggtaacagggata

SEQ ID NO: 41654 - DNA, 472 bp, Zea mays
  Clone ID: MRT4577_13798C.1
gtaccgggcccctttcgagtttttttttttttttttttttttttttttttttttttttttttttttttttttttttttttttttttttaacaaaaaaaggcccatcgcttttaaattaggggacaaacgacccaaacaatacaaaaggttttggtttaatatggcaaaacccgggggtagggggttccccccgagggcggcaagacccaaacgaaaaaaaaatagggggaaaacacagggctcgaaataataaacggccttttttttaaccgaccacggcctccgggggggacgaggccccttttagggaggggcagaggggtaaccttgacaggaacaaaggccggagggccctcaccgggggggggttcctccttttcctaaaaaaacggaaccaggccagaagggctaaaaatgaaccccttcatttcctaaaagcgctcctgggaaagagaaacctcaggggggagtt

SEQ ID NO: 41655 - DNA, 1422 bp, Zea mays
  Clone ID: MRT4577_137990C.1
cgtactcgccggctctcttgcgtgtctccgcttttcgcgccttccctacctatattgcgcaccaacgtactcgaccggatgcgtgcaggcggttctcacagcacggaggcactcatcagtcatcactagtacttcactagttagctagcaatattcctactcgctaagtagtggagaactggagatcgacatgagccaggggcagccgaggaggcggcagggcgaagagggcatgcacgcgcaggacaagcccgtcaagttcggcgacgtgctcgacgtctcaggcgagctggccgaccagcccgtggctcccagggacgccgcgcggctgcaggccgcggagcagtccgtgctcggcgggacgcagaagggcgggcccgccgccgtcctgcagtccgccgcgacggtcaacgcgcgagcgggccacgtaggcagggctcagaccgcgtgccccgtcgccgacgcgggcgccaccgtcaccgagaccgagctcgcgggccgccgcgtcgtcaccgagtccgtcggcgggcaggtggtggggaagatggtgagcccggcgccggtggcgatgacggacccgccgggcgcgctggagaaggacgccgtcacgatcggccgcgcgctggaggctgtgggcgcgatggtcggtgacaggccggtcgagcagagcgacgcggcggccgtccaggtcgcggagctgtgcgccacggggtccgactccaccgtccccggaggcctggccgcggcggcgcagtcggcggccgaccagaacgcccgcgccacgcgcgacgaggacaaggtcaagctccggaacgtcctctcgaacgcgagggagaagctgccggcggacaagggggcgacgcgggaggacgccgagagggtggtgtccgccgagatacggaacaagctggacatggcgaccacgccgggcggcgtggcggacgcggtgactacagcggcccggctcaaccaggagcgcccgaggccataggtcgtcgtggcctttatatcccatgtggaacagtggaagcgtgcgatcagaagcctgcgcgcggatgagcgtgcttaatagcacagtagcgcgtgccgttttttttttggacttactaagaaaactacgtacgcttgtaaaaatgcgcgaacgacaccgtgtccgcagtgtatatagcaataaaatcgttgcgcgtgaagttccgtaaaaaaaaaaaaaaaaaaaaaaaaaaaaaaaaaaaaaaaaaaaaaaaaaaaaaaaaaaaaaataaaaaaaaaaaaaaaaaaaaaaaaaaaaaaaaaaaaaaaaaactcaaaaaaaaaaaaaaaaaaaaaaaaaaaaaaaaggccgggggccctcaatttaaatgaccaaattttgaaaacgccgcaccattaaaaaaattctctttttttggggcccataaaatt

SEQ ID NO: 41656 - DNA, 479 bp, Zea mays
  Clone ID: MRT4577_137991C.1
accctggggttacaattggattattcaacgacggggcgggaacgctgttttgggcttgccaacaaaggtggggaaaaaacaaaataaacagttgacggacggggtcaggcaggcaggggccggcaccggggggcggggggggcccatggtttttacccccccaaaaagggagaagaagacttccgggacctccccggcgaaacccccctagctaaacaaacgtttttgccgggatcagataaagcatacaggacaccgcgcgccgaggggggccacaagaaaaaagaacgggcggtggccttttaaccaggccggcgggggagctaaaggctcaaacaaaaagggtcaaaaggttggggttccttccttcaccgccggcggcggcgtttgttgttgtcacggactcctcgggagtcatggacggggtgccgggccgccgccgcccccgtttgcccggggccgggcacaaaccgggggtg

SEQ ID NO: 41657 - DNA, 505 bp, Zea mays
  Clone ID: MRT4577_137992C.1
gtacaagcttttttttttttttttttttgcttttttttttttttttttttttttttttttttttttttttttttttttttttttttttttttttttttttggaaaaatttttttttttttttttttaaagggggcattcaggttttttttcaaacttacacttccccccatgggggtgggtaaaaaattatttctaaaaaattgccgttaaaaaactaaaatagtttatttgcccgggggtataccacaacaaatatttttttcagggggggacacccccggcaaaaactttggggcatggaatcggttttttcaagccccaaaaccccccaaattttttgtttttttgcccccccaaaaaccccgggacctgggtcaacttcccgggggggcctttaaaaggggaaattcccccacactgggggccgttaataggggatcccagcccgggcccaagcttgggggaaacatgggcaaagctgccccccgggggaaaatgttttcc

SEQ ID NO: 41658 - DNA, 352 bp, Zea mays
  Clone ID: MRT4577_137993C.1
gttgacacagcctaaaggataatgggaccagaatgaaggagggccagaacgccattttttacataattgttaagagcaagaaggttgtggaaaactcccggttctttgagaagttgaaaaaaaggggttttgaggggctgttaatgggggatgccattgccaggttttttatgggccagttgaaggagtttgggggcaagaagttggtttttgccaccaaggagggcctgaagttggacaagagtgaggatgaaaagaaccccaggggggagctaagggggaagtttgggggcctttgcaaggtaataaaggaggggctggccaacaaggtggaaaagggtggtggtttcct

SEQ ID NO: 41659 - DNA, 572 bp, Zea mays
  Clone ID: MRT4577_137994C.1
tcgagcggccgcccgggcaggtacaagctttttttttttttttttatttttttttggtgagtagcttttcatttttttaaaaatattcatggtaaggattaatattattttttttattcaaaaaaaaccattatgcttacaaaatgtggagtaaaaaccaacaaataggtggcgctctagaggatagattatataagccactgttcaaaacggggtaggaatgacgccccaataatagaaggagaaaaaatggctcatagattgggggaaactaaattttaagcgggtttgaaaaccggcttaaaaatgaggctctgcttaagaagggtcatctggaatacaacgtataatgtgggctaattgaaacctgttgtgaatgcgaataaaaaaccagcgactgaagagctaaaattctgttgagcatgatccaaaagtttacacgataaatggagtttttgtcaaaaaaagaaaaacttaatccttcccacgcatattttaaacaaaaagggcgggtttcaccaccccagtttaaaacttgggcgggcccaccctctgggggaatttttcaaaaa

SEQ ID NO: 41660 - DNA, 260 bp, Zea mays
  Clone ID: MRT4577_137995C.1
tagtagcatgtgcaatcaatgctatatgcttttcaccaagcggcgaggactaactgttaatgcgatgctgcaatagcatatactaccattatatgccagtgggttgctaacgatcgatacccggatcatatgtaggtcaccgtaaagatgcggagatagtgatccacggatctaggatgatagcttatcacgggctcgcactaaacatacaacctgaccttgctccattcagaatgattcgatccttgctgcataaagga

SEQ ID NO: 41661 - DNA, 192 bp, Zea mays
  Clone ID: MRT4577_137996C.1
tgctttgttactcccgtgaaggcgccgggggggggggaccataccttatggttgtttacaaagctcgaaacctaggtcatgatacccctcacaaccacgatcctgaccatcgatctccgcaccgagccatattgcattccgtccccattctgcgtgaggtcatggatgaggctgtcttcattgtcttctctc

SEQ ID NO: 41662 - DNA, 1075 bp, Zea mays
  Clone ID: MRT4577_137997C.1
tcgggttatcacacgtttgtcccagtcactcggaaggggtactggcagttcaacatgggtgatgtcctggttgatggaaagtccactgggttttgtgccggcggctgtgcagccattgcagattctggaacttccttgcttgctggccccacagccataattactgaaatcaatgaaaagattggtgctgctggtgtagttagccaggagtgcaagactgttgtttctcaatatggacagcagatcctagatcttttgctagctgagacacaaccagcgaagatctgttcccaggttggtctgtgcacttttgatggcactcatggtgtcagcgctggaattcggagcgtagtggatgacgaagctgggaaatcaaatggtggtctcaagagtgatccaatgtgcaatgcctgtgagatggctgtggtatggatgcagaaccaacttgcccagaacaagactcaggagctcatcctgaactacattaatcagctttgcgagcgtcttccgagtccgatgggagaatcagccgtggactgtggcagtcttgcgtccatgcctgacattgcgttcaccattggaggcaagaagttcaagctgaaaccagagcagtacattctgaaggttggtgaaggacaggctgcccagtgcatcagcggattcacagctatggatatcccaccaccccgtggccctctctggatcttgggtgatgttttcatgggagtctgccacaccgtcttcgactatggcaagctgagggttggcttcgcagagtcggcctagggatatggtttggcagcaacccgtccagaggcaaacgcgtaatttgtgtgtttatgcgaccggcgatgtgtgtatatatgctactacatgtttagtgatgctttccgagacctgagacaacgcccgtctgttttaacgtggcgcaagaataattatggttctcgatgtattctccgtacacataggcgtgtctgctgcaatggtgaccatcttgcggttgcgtgtttgtatgctacaacaagcaattgcggcgatcgtcttacaacaaacaaattcgggggtccgccga

SEQ ID NO: 41663 - DNA, 800 bp, Zea mays
  unsure (1)..(800): unsure at all n locations
  Clone ID: MRT4577_137998C.1
caatcgatgatgctctacagacnataagacacagcacnntctgcctcagtgatgagcagccaacacaaagaaagagttcaaagagaagctcagagcgctgatatgatcaaactactggatgttgtaccagaagaggctgatgcaaggcagcagctcgtcaaacaccctgcttccagcacgatccccatcagttactgctacatcacaagtctcagaagccaatgttgctaccaaggcactagctgcctcggacaatacaaaatcatctgctgcctcatcggggaccagcaacggagtgcaggaagaggcatcccctactaaggaagtactcgatgttacatcgtttcggcagcgtgctgaggctctcgaagggcttctggagctttcggcagagctgctggagactcaaaggctggaggagctagccattgttctcaagccgtttgggaagaacaaggtgtccccacgagaaaccgctatctggctggccagaagtttcaaagggatgatgactgacgaagcaggtcgcacgtcactatgagcacgaatttttgtctgcctgtttgtttggtttcacttgagcagagttgtgctcggagtaaatcggcgccgctaggtttggtaatagcagtgctctgagttactcaaaaatgattgaattgacagcagctagtggagttgtattcttttttatttatatttttagagaagacagtttgtggtcacctagccactttnttaacccataaaccgataacacacatnctaataacatatgaatacataaccaaaacaaagaa

SEQ ID NO: 41664 - DNA, 349 bp, Zea mays
  Clone ID: MRT4577_137999C.1
gtcagcgccccaggttatgtcaccgctggaatagtatgtgaccggagaaaagcagcacatgagagatgtggtacctatgcgtcttctaccacatgctcctggactaccggcgaccggacgtggaggccttcctccgagctgttttgtcgtggcaggcgcccgcgaattcgtcgtgtggcagcatgccggagaaccaccacgtagactgcccatgacacctcgttcgcctccatggagactagcgccttacctttcaggtctacaaccgcagctggattgttgaaggggaactacgagctctagagctatggcactacctacgaggagctggagaagtcggtcacggagt

SEQ ID NO: 41665 - DNA, 358 bp, Zea mays
  Clone ID: MRT4577_13799C.1
cggaatgaccggatcgacccacgcagtacgtctaatggacgcgtacgctggattgagtgcaccgtccaaactaacgctcgagcaccctggcaagtactctcaattgctcgtaacatcctccatagaacgtatcggcggccatggtcatcagactcggccagaactctatgatgacgcgctagacgaacctcatgcagaacactgtcagtccttgcgagcagcttgaactgatcatgaaggccgtcaacgtgcaatacaagaagcgcatgcacacgtattatagaccgcctacaaaggcgaaatcagctgacattcctaggctaggccatgcactgtcagagtctacgagctgttgcca

SEQ ID NO: 41666 - DNA, 281 bp, Zea mays
  unsure (1)..(281): unsure at all n locations
  Clone ID: MRT4577_1379C.1
aattanatgttttctttatcccccccagctnacaggtnagaaaaccattaaaagtttcagcatctgggacaggtccaaaacgccacacgtcgtacgccatggggtgaagagatagcggaacacgacaacatttccattaatgtactccagctactaattataccaggtgatggtagattattaagagcatcaaactgcttgtctgggttgtaaataaacgatctaagaacccttttttgagccgttgttctaatgttaagatctaggaggtgcggagtagg

SEQ ID NO: 41667 - DNA, 562 bp, Zea mays
  Clone ID: MRT4577_137C.1
aagggaacaagaattaaatcaagatagcccaagcttttactacaaacactttcaccaagccaggatttaccaactggtacatcacgattggtagaaaaaagggtctcaacagcccttggatagtccagtttgaccaatgatgttcaaaaacatgcccttggcaactaaaaggaaacaagatttaaattgttcccagactccgggggacaattaaaacccgtttgggataacagtggcaaaaacgaaaagattagagcttggcctcaaactcaaaaagaggggtcatttgttttttcaaacccttccttttggggttttccagcaccaggtgggcagcctgggagccagcctcgaaaggatccgagcccattatgtcccaggggtcaaacacacactgggggaacgcctgaccagaggttgcagccctaagctggcttgggaacccaaaggactcgttgaccgggaggaaagccttgatgttggggaggggggtaccaggcctttgggtttcctggaatacagggcctttcttctggttcaaaacaccgcttttgccaccaag

SEQ ID NO: 41668 - DNA, 188 bp, Zea mays
  unsure (1)..(188): unsure at all n locations
  Clone ID: MRT4577_138000C.1
gactcgtttgtctggcggccacgcactacaccgcctacgacaacctctcaccgccggtccgcgccctacgaccctncnnnacaaacaggcggtctccatacaccaggatccccgatgagctaggagaagagtctatttggatattcgaggagagcgcaatggtggactttgttcgaccgtttggctct

SEQ ID NO: 41669 - DNA, 2041 bp, Zea mays
  Clone ID: MRT4577_138001C.1
aaaaaaaaaaaaaaaaaaaaaaaaaaaaaaaaaaaaaaaaaaaaaaaaaaaaaaaaaaaaaaaaaaaaaaaaaaaaaaaaaaaaaaaaaggtcatgccgggcattgtcgtgctccctcgaggccgggggaagtaattcataaactcacaatggcggcaacggcataccccactgtggtgctcatcccactatgcgtcccaggccacctcgcgtccatgatcgaagccggcaagcggctgctcggcagaagccgctgccccatgtccctcaccgtgctcatcacgcagatgaccatgtccgccaacctgatgtccgacgtcgacgacatcatgcggcgggaagccgactccggcctggacatccgcttcgtccacctccccgccgtggagctccccaccgtccaccacggcctcgaggacttcatgatgcgcttcatacagctccacgcgacgcacgtcaaggaggccgtctccggcatgtcgtccccggtcgccgcggtcgtggtggactacttctgcaccaccctattcgacgtcgcgcgcgagctcgcgctgccggcgtacgcctacatgccgtgcggcgcgtcgatggtcgcgctcatgctgcggttaccggcgctggacggggaggtgtccggggacttcgaggcgatggaaggaacggtcgacctgcccgggatgccgccggtgccggctcgtctcatgccgtctccgctgatgaggaaggacccgaacttcgcgtggctggtgtaccacggcaaacgcttcatggaggccgacggggtcatcgtgaacacggtggccgagctggagccgtccatcctcgcggccatcgccgacggcctctgcgtgccaagacgccgcgctccggccgtctacccgatcggcccggtcctgcctctcaagccgccgtccgcgcccggcgacggcgagcaggtagtagcacagcggcacgagtgcgtgaggtggctcgacgcgcagcccccagcgtccgtcgtgctgctctgctttgggagcatgggcggcagcttcccgtcgccccaggtccgcgagatcgccgacggcctcgagcgcagcgggcaccgcttcctgtgggtgctccgtggcccgccaccgccggacggttccaagtacccgacggacgccaacgtccacgagctgctcccggaagggttcctggagaggacgaagggccgaggcctcgtgtggcccacgtgggcgccgcagaaggacatcctcgccaaccccgccgtcggcggcttcgtcacccactgcggctggaactccatcctcgagagcctgtggcacggcgtgccgatggtgccctggccgcagttcgcggagcagcacctgaacgcgttcgagctcgtgtccgtcatgggcgtcgccgttgccatgcaggtggacaggaagcgcggcaacttcgtcgaggcggcggagctggagcgcgcggtccggtgcctgatgggcgggtcggaggaggaggggaggaaggcgcgggagaaggcgacggaggcgaaggccctgagccagaacggcgtggccagcggcgggtcgtcggacgcgtcggtgcagaaactggcgcgagagattttgcacaagcacgacgacaaggggtgtgccaccgcaagcggggagagcatgggcagcgtcgtcgttcccgcatctccggccggaataatatgatcccccgaacacggagaaatcgccgtcgtccacgaataaatcggaggccgccatgcgatccgtctggcactgctcacgttgtttgacattgttcagaatcgccgtgtgcactgtagtttcttatccgcagtagcttttactattcgaaataatgtagcatagcaatgcaagcgctgcttcttcctaagtccgtgcagcgtagcccgcgtgttcgagctagtttgtgttaagttgaatgagttaatggatgctagttgtagtcttgtggtcttcttactatttgttagctgctgatgcaaacttatttgttagctgctgatgcaaacttttagtaagatgactttgttaggttctcc

SEQ ID NO: 41670 - DNA, 355 bp, Zea mays
  Clone ID: MRT4577_138002C.1
agaccactagctttgtctactccagagcgcacaataacccgaccgacaccacgagggtgttgctcgttgccatgcctctcctggctctagctgcgagcgccacctccacgcatacaagcggtggctgcaggtgtcatacaccttcgctcgtttcatctacacgccgccatgagcatattgccaccttcgtgtcacctgccacctcttgtacattttacacctccagtacaactgccatcatgcgtcctactgccatcgccgttgcatgttccaccatcggttcatctatcttcggcaccatgcctgtaccatactataccggcccagcctcatcctcatccccatgcacactgat

SEQ ID NO: 41671 - DNA, 629 bp, Zea mays
  Clone ID: MRT4577_138003C.1
gctccaagaattcctttagtctgtagattgtttatcttcttaagctgattgggaatctaaccagtgaaatcgttgttcgcaacattcctagaggcaagcaggttatgagctatggtactggacatgcaaatgaagcaccaaaaatacccatcatcatctcatttcctaccaccgtatcagcacttcaatttgtagcctgtaagaatactggattcttgcccactcatagctaagaccttcatatggatatcaatatcatagtctggtttgaagtttgtggccttctcccttctcgacaacattttgtttttgactcttcaccatgccaatctgctgacatcgcgatatccggcacacacgaccagcaaaattaggcgccaccatcatgtcagcggacgcgtgggaaaacctgctctctgatcagtgtgaccaagaagaaacacgagagcgttagattgagaaagaaagaaatcaaggtgtgccgagccaccccccgttcatccgatgcacttgctgcttactattaacaatgaacttatcaattgaattctcctaaaacccagagaaggtagggcagatgagtcaaaataaatcggacacgtgggcggacgcgtgggcggacgcgtggg

SEQ ID NO: 41672 - DNA, 536 bp, Zea mays
  Clone ID: MRT4577_138004C.1
ggcccaaaagggggtgtcccctccaagtaaatcgacggtggaaccccttgctttttttgatttgtggcccaggggaccttttccttaaccctaccaagaaatgggattggggagctgacaaacaacaaactcttttgaaaaaaatggctaaacaaggttgttattttctgtctttgaaacatccgggggaagttttttgcatatgccatgggtttcacatcaggatggggcccagctgaaaaagaaacaattttgggtttcattttgggagctgggaagcaaataaatgcccccttgttgcccatttggccacagaaatggcccaaaaaaaactgttataacctttccaccatgtgaaattttagggccttcttccttttttttttgagaccggacaataaaaccccggtttttttcctgtaaaaactttttatacacatttgccccaaaagaaaaacaacaccccgtttctttggcccttttccagcggggggggaggggccctccctagtaattcacacattaaacccccccta

SEQ ID NO: 41673 - DNA, 397 bp, Zea mays
  unsure (1)..(397): unsure at all n locations
  Clone ID: MRT4577_138005C.1
gtccggnactcccggggacattatggtggcgcctaattttgctggtcgtgtgtgccggatatcgcgatgtcagcagattggcatggtgaagagtcaaaaacagttgttgtgccatctctaggactagctttttatttcattcagacctttggatgggttgtgccatctctgggatgagcactaacatctgttgtttcccttgttctagaaatgttgtcgagaagggagaaggccacaaacttcaaaccagactatgatattgatatccatatgaaggtcttagctatgagtgggcaagaatccagtgttcttacaggctacaaattgaagtgctgatacggtggtatgttgtgaacaacgtttttactggtttgttttcctattcgtttttagaagt

SEQ ID NO: 41674 - DNA, 295 bp, Zea mays
  Clone ID: MRT4577_138006C.1
ggggggcccccagtttatttttaaactctaaaggtttaataaagggggggcttgaaggcggttgtttaaagcttaaactttaaaggttagagccccaaagttcaaaggggaaattcaaacaaacgggcaaacccttaaaaaacttaaatattgggctttttttctttttttttaaaattaacccaaagggcaacttgtcgtccacgggtaaatacaacaaaaaaagtaccttagggtgggaggagaaataaaggagccaaagagcggggggaaaacaaaacgagtttaagggctg

SEQ ID NO: 41675 - DNA, 841 bp, Zea mays
  Clone ID: MRT4577_138007C.1
cctcgaggccggccgggccgggatttcattccaaaattcattctcaacgatacattggaacaaccaagtcatggcgagaacaagagtgtcctcccacttgtccatcttgttgctactagcagtgctctcaatgtgcgcgcacagcagcgcatcagccggtgacgacggaagcagcggcactggcgtagacgacggggagggccgccacgcgcgcgccgcggccacagtcgccgagctcctgtcggctcacaacgcggcccggcaggcggtcggggttccgccgctgacatggagcccgcagatcgcggggttcgccaaggactacgcgcgctcgcggcgcggggactgcacgccccgtcggtccccgctgttctacttcggcgagaacctgttcgtggggagaggccggcactggaacgccacggcgatggtggcgtcgtgggtggcggaggcccagtggtacgactacggcagcaactcctgcgccgcgccgccgggcgccgggtgcctccggtacacgcaggtcgtctggcgcaacaccacgcagctcggctgcgcccggatcgtgtgcgactccggcgatactttcctggcttgcgactacttcccgccaggcaactacggcacgggcaggccctactgaccgtaagtcgtcagttgatgctgtcatctgcgggccgggccgcgcacacattggtttcccatgcagtactctgcgttgaattggtgtcctttgaattgcatatgtcgttccgtttcctctgtcgattcttcaggctgctgtttcgccggtacgctaaaaataaaacgaaaaatttagttcaaaaaaaaaaaaaaaaaa

SEQ ID NO: 41676 - DNA, 297 bp, Zea mays
  Clone ID: MRT4577_138008C.1
gcgttcaagtaccaactctaacatgagacgttcacctaaaggtcatgcaccgaactctgcctggtcagaaagaattgctaggcgatcatgcgttcacttcgaggagctcatatgtctacacttattaagctacacacctgacatacttcatggcaccatctaccattggtctacagcgacagcttgtcgagacattgactacctcaggacgattgctggacatcgtactgttcctgtcgaaatctgaaagaattacgtgtgtaccgagtggaagcacgagcttatcacattttatca

SEQ ID NO: 41677 - DNA, 142 bp, Zea mays
  Clone ID: MRT4577_138009C.1
ctagttctagatcgcgagcggccgcccttttattactctgaggaccaatgggagtcaatatcgccaaatctgtaacgccgcaaaataccgagccacaattaattctgaaggaaactacaaaattacccaggtgcctacaaag

SEQ ID NO: 41678 - DNA, 856 bp, Zea mays
  unsure (1)..(856): unsure at all n locations
  Clone ID: MRT4577_13800C.1
ggtaccctngnggtccggccgggggcacactagcagagagtggaggaccagaccacaagctcatcgcagcagcacctgcaagccacagactgatctgaagtctgaacaaagatgagtcgaggaggcagcagcggtggtggccgaagctctctcagctacctcttcgagccggaggaaaccgtcctgtatcgcactcgcacgagcaaccaggaaaccgagaaggctccggataccaacagcggatgcgtcaagcaggacgacgacgagaagaagacggtcggaaccgaagcagttcattctcctcccaagagggaggtctccaacccgatactctcgtctcacaaacctccctgcaacatctaccataccggccagttaagctccgggcttcttatcactgaccggccttcgacgagggtgcgctgtgcaccaggaggggcgtcgtcgctcgggtttctgttcggtgaggagcatgagaaataacagacggtctcagtctaaaatctagaagacggtttgccccgcatgcgtatgccaaaatgaacatcatggaatgactgcttgtgagacgagagtatcgggtttcatagagtgcctgtagagcatgtatatgctatgctatgctatgtctgcttgtgtttggacagtcagctgtgttctgctttttacaacgtgtgtatgtatatttatgcatcttcgtattttttttggccacgcaggattggaagggtgtttgcaaatgtttgatgtaaaattgttgctgtccacacataagtcatatttatatgggcaactgaatgggtatttataaaagcttatactactctccaaaaaaaagaaataaaaaaaaaaaaaa

SEQ ID NO: 41679 - DNA, 374 bp, Zea mays
  Clone ID: MRT4577_138010C.1
ggccgccctttttttttttttttggggggtttttttttatttttttcggtttatttccctctcatttaaaaaaaccggggtggggttcatttaattccttacacacccaatatttgtctaggggagaatttctttgacatcgttggaacacaactttcgcatttatggtttaggatcttccaaaccatgtgggaaaacaaataaaaaatcctttacaaccgggtaataatttaattgtctccaaaaattggttgggaaatctacagcttttaaatgggggcgcatattttttagcccccaattcaaaggttcataaattgcggtaggtaatgaattcatggcaactttgtgatcaacttttgaaaaataaaaac

SEQ ID NO: 41680 - DNA, 1043 bp, Zea mays
  unsure (1)..(1043): unsure at all n locations
  Clone ID: MRT4577_138011C.1
ggtacccccggagtcggccgggnttaatgccatatgtgaggcttttgggtcaataccaccgccacctaatcacaagtctaccattcttggtgaaatatctgtttatacagtcttctcttgtgcattcctttgtcttcttcgtttgtggaagttttatagacctcctcaagagtattgtcttgctggtcgtggaggctcagtaaagctggaactgactctggactatctgttgttgatgcacaataatcacattgagttctcaaattcatctgcctctaatagggattcttgcaatgatatgggctcagtaaatgaggttcctgctcagctgatttatattgattcttttcccaagctaagggcttggtatttccagaatcaagcttgcattgcttctccactttctggtctttgcaacaaaaaccctgttcatcaagttgcgaacaaaattttgaatatgatttgccgaaaaatgaataaaggtgtggtatcgtcaagtactctttcatccacttctagtagtagtgtcagtggttcctctgtaagtgcatcagatgatccttgccaaaggcctgctgtttctggttgggaatttttagaagctgttccttttgttcttgaagctgttctgacagcatgtgcccatgggcagctttccagccgagacttgactacaagcttaagggatcttgtggactttttgcctgcttctcttgctgcaattgtgagctacttctcagcagaaattacacgaggaatctggaaacctgtcccaatgaatggaattgaatggcctagtcccggtgcttctcttcattccattgaagctgaagtaaaggaaattcttgcctctgctggtgttcagattaacagctgctatccaccttgacgattacatttaagctagataggagtttagagtacattcaaggggtcattggacaggcgctagagaactgtgcaggggggatgttctggccaagcatgcccattattggggcattgtggacacagaaagtgcgaagatggcatgacttcatcgt

SEQ ID NO: 41681 - DNA, 667 bp, Zea mays
  Clone ID: MRT4577_138012C.1
aataaagtgtggtatcgtcaagtactctttcatccacttctagtagtagtgtcagtggttcctctgtaagtgcatcagatgatccttgccaaaggcctgctgtttctggttgggaatttttagaagctgttccttttgttcttgaagctgttctgacagcatgtgctcatgggcagctttccagccgagacttgactacaagcttaagggatcttgtggactttttgcctgcttctcttgctgcaattgtgagctacttctcagcagaaattacacgaggaatctggaaacctgtcccaatgaatggaattgaatggcctagtcccggtgcttctcttcattccattgaagctgaagtaaaggaaattcttgcctctgctggtgttcagattaacagctgctatccacgtggtgtgccaccaatgcttcctttacctatggctgcacttgtcagcttgacgattacatttaagctagataggagtttggagtacattcaaggggtcattggacaggcgctagagaactgtgcaggggggagttcctggccaagcatgcccattattggggcattgtggacacagaaagtgcgaagatggcatgacttcatcgtcctctcttgtatgcgttctccattcggcagagacaaagagcagttgcgcagctc

SEQ ID NO: 41682 - DNA, 3037 bp, Zea mays
  Clone ID: MRT4577_138013C.1
cccgcgcgcccgccctttgttgcttctcggccgcgctgctggcctcgtcctgcggtgctgctacaattgcttcccgtggagttggggctgctcctgcggactctctctcgggcccagctcttgggcgcccctgggcccctcgggtcctcgtcgtcagtacggggcgcacgctccttgccgcttctttaccctcagattcctcaacttcaactcctgggagcatgagccactaccttgctcatatgtctacgttgaacgaaatcttactcggtgtgtcttatggtgatgtcatccacattctttcgttgtatggaatggttccagatgttgccgtggctttaatgccactatgtgaggcttttgggtcaatagcaccgccacctaatcacaagtctaccattcttggtgaaacatctgtttatttggtcttctcttgtgcatttctttgtcttcttcgcttgtggaagttttatagaccccctcaagagtattgtcttactggtcgtggaggctcagtaaagctggaactgactctggactatctgttgttgatgcacaataatcgcattgagttctcaaattcgtctgccgctaatagggattcttacaacagtatgggctcagtcaatgaggtctctgctcagccgatttatattgattctttccccaagctaagtgcttggtatttccagaatcaagcttgcatcgcctctacactttctggtctttgcaacaaaaaccctgtccatcaagttgcgaacaaaattttgaatatgatttgccgaaaaatgaataaaggtggagtatcatctagtaatctttcatctacttctagtagtagcgttagtggttcttctgtaagtgcatcggatgatccttgccaaaggcctgctgtttctgcttcgggaaattttctttccctgttaggcggtgttggttggtgagaaactgacaggatttgtgctctgggtactggacggacacattcttctgggctgtgacccgggtacctggaaagcgtatgtttctcagtttatgttcctggtggtgaagtttgttccatcatggttgccggacataaagctggacacgctaaagaagatagcagctggacttcggagttggcatgaacgtgtcctctcgtaatctcttattgacttataagggtagcaagagtggttcttcggtaagtgcatcggtcgattcttatccaaggcctgcagttcctgcctcggaatttttcgcagctgttccttttgtacttgaagctggtttgacagcttgtgctcaaggacggcttaccagccgtgacttgattacaagcttaagggatcttgtggactttttgcctgcttctcttgctgcaattgtaagctacttctcagcagaaattacacggggaatctggaaacctgttccaatgaatggaactgaatggcctagtcctggtgcttctcttcattccattgaagctgaagtaaaggaaattcttgcatctgctggtgttcagattaacagctgctatccacgtggtgtgccgccaatgcttcctttgcctatggctgcacttgtcagcttgacaattacatttaagctagataggagtttggagtacattcaaggggtcattggacatgcactagagaactgcgcagggggaagttcctggccaagcatgcccattatcggggcattgtggacacagaaagtgcgaagatggcatgacttcattgtcctctcttgtatgcgttctccatttggcagagacaaagatgcagttgcgcagctcatccaaagctgcttttcgtcctttctgcagtcatcatccagtggttctgacataattgcaaaccgtggagttggggctttattaggggactcaatcacggatcaaggtcttaggctcccaatggcacctggtttcatctacctgagaacatgtcgaactttccatgacacatacttcgttagtgaagtgatcctcaagcaagtgattgaatgggctcacaaacttgcaaatggatggtctttcaatgagcctccacagttgaaatcaggccggacaccactatcttgtgcagcatccatggcgcatcaggtcgcgatgcttggtggtggtctcctatgcatagcaggtggaccacttgtggtccaggtgttgtatgaagacacactaccgacactgctgctgtcagccagagaacagagtttgaaaaaccctgggccagtttctagcacactccaaggttacgccatggccaacatgctcttttactgtggtagcctactttggggagcggacaggagttctcctgtcatgaaattgtctttcctctcgaggcggccacgggtggtgagaaaccacatggatttcatagctggtgtgctggacggacacattcttctgggctgtgacccgggtacctggaaagcgtatgtgtctcagtttatgttcctggtggtgaagtttgttccatcatggttgccggacataaagctggacacgctaaagaagatagcagctggacttcggagttggcatgaacatgaccttgctctatcccttcttgagcgaggaggaccacaagcaatctctgttgtagtcgagacctttctgtgatcctgccatttggacattttgccccccacctgacatcgcagccgctgttagggtttgaagtcggtggtctgaggtctagctgaagtaatcaggatgacccttccagaattccacttgagcaaccaggataactgatgtttttctcatgtatggcgaacccattttgtttttgtgaattcaatacggaagaacattcaacctactagagtctagagtgtattgacatcagccctaacatgtaacctatgggaatttcattaactttattgcactgacttcagccctaacttgtaacatacgggaatactctatcgtgttttatatcggcgttttagttgggataaccaaaaaaaactctcgcggccgccgacatgaaagctcgtcgaccggtaattagtcgggccggtccgcaggcgg

SEQ ID NO: 41683 - DNA, 254 bp, Zea mays
  Clone ID: MRT4577_138014C.1
tatacgactcctgggggcgattgggttcttcgaggccggccgggataataacattgaccagacattgcgaataacacacattgaccgcgcacataggtatataccttcgatatgaacatcatgcttcgcgcacgcatgacttggagggatcgaggccgcgggggcatgggcgccaccaagtgttgcgccatggccgtccatcacgaccagctacaacggagagtgggtcatcgtcaaggacaacccgagacgcc

SEQ ID NO: 41684 - DNA, 636 bp, Zea mays
  unsure (1)..(636): unsure at all n locations
  Clone ID: MRT4577_138015C.1
cggggaacaatgtgaacaaaccaatttgcaatttgagggaaaaataatgtccaagaaagcattgagtttttcagcaaataagtgcaagtacaaaaggcatcatatactacaatacatagcaagcctaagagtgaccttaggatcatcaagggggactgcggcaaggcagaatgactacgctaaaatgacaagagaacacaaaaacattgggattgtaagaggaaaaggacagagcgaatcaattatctcaatactcaataacagaaaaggaacaagcagaaaattataaatgcagaagaatggtggtgtgaggaacctcaggcgatatagctcgatgggcaagatgagcattgttatgaagaaaatccaacgtctctgcaacttgtagcagcccatgtttagtctcaagtagccccatttcctgaaacacaagaaagaaattagcanactgctgaattaaaaatatgatcatgctttggctgtccaaactattgctatgactaaggcaccactcagtacacagaaatgcaaggaacanagaatctacaggcatcaatcaccacttatatggcctggaaagttccaaatccacaggatacctgattgtaaactaaaagttttacagtagaaaatcgc

SEQ ID NO: 41685 - DNA, 370 bp, Zea mays
  Clone ID: MRT4577_138016C.1
tttatttttagcaaggaacaaaaaaacaagggaaccgaagcatttacagacacgaacgacgcaacgccccacgagggaggaaagcaagagcaccaaaaaaaaaaggcgaacaacacgaaaggggacaacaccaggcaacacattaaacagccccccctcacaagccataaactggctccttctttatactaatactcggcctccttatatttatcagcattctcatcctggtactgctggtattccgacacgaggtcattaattttgctctctgcctttggtgaacttcattttttccattcccttgcccgtgtatcaatgcaaaaaagcctttctactgaacatgtcagtgaactgtttcgttaccctt

SEQ ID NO: 41686 - DNA, 651 bp, Zea mays
  unsure (1)..(651): unsure at all n locations
  Clone ID: MRT4577_138017C.1
gttgaatggtggaggtttgcttatggttcattcgtcgtttctcattctgatatcatcatattggtgcaaagattagcaccagacttgctctaagcttgattggaaatgctgctggctagatctgcagaggcaacataattttggaggtagattgaggcgttgactggagtggagtttgtagcatcggcgaggatatcagttggatatatttacctatcgctcttcatattattaaatttctatctgctgcaattttaatttcttacattggggtgatggttttctccagcaactcgattaaatggatggatgggttggaggcgagttttgatcctgcttgagcaatcagaagttcggaatgttcagagttccttagtttgttcactaaccatcctgcgtcgagttcttgaaaattaacttcacacacaggctcccttaatgcttgttactgaattgcgttttgggagagttgaaggtggaggttgctacatccttggtttgaaagttttaggcaattttagtcaatcaggtgccggaagatgccacgactaatagagctgatgtcctaatgaaaaaagcgtagaggcaaagnaacagagtgagtttggacgtagatgagcttgacggactagttcaggcagcgataacaca

SEQ ID NO: 41687 - DNA, 473 bp, Zea mays
  Clone ID: MRT4577_138018C.1
gacagaagtacacgacacctactgcggcgtcgcaggggcagctgcagaaagtcgcacgcaaagagcaggctcatacggagtactacatacgaagctggctctactgcccatcggaggagacgacgcagaccacgcactaatatggtcggcagggaagcagcctccaagcccatgcactcagtgctgagtggacggcggccgaagcagctttacagcacaggcgcctaacaggacgacgaccaccttggtgagtagaaggtcgacgccttctgccagcactactacccgttcgcggccataaaggcgcccttcccctactactgtctaaaagttcccgttacagcttcttcgtgagcgatttctgcaccggccacgtgtcgtgcatgctcttgactactgattgcgtgcttgcctgatttacttgctcaggggtcagcttgcgcacacgtatatgtctgtattatagtatcgta

SEQ ID NO: 41688 - DNA, 338 bp, Zea mays
  Clone ID: MRT4577_138019C.1
ttttaatttattttttttttattatattattcatgataagagtgggggtttagtgattgaacatcacgcttttaaacggccttttaccacccggtgcctgggggtaatagcctaaaaaagacggcgcctttttattatcggcgattatatcaaactgcttctcccggtaggaaaaacatgatacactttttacctgcgcaagtttacgaaatgggaaaccgagtgggaggcccggctgttatgtgcaacatcggctcccccggattttttaatgggtggtttttgtggttgagctggccctttagcattctattcttggggggggggggaaggaactc

SEQ ID NO: 41689 - DNA, 1195 bp, Zea mays
  Clone ID: MRT4577_13801C.1
cctcgaggccggccgggctacccgccgccacttcatcagtagaaaccacctatcctgcctgctctacctacctccgctccccagccatgacggtgctggacgccgagtcgcggttccatgtcctggcggtggacgacagcatcatcgacaggaagctcatcgagatgctgctcaagagctcgtcttaccaagtgaccacggtggagtccgggaacaaggcgctggagctgctggggctgagggacaacggcgcggaggacgcgtcgccgccgtcatcctcctctcatcttcgtcgtcgtcctcccctgaccatcaggagatcgacgtgagtctcatcatcactgactactgcatgcccggcatgacaggatacgatctgctcaagcgagtgaaggggtcctcatcgctcaaggacattccggtggtgatcatgtcgtctgagaacgtgcctgcccggatcagcaggtgcttgcaggatggcgcggaggagttcttcctgaagcccgtgaagccggccgacatgaagaagctcaagtcacacctgctgaagcggaagcagcccaagcagaagaacaagcctcaggcgcaggcggtggagtctcctgagcagcagctggacccgcatccgcagccggtgcacgagctggagctggaggaagccgcggcagatcgcaacggcgtgaacaagaggaaggcagcggccatggaggaggggctgaccgtggtggtgacggcgccggagagcaccaagccgaggaggctgtctacgagcagcctgactgtggagacctgatcaaccgtggagactacgggctacggctacgcacattaatctagcagtggatgcaagccccagtcccagtcccagccccgccgccaagaaacacaaagtcgtgcctgctgcttttggttctgggagctaagctaacggagggaagtgacaaacaattaaattatatgtagcggctgctgcttcggcctgcaaattttgttgcgctaacgggcatggacatgcatggacaccatcccttgtgttcgttaatcgttcggaaggggaaaagaagaagaagctgtagataaaaaaaaaagggcaggcggctaattgttaatttccgcatggtgtgacggacagacggatggatcaactgatgatgttgttttggctcggttcttcttccttgtacactgagtattc

SEQ ID NO: 41690 - DNA, 452 bp, Zea mays
  unsure (1)..(452): unsure at all n locations
  Clone ID: MRT4577_138020C.1
gacggcacaacccggacaggaggaggcggcacaacgccgcacgggagcgacggcagaagggagncaacaccgangaaaaagggcgcccagggggggaagcngggaanccaacggngccagagaaaggaagacggcaaacacggcgagacncgcgngnagnnggcgagggccgagcgggaggnaaaagnngnnccaccaacagaccggaaaggcagacaaaacaggangncgagccaagcgccggggccaagaccgacagcaggagaaaacaggggcagngacaggcggacacagcngggagagaggcganaagcgggggagcgggcaggggggcacaggggagggacgccgaagacagggccacgggggaaccnngccggggggagaaggggaaggggccgacgggcgcggngggggngggggggggcgggggggggggggcgggggcgggg

SEQ ID NO: 41691 - DNA, 2543 bp, Zea mays
  Clone ID: MRT4577_138021C.1
ccctcgcggccgccctcgcggccgccggcgacggcctcggcgccaggggcgtgcccgacgtcgccgccgacatcaaggtgctcgtcttcggctccaagcttgtcggcgctgctgggggcgtccccgccgccgccacgttcgccaaggtgcccgcgctgaacgggatcttccgccaggcggtgcgggcgctgcacgtcttagtgcgcatcgagctcaacgcacccgtgaaattggggaagaaggatgccggtgaaaccggtgagggaaaggaggaggcactggtggtgctggccacacagctcgctagagcagtgcaggcactgtgcaggttgagtgtcgcccgggcaaggctctgtgccgagagatttgctgatgctgagcttcgggataagcttactgctggcattagcgtcgatgatttgagggggatgcttgacaaggttttgattgattcagatgctgtgtcagtcttgaagggggtgtacaaccacttgctcaagttcagggactttctctcctgggaagcagctgtggccatggcagtaattgaagcagacagttcaattgagaagccgcaagctgctgttgagaatgaagcagccagtgtaactgagaagccactggctggtggggacaaagcaaagggtgacaagaagagcaagaagaagaaaactttgggtaagggtacttctgctgtgctcatgctgcttagggaccatgtgacaaatggaagtactgttgctgccatgaattctgcgtcggttgcagagtgggcaacctctctgtcattgctatttgatcccaaatgtccaggattggagtcacttgtggagaaggtgaaggagattgttgagagcaatgaagtgaggagattgcctaaaattccaaagggtacacgcgactttggtaaagagcaaatggcgataagggagcgagcattttcaattataactagtgtattcaagatgcatggtgctactgcgcttgatacacccgtatttgagctgagagaaacccttatgggaaaatatggtgaagactcaaagttgatatatgacttagctgatcagggtggtgagctttgctctttgcggtatgatctgactgttccatttgcccgttatgttgccatgaatagcattagtgcattaaagagataccaaatagcgaaagtatataggagagataatccatctaagggaagataccgagaattctaccaatgtgactttgacattgctggtgtatatgaacctatggaaccggattttgaggtcataaaagttctgactgaattgctgaatcagctggatataggcacatatgagataaaattaaatcacagaaagttgcttgatggtatgttggagatttgtggtgtgccccctcaaaagttcagaacagtttgctcgagtattgacaaactggacaagcaaacattcgaacaggtgaagaaggaactggttgatgagaaaggtatatcaaatgaaactgcggatgaaattggcaatttagtgaagactaggggccccccgttggaagttttgatggagttgagaaaggagggcagcaagtttatgaataatgtagggtctgttgctgcactgaatgagctggagatattattcaaagctctggataaagcaaatgcaataagcaagataatttttgatttaagtttggccaggggccttgattactacactggtgtcatatatgaagccgttttcaagggtgcagctcaggttggctccatagcggctggtggtcggtacgacaaccttgtgggtatgtttagtgggaagcaaatccctgctgttggtgtgagccttggaattgagagagtctttgcaatcatggagcagcaggagaaagaaagaaatgagaagatccggcctacagagacagaggtgctggtgtcaattctgggaaaggaccttaccctagctgccgagctcgtgagcgagctgtggaatgctgggataaaggcagagttcaagctcactaccagggtggcgaaccacatcaagtatgccttgcaatcaagcattccgtggatggtgctagtcggcgagtctgagctgcagaaaggaactgtaaagttgaaggacgttgaagccaaccaggaagaagaggttgataggaaggattttgttcgagagttgaagaagagattgagtaaatcctaagaggaaaattttaggcgttgatatcatcttttgacacccatttgacgcaaactcaattagggggagaatgacattacatcattataatttaaactgacgtgaatgtttcagtccggttggcatagggccacttgttatgttcataaggtcattcgaatcccctgagtcccaatgcattatgctgatgaatcaggctgcagacatattgtgaattatattctttttgtactaccttgaggaatgaaaagtttttgtcctcacatgtaatttggaacaaagccagcaacctgtatttttattgcatttattattttaaaataaaaaaccgacattgaatctaaaaaaaaaaaaaaa

SEQ ID NO: 41692 - DNA, 378 bp, Zea mays
  unsure (1)..(378): unsure at all n locations
  Clone ID: MRT4577_138022C.1
ctccgccgccctcgacgtgtagtagctccgcgggcgacgatgatgtcgtctcggcgttggacgacgacgacgaggtggacgtgccgccggcgctgccgcccaggaatgacatgaccatcaccgggaagctgaacgcggaggaggacaccatcttcctgaaggtgcagatcgccgacgaggcgtcggggcacgcgcgcaacatctacttcccgttcgacatggcgagcgacacggcggcggaggtggcgcangagatggtgaaggagctggacatcacggaccgccacgcgtcggagatcgccgccatgatccaacaagagatcggcaggctgctgccggggcgagcgcagcagcacgagtacacgtacgcgtcacgcg

SEQ ID NO: 41693 - DNA, 819 bp, Zea mays
  Clone ID: MRT4577_138023C.1
cgacctgtgctaactcatggcctcttagacctaggcatagctcattcagcataggcccaactgaaggttgataggcaggaacagtgcttagcacatgataaagaacctaggcacagaaaaaaatagtaaattctaggagtctgagaataaaacaaggaacatcattaagtctgaaagaactaagaaatttttaactgataacatcctaggtcgaggaagtggtagtattggatccatatgcatagatagtatgtgaagcacatcatcatgaagacatgtcttttttgaagatagaaggatcctttccatgatctgaaccaaaaggtaccaacataaataaataaataaaaggacaaaaacagggaaaagtaaatgttgaaagagaaagggaaatgtcaagggggataggagtgaatttatggttgaactaaagatagtggaggacataccggaaagacgaaagtaaatgaatctgctggaagaggacccgctttgcacgcaatggtcagcccatttactatttgttcaaagatgccagatgatggcttcttactatcatcttccatgatcacaggtgtaagatccaaaaccatttcaaaatcaccaacagatatcacacgaatcgcagcagcaatgtcgagcgcccatttgcaaagaggaggggctgtgcaacgtgctagcctcaacattgtacaaaatgcagcatcgcttactattggagaacttagcaaaggttcaacatagtttacctgcatggcacaccatcaaattctgagccacaacagatatgataaatacaatggtagaacgtgcatcact

SEQ ID NO: 41694 - DNA, 617 bp, Zea mays
  Clone ID: MRT4577_138024C.1
gggaagcaaatccccgctgttggtgtgagccttgaaattgagagagtctttgcaatcatggagcaacaggagaaagaaagaaatgagaagatccggcctacagagacacaggtgctggtgtcaatcctgggaaaggaccttacactagctgcagagctcgcgagcgagctgtggaatgctgggttaaaggcagaattcaagctcactactagggtggcgaaccacatcaagtatgccttgcaatcaggcattccgtggatggtgctagtcggtgagtctgagttgcagaagggaagtgttaaattgaaggatgttgaagccaaccaggaagaagaggttgataggaaggattttgttcaagagctgaagaagagattgagtaaacccaacattcatttgaggcaaaatcaattacggcagaggcggagaatgatactgcagcattgtagtttaaagtgctggggatgtttttgttagattacccgtctagggtttggtgtcttccccatgtaattaccttctcacccctttgtaatggaccagccccaattacctaagtctattaataccacacccaaccctgattagggttagggtttttattcccccccccccac

SEQ ID NO: 41695 - DNA, 1060 bp, Zea mays
  Clone ID: MRT4577_138025C.1
tcgaggccggccgggcgccgccacgttcgccaaggtgcccgcgctgaacgggatcttccgccaggcggttcgggcgctgcacgcccaagtgcgcatcgagctcaacgcgcctgtgaaattggggaagaaggatgccggtcaaaccggtgagggaaaggaggaggcattggtggtgctggccacacagctcgctagagcagtgcaggcactgtgcaggttgagtgtcgcccgggcaaggctctgtgccgagagatttgctgatgctgagcttcgggataagcttactgctggcattagcgtcgatgatttgagggggatgcttgacaaggttttgattgattcagatgcagtgtcagtcttgaagggggtgtacaaccacttgctcaagttcagggactttctctcctgggaagcagctatggccatggcagtaattgaaacagacagttcagttgagaagccgcaatctgctgttgacaacgaagcagctggttcaagtgaaaaggcacaggctggtggggacaaagcaaagggtgacaagaagagcaagaagaagaaaactttggggaagggtacatctgctgtgctgatgctgcttagggaccatgtgacaaatggaagtactgttgcttccgtgaattctgtgcttgttgcagagtgggcagcctctctctcattgctctttgatcctaaatgtcccggattggtgtcccttgtggagaaagtgaaggagattgttgagagcaatgaagtcaggagattgcctaaaattcctaaggtgataatcatattgttcgcagacggcgctgttttatttatatggtctaattagtggtacccatattgtaatgctgttccctttcctcacttttctaaatgtttgtgcttactcctgttagggtacacgtgactttgggaaagagcaaatggcgataagagagcgagcattttcaattataactagtgtattcaagatgcacggtgctactgcacttgatacccctgtatttgagctgagagaaacccttatgggaaaatatggtgaagactcaaaattgat

SEQ ID NO: 41696 - DNA, 680 bp, Zea mays
  Clone ID: MRT4577_138026C.1
ccttggaattgagagagtctttgcaatcatggagcaacaggagaaagaaagaaatgagaagatccggcctacagagacacaggtgctggtgtcaatcctgggaaaggaccttacactagctgcagagctcgcgagcgagctgtggaatgctgggttaaaggcagaattcaagctcactactagggtggcgaaccacatcaagtatgccttgcaatcaggcattccgtggatggtgctagtcggtgagtctgagttgcagaagggaagtgttaaattgaaggatgttgaagccaaccaggaagaagaggttgataggaaggattttgttcaagagctgaagaagagattgagtaaaccctaagtgggggattttaggcgttgatatcatcttctgacattcatttgaggcaaaatcaattacggcagaggcggagaatgatactgcagcattgtagtttaaagtgctggggatgttttcagtcgccttggcagagagccgcttgttatggtcccctgaatcacaatgcattatgctgatgaatcaggccgtgacatattgtaaattgttattctttttgtacttgagaaatcaaagttttttttttctcacatgtagtttggaacagcagcaacaaagccagtaaccttattttttcattgcatttattgaccacgactcc

SEQ ID NO: 41697 - DNA, 833 bp, Zea mays
  Clone ID: MRT4577_138027C.1
actctctcagccaaagagcttaatagtagtactaccaatcctcctcgtatgtgtgtggcgtgtatatgctacaccaatgagtatatgtttcactagtgtgtttgagcacaacaaacaaagaaagtgagaaagagagagtagcagttagtagttgcgggttcacatcgggcggcatcggacgcggtgaacgctgccatccctgtcgcggccccagttgtgcgtcgaacgcggccatcctcgccatcaagcgccccctgcccctgccatcgagggccaccctccttgccggtaatgtcctgacccgcctccctggtgggcaacttccagatccacctccctggtcggcgacttccagatccgcctccctcaccgtgctgaggcacgtttgtgatggccccgaagtctccttcaggaatgtgtgcctgttcgtgccgtggatgttcagccaaggcgaaaggtggtatgttcgtgaggttcttcataataaccttcaggaacggaatggaacatttgcgtcggtactatatccaggtcacaaatcactttacacaaattcaagacagtgtacatggctatcaggaagatacctacgagggacccgaagatatttcgcttccggggcacgtgattttttcacttccggggcacgtgattttttcatttgggaagtgagaagcacactgatatttgcttcccgaggtgtttttcgcataacgtgcgctgtcatcggggagggttgggtcaaaatacctaaaacatgatcaagtagtgcccccattgtgctactagtcccactcccacgatcggtctacctccacgtccaacaccgccac

SEQ ID NO: 41698 - DNA, 1425 bp, Zea mays
  Clone ID: MRT4577_138028C.1
ctatgctcttggaaacaatccgtttgcgatccaatcacggaactcattcatattttcatcttcttccccttcacgtgcagtacttgtaccaagctgtgaagaagatgctccaaagagtggcacgtagttctcatcatggtcacacaaattgaagtcatcatctgacatagaactctctctaaaaaagttatgaagagtcatgcaagcaataattatttggctttgttttggcattgggtaacctttgtaaggtgcaaggtaacctggccgattaggatagcctgagtccacaaggtagaacttaccttgaagtggatgagagaacttatgtccatacttgttaattgcatccttgaataccctgatgtcatgaatcgacccaggccaacccaccacgacaaaagtaaacctcatatcgaaatcacaaacggccaacacattttgacttgtgtaaccatgtcttccagtatgttgaactgtctctgttgttggaactaccacaggtatatgagtcccataaattgctccaatacatttatcaaagaacagagaaaaccttggagattgtagcctttgatgtatagtaccaaattcaaggtcttttggcttaataatatcatcatcatctccttcctcattcacatcatctgcttcaattggataattagcctcccccggaatgcatgacgaacgtccacctacaccataaccatgaaacatctcccgtatgtagtccaagtaatatggtaagcatgttcggagcttcttagactctggtttcctcctacctctgtatgtttttttccaccagttgtccggtgcgaagattgtaccatctgggttcctacccaaacttgtttctccttgtgaccacacatgaaaagcgtataaagtcttgcattgcggccacttgttttttagttgcttggtagagcgccatagaccatatttttctaagaatttctgagcaattatcttgtaaccaccgtttgacattgtaccactaggacaattaccagccctaatttgttcgacagatagttcacagaacatgtaaatgtttgtttctgtccaattggccttgtcataggttttcatgcttgagatgatgtcatagttatactcatctccatcggactcgaaaacttcatctcgagtccttgctctgccacgcccctggtgtggtgccttcagaactggttctaagtccaccttgtgtactggttccacctccaaagttaagcaaccgagcacgcccactagagggtcttgcactgccatggcgagaccgacctcctgggggcgaagggggagccccttctcatgtaacccagctccgggttggagtaatcccgagtaggaaccaaggtagggaaatgtgtcatcctgagagttgaggttaggatttttcacaacctttcccat

SEQ ID NO: 41699 - DNA, 461 bp, Zea mays
  Clone ID: MRT4577_138029C.1
ccctgccccccgaccgtaacttggtattcttttaaacgggcggcctttttttttttttttttttttttccggaaaaggggcgaaggacattcaatcattttttgggggtagaatccttgaaaaagaaccatggttccccatgggccataataactcttttgggcgggcaaaaactattaagggaatggcacctgcattttgggcgtgaattgaattaatgaaaccgaacctcctagttggccggaagtgactctttatggggggcctcaggcctaggtgtaattgtttttgaactgcattcaggccctttaaaaaccttgcctggtgggggtccaaatccttggaattacctattgccggtgggaaagggtttttattcaaaatttgcaagcaatttaagagccttaattggaattggaaaaacctgggttgctgactaaaacagctacctcacattaatg

SEQ ID NO: 41700 - DNA, 1465 bp, Zea mays
  Clone ID: MRT4577_13802C.1
gaccatgatgtagaagaacttttgcctccatcgtcaggcaggctgacatgaacggatgttcagattacaacatgttcatctgaacactcagtgtacaaggaagaagaaccgagccaaaacaacaacatcatcagttgatccatccgtctgtccgtcacaggtttttgattgagccagcaggtcgttgccagaattaagccatgcggaaattaacaattagccgcctgtcctttttttatctacagcttcttcttcttttccccttccgaacgattaacgaacacaagggatggtgtccatgtccatgtccatgaccgttagcgcaacaaaatttgcaggccgaagcagcagccgctacatataatttaattgtttgtcacttccctccgttagctcccagaaccaaaatgtgtttcttggcggcggggctgggactggggcttgcatccactgctagattaatgtgcgtagccgtagcccgtaggtcgccacggttgatcaggtctccacagtcaggctgctcgtagacagcctcctcggcttggtgctctccggcgccgtcaccaccacggtcagcccctcctccatggccgctgccttcctcttgttgacgccgttgcgatctgccgcggcttcctccggctcgtgcaccggctgcggatgcgggtccagctgctgctcaggagactccaccgcctgcgcctgaggcttgttcttctggttgggctgcttccgcttcagcaggtgtgacttgagcttcttcatgtcggccggcttcacgggcttcaggaagaactcctccgcgccatcctgcaagcacctgctgatccgggcaggcacgttctcagacgacatgatcaccaccggaatgtccttgagcgatgaggaccccttcactcgcttgagcagatcgtatcctgtcatgccgggcatgcagtagtcagtgatgatgagactcacgtcgatctcctgatggtcaggggaggacgacgacgaagatgatgaggaggatgacggcggcgacgcgtcctccgcgccgttgtccctcagccccagcagctccagcgccttgttcccggactccaccgtggtcacttggtaagacgagctcttgagcagcatctcgatgagcttcctgtcgatgatgctgtcgtccaccgccaggacatggaaccgcgactcggcgtccagcaccgtcatggctggggagcggaggtaggtagagcaggcaggataggtggtttctactgatgaatgtggcggcgggtagagggagatgcagagggaaggcggggggatgggggaggatataggcgagcggcgcagcctggcagccatggtacggcacggcacgtcagacgcgcgcccacgcagcggcgtggcctcgatccccgcccccactcccccgggaaagcaagatccgaccggatcacgcacccgaatctccacaactaatcggctccat

SEQ ID NO: 41701 - DNA, 320 bp, Zea mays
  Clone ID: MRT4577_138030C.1
tcgcgagcgatccggaactcgaggtatctgaaggcggcgcaggagctgcttgacgaggtcgtcaacgtctggaagagcatcaagcagaaggcccagaaagagcaggtggaggcagggaagacggaagggaaagagaacgagggaggagggcccaagagtgagggtccgcaggagtctggcgccaacgctgcaccggagctttctactgccgagaagcaggagcttcagaacaagatggcgaagctgatggcgatgctggacgaggtggaccggaagtacaagcactactaccacctaatgcagagtgtgttctcgtgctt

SEQ ID NO: 41702 - DNA, 165 bp, Zea mays
  unsure (1)..(165): unsure at all n locations
  Clone ID: MRT4577_138031C.1
ggagcccgncgccgncgagaacnccgccaacgncgccgccgcgccccccgnggccaccnggaagnaccgcgagcggacgggccgccaccccgngggcgccgaccgggnggacaacgcgcgcagncggaacgncgacaccgncagccaagnnaaggacaacgcgcg

SEQ ID NO: 41703 - DNA, 500 bp, Zea mays
  Clone ID: MRT4577_138032C.1
ttttttttttttttttagttatatactaatgcactattaggctcgtcccatatttgtcaaatacggaataaatacaggttcaatccaggaaaaaaacgggatcccgaaaaaacggacagaataagccctctctcgtttccgtcccatttccatatttttccgtaaatacggaaacggtcgtgtcaaatgtagaaaatggtacgggtcggatgatttatagcggagcgcgcctgtgaaaacccgagagtgtctgcttggaccctgtacggtcctggtgcaccggacactgtccggtggcacaccggacaatccggtgcgccagaccacagcacacttggtttattttgctcctttgaattggatccctaacttgaatatttattagtttgtgttgaaccttttacacctgtagaacatgtattctagagcaaactagttagtccatttatttgtgttgagcattcaaccaccaaaattaattgtgggaaaaggttaaccac

SEQ ID NO: 41704 - DNA, 272 bp, Zea mays
  Clone ID: MRT4577_138033C.1
aaaaattgtttttttttttttttcttggtgttctaccaattgtttaataaatcttttcatgatgtcgtgtggtttttattcaaaagatttttcacatccatttttttgaatgggtgccccacaagccaacaagccacaagggccgttgacacgcaaacacaaacgcggagaagacctgcaaaccatgaagacgcccggccatgttaaacaaaccgtcaaccccaggacgggggagcttgcttgccaaaaaagaaaccacccgttctaataaa

SEQ ID NO: 41705 - DNA, 337 bp, Zea mays
  Clone ID: MRT4577_138034C.1
cggttttagctttttttgtctggaaaagaccaggctggttgccatcatatatatattcaacaacatggacatgggaggaggaggaggaggaataataaggacatgactccggctggtcttggttactttgggtgctatcctgaacgaacaagaactgatctggaacaggaaaagctggctacagaggagagagcaccgaccgcctgagccgaatctcacaaccgtcggttttctgagccactgcacccacagaaacagactcaactggcctgatgttacactaggcacaacacccatctcggcggccccgcactagcaggctacttctacggaggcc

SEQ ID NO: 41706 - DNA, 924 bp, Zea mays
  unsure (1)..(924): unsure at all n locations
  Clone ID: MRT4577_138035C.1
aatccatatctctcttatccatttagagcatatggatcgatttataagaatcgaatgttttgtttttatgttattttgtgatagaatgaaaagaattctatatagaatgggttgggaattatgcctagatcccgtataaatggaaatttcattgataagaccttctcgattgtagccaatattttattgcaaataattccgacaacctccggggaaaaaagggcatttacttattatagagatggtgcgatttgactctttatagaagggagaagccgtatgagatgaaaacctcatgtacggttttggaacggagattttttgaatagaatgaacgaccgtaacggatgttggctcaatccgaaggaaattatgcggaagctttgcagaattattatgaagctatgcgactagaaattgatccctatgatcgaagttatatactatataacataggccttatacacacaagcaatggagagcatacaaaggctttggaatattatttccgggcgctagaacgaaaccccttcttaccgcaagcttttaataatatggccgtgatctgtcattacgtgcgactatctccactatagaaagaagaaaaaaaagaaaggaggaaattttctagtgaatactagaaaagagggctttctctattccaaccgaggagaacaggccattctacagggcgattcggaaattgcggaagcttggtttgatcaagctgctgagtattggaaacaagctatagcgcttactccaggaaattatattgaagcacagaactggttaaanattacgaagcgctttgaatttgaataagaccactctccattttcataaaaagggtggtttggttgaaaatcaaatcaagaatttcattatatccctttcttctaccttcaattttatatcatattt

SEQ ID NO: 41707 - DNA, 854 bp, Zea mays
  unsure (1)..(854): unsure at all n locations
  Clone ID: MRT4577_138036C.1
cccacgcgtccgcccactcgtccgctgtctcgtgggcggatgggcaagtgatgccatgcggtattcgagccggccgggcttcccttcattgcatttgcagttttagtggaattctttttggatttggataatagcagacatgaatgacaagtatttgatggaaatgacatgtttagttattgacagaagtgtgtgtggttaattgttcaggtgaacgtggagctcgtgggcgtggacacgcgaccggacatcgaaagggcagtctcgtttggggagaagccgaggacgagcatggcgccgccgccgctgccgacgacgcgagatggccggaagagcttggaggcagcgacgtaccatgatgtccttgacctgaagcagctgcttgatctggctgacaaggaaggccgggtggccgtgtatgggaacaagaggaactccgacaccagcagcgtgagtagcgtcagtagcagcagtagcggcagcataaccagcaccagcagcgctagcaccagcggtggcgcgagcccagagccggcctcgacgtcgaaacgccggttcctgccctggatgatgaggagcagggactttcgacagaggagcaccgacaccgagtcgctctcccagaactgcctaccaagtccacggatgannnnnnnnnnnnnnnnnnnnnnnnnnnnnnnnnnnnnnnnnnnnnnnnnnnnnnnnnnnnnnnnnnnnnnnnnnnnnnnnnnnnnnnnnnnnnnnnnnnnnnnnnnnnnnnnnnnnnnnnnnnnnnnnnnnnnnnnnnnnnnnnnnnnnnnnnnnnnnnnnnnnnnnnnnnnnnnnnnnnnnnnnnnnnnnnnnnnnnnnnnnnn

SEQ ID NO: 41708 - DNA, 997 bp, Zea mays
  Clone ID: MRT4577_138037C.1
aagcagtggtaacaacgcagagtacgcggggggaaaaaagggcatttacttattatagagatgggatgttggctcaatccgaaggaaattatgcggaagctttgcagaattattatgaagctatgcgactagaaattgatccctatgatcgaagttatatactatataacataggccttatacacacaagcaatggagagcatacaaaggctttggaatattatttccgggcgctagaacgaaaccccttcttaccgcaagcttttaataatatggccgtgatctgtcattaccgaggagaacaggccattctacagggcgattcggaaattgcggaagcttggtttgatcaagctgctgagtattggaaacaagctatagcgcttactccaggaaattatattgaagcacagaactggttaaagattacgaagcgctttgaatttgaataagaccactctccattttcataaaaagggtggtttggttgaaaatcaaatcaagaatttcattatatccctttcttctaccttcaattttatatcatatttcataaggataaacaatagggataggctctggaacagaagtaataaagtacataaaaatcggcaatctaaatattcctacctaatatatcaggacggtcttattaataattctaatgagttatcttggaattttgaatcgaatcaaaaaatctatattatgctcactcaaggaaagtagatgtagataggggcttataccctcagaaaaaaaatacaccagcttcttaaattaaaacgtaaaaaaagatttttttgttatgtcgggaaataattttccagaataaccaatgtccgttaggcacctaatccttatgtcataatagatccgaacacttgcctcggattgacttcaatatataattgctccagtgaataactaaaaaaaaaaaaaaaaaaaaaaaaaaagtactctgcgttgttaccactgcttatatctatctttaaaa

SEQ ID NO: 41709 - DNA, 3081 bp, Zea mays
  Clone ID: MRT4577_138038C.1
ttttctatagcccgcgcgctgggaattatgcctagatcccgtataaatggaaatttcattgataagacctccttgattgtagccaatattttattgcaaataattccgacaacctccggggaaaaaagggcatttacttattatagagatgggatgttggctcaatccgaaggaaattatgcggaagctttgcagaattattatgaagctatgcgactagaaattgatccctatgatcgaagttatatactatataacataggccttatacacacaagcaatggagagcatacaaaggctttggaatattatttccgggcgctagaacgaaaccccttcttaccgcaagcttttaataatatggccgtgatctgtcattaccgaggagaacaggccattctacagggcgattcggaaattgcggaagcttggtttgatcaagctgctgagtattggaaacaagctatagcgcttactccaggaaattatattgaagcacagaactggttaaagattacgaagcgctttgaatttgaataagaccactctccattttcataaaaagggtggtttggttgaaaatcaaatcaaaaaagaattctatatagaatgggttgggaattatgcctagatcccgtataaatggaaatttcattgataagaccttctcgattgtagccaatattttattgcaaataattccgacaacctccggggaaaaaagggcatttacttattatagagatggtgcgatttgactcttttttttttttagccctacctatatctcattcttacgagaaagagagagggttcgcatagagagaacaaaattagtaaaggaaacccgcgcttggggaaggtgaggtgaactaacaattccttctgtcgtgtatcctcgattgatgtggcctcagatgcttcaattgtagatttgagtattgagcgaaaggttacacctacaggataggttctgtattacagggcaatccgactctactagtaccaataggcagcataggggagaaaagcactacaccacgaaataggaatcaacaagagaaaaactttgttagaaattagccctttcctgattggtatcagggttgggaagaatggttgggataacaaacaaccatcaggtttgtactttggatacccttataaccatcaaaggtcgttgaagtggctaattcctctaaataggaggcgttgagaacaaagaaattcttggagctatcgttttcctctagcattaatataattcattggtgttaagaaaaacctcttgggggaaggttggctagagatttcttggaaaaataccagcccccttcggtccataatgagatgggactaattcgatttttattctatagatttttcgcttagtactatgtatagaagggagaagccgtatgagatgaaaacctcatgtacggttttggaacggagattttttgaatagaatgaacgaccgtaacggatgttggctcaatccgaaggaaattatgcggaagctttgcagaattattatgaagctatgcgactagaaattgatccctatgatcgaagttatatactatataacataggccttatacacacaagcaatggagagcatacaaaggctttggaatattatttccgggcgctagaacgaaaccccttcttaccgcaagcttttaataatatggccgtgatctgtcattacgtgcgactatctccactatagaaagaagaaaaaaaagaaaggaggaaattttctagtgaatactagaaaagagggctttctacatagggatcgtcaaaacaacgattttaccctatcagctgtaggaaggaaggacacttcacgagaatcaaaataggaagaaagtagagcctatactactattctatggataaagctgaaattgatagagaaaacaccgtaaagatcaattagtgagcgactgggtcgatacaactaaaaaaaactgcttcattataccacgatatgggacaaaatttaggaatccgcttatgtaataaagccgatccactaagggattaagcagcggtgtagtatcagatcccaaagatagtaagttcttttttctttcttatggaaaaaggtctttttccaggattctatagaaatttcatatatgaaagaaacgaaaccgagatagttacctttcagaaaattcgaacgaaggatataggtctatctatgcttcattcttctgaaggtgggagaaaagatcaaactgattattgatcaaaattagggtttgaaacttaggtaattaacttcttctgcttaacccaagaagaaattggattgatttttgagaaatcgaattcagttaagataggggaaattaagatagcaatttctgagccgtatgaggtaggaaactctcaagtacggttctagggaaaggaactgcctattccaaccgaggagaacaggccattctacagggcgattcggaaattgcggaagcttggtttgatcaagctgctgagtattggaaacaagctatagcgcttactccaggaaattatattgaagcacagaactggttaaagattacgaagcgctttgaatttgaataagaccactctccattttcataaaaagggtggtttggttgaaaatcaaatcaagaatttcattatatccctttcttctaccttcaattttatatcatatttcataaggataaacaatagggataggctctggaacagaagtaataaagtacataaaaatcggcaatctaaatattcctacctaatatatcaggacggtcttattaataattctaatgagttatcttggaattttgaatcgaatcaaaaagtctatattatgctcactcaaggaaagtagatgtagataggggcttataccctcagaaaaaaaatacaccagcttcttaaattaaaacgtaaaaaaagatttttttgttatgtcgggaaataattttccagaataaccaatgtccgttaggcacctaatccttatgtcataatagatccgaacacttgcctcggattgacttcaatatataattgctccagtgaataact

SEQ ID NO: 41710 - DNA, 272 bp, Zea mays
  unsure (1)..(272): unsure at all n locations
  Clone ID: MRT4577_138039C.1
acgcggacgcgtgggcgtcgacagcatgttcgttctctccgcgaagctcgccggcttcgcgctncgacctcaacgcaactgggggggggcgctagcacagatgacacgcccaagaggctgacctacgacgagatccagagcaaaacgaacatggaagtgaacgtcacaatcacgtgtaaccagtgcccgaccatatacaactgagtgcactcagtgcctgtcaaggacctcaagtaccatatgaacaacatgcacctgtaccccaactcctt

SEQ ID NO: 41711 - DNA, 199 bp, Zea mays
  unsure (1)..(199): unsure at all n locations
  Clone ID: MRT4577_13803C.1
ggttttaccccccctccanaccaacatatagataatctggcgttgccgctggtggtgggggccttcttgttccaaacgtcccagggggggtctggtgacctcntcctttgctccgtcnatgccaacangcttcctcgcatcctcaaatatagctagcgctcttggatcgatggatgatgatttttttttgcccacccca

SEQ ID NO: 41712 - DNA, 376 bp, Zea mays
  Clone ID: MRT4577_138040C.1
gagcttttatctggtgggcggccttcctttttttttttgggagagtttaacaacgattactgttgtttgcaggatacaacacatcagaatgattggtacccatgatatatggcatgagtaagctaaagcggaatatttctaacagggttatgacataaggacccgtcatatgcactgtagaagctccacctctttgaacagaaccctgacattggctgactagagactgataagaccgactccagtgacaagtagataaccacctacgacgctttgattaaagtccaagtgttccacaaaatacagaatagccctagatctcatatgccatttcaacccggagcagcatgctctgagggacacatgtgatcttctc

SEQ ID NO: 41713 - DNA, 149 bp, Zea mays
  Clone ID: MRT4577_138041C.1
acaccacacctactatgaggctaggatctagttttacctatatccatgtcagtagctggcaaagcttctatatcattactgcaacgccatctctatatatgaaatacatctccacacatactaagtgaacccttacataatcccacact

SEQ ID NO: 41714 - DNA, 831 bp, Zea mays
  Clone ID: MRT4577_138042C.1
attgggtacctcgaggccggccgggatcccactccatctctctcctgcgcccactcaaggaatgcccatgattgtgctctgccacctgcctgtctgctctgcctaaccccaggcccgccctccattcacgcttcctgccccgtttgtccaccatccacgcaaacactgccattgacccgtccccgactgcccgtgtctgccatgtgttgcctctgctactgagccctgccacaagaacggaacccgcctctccgctccctaattccctcatcccctcgctcctggcttcctcgcccactgcgaccaagagctagctccccccatcgccatggcgactgccttcaaaaacatgctccacccgctgcaccaccatcgcgacaagaaagaaccgccccattccggtcccctgcacgaccgtaccgactcggtcatggacaagccgcgcgaacaggagaagcagcagttgacgctgtgggaggctcacaagcacaccctcacccccgaggaaatcgacattgaccctcagaagaagcccgtcggccactcgtcaaaagtgctgcgagaggaagactttgagctcatcaagacgctcggaaccggcacctttgcgcgcgtctggctcgtgcgactcaaggatgcaaagcccggcgacgagaacaaggtttttgctttgaagattctacgcaaggtggacgtcattcgtctcaacaagtcgagcacgtccgaaacgagcgcaatgtcctcgcataggtcgccggccaccccttcataaccaccatggtcgccagcttccagtcactcgattcgctctacatggtactcgactactgc

SEQ ID NO: 41715 - DNA, 315 bp, Zea mays
  Clone ID: MRT4577_138043C.1
gaaaaggccaaagtaatgattgagatacactgtctccacttgctttgattttgttgtttcattttataaaaggtagaaaaaattttggaaatgtcattgtcagttatttggcctgcagcactgtcttggggtgaatggatgtagccttcatgtaaaaacactgtgtggagcagctttatctgcattcaaacctcaaggtagggatgagggactccccagacatttctctggtgcttttctgtccagggtaagccacgaggcattgtcatctcagggtagtgcaccgcacatgctcacacctaggcttacccaggg

SEQ ID NO: 41716 - DNA, 490 bp, Zea mays
  unsure (1)..(490): unsure at all n locations
  Clone ID: MRT4577_138044C.1
cgaggcatgcctgctgcggngggccgggactaactagtaactacgagctgccgtggccgttcctggtgccggcgggcccccaccacgcttctctttgccttctctccttccttccctcctccagattattatttataagccatttgcattgcgctccagcttgggagcaaaggcaaagcagccaacaacaatcagaggcaacgaagctcgcgaatcgagagcgccgggaacaacaacaagaagaagatgatgataatggagcaggaggaggaggcgtgctcgacttgttgctcctctccgctgcggcagtgcaggatttgccatgacgaggaggacgagcggcgctccgccatggagtcgccctgcgcctgctccggttccctcaaggggatgcgtgcagagatggtgcgacgagaagggcagcaccgtctgcgagatttgccttcagaacttcgagacgggctacaccgttcctcccaagaaaacccaa

SEQ ID NO: 41717 - DNA, 847 bp, Zea mays
  Clone ID: MRT4577_138045C.1
cccacgcgtccgcgtcccttcccttccggtccttttggcccgctgtagctaataagtactgtactccgtaaccagcagcagcatgcaggcggtgggcatccggcgtggtctgaccatcgacccggccggggaggaggaggcccccgcggcgcgcgtgtggcggctggtccgcgagagccccgtggtgatcttcgcccggcgcggctgctgcatggcgcacgtgatgaggcggctgctggcggcggtgggcgcgcacgccacagtgatcgaggtggacgccggcgccgcggaggagcaggagctggcacgagcggtcgagggcggcggcggcggcggcgtcccggcgctcttcgtgggcggcgaccccgtcggtggcctcgagggcctcatggggctccacctcagcggccgcctcgtgccccggctcagggagctcggcgccctctgcgcctagctcctccgtccgtctgtctgtcggtccgcgtgccgggcgcccggactcgccaagcatgcatcatcgcagattcgcagtcgcatgccatgtgctggctgtacctgtacatactactacgctacgctacaggggggggagggggggtcgtgacaaacggcagggcaggaggagcagccagcaagcaaagcttctgtttttctttttgtttttgtttttgctaatactgtactccagagattcaaatcgaaaggtgcgtggatgtagtttagctaaaaaaaaaaaaaaaaaaaaaaaaaaaaaaaaaaaaaaaaaaaaaaaaaaaaaaaaaaaaaaaaaaaaaaaaaaaaaaaaaaaaaccggccccgggggtccaacccgggaaattccggaacc

SEQ ID NO: 41718 - DNA, 138 bp, Zea mays
  Clone ID: MRT4577_138046C.1
atcgtggagtggaaacactactcgtcaccttccgcagtagtcgccgaacaattcccccacccaattcccactctccgctcgacagatccatacatgatgggagaagccaaggagaacgacgtttatgaggaggagctc

SEQ ID NO: 41719 - DNA, 204 bp, Zea mays
  Clone ID: MRT4577_138047C.1
accaatcaatataaaaaaaaaaaaaaaaaaaaaaaaaaaaaacaaaaaaaaaaagagagcgagtataaaaggatatgaggttaaaaccaattcaatcccctggtggggtatgctcaatcgttggaaccggtatttttttatggggtgctgcgttcacgaggacattcttggaggttgccgtaggcgctattcagccggtgctcg

SEQ ID NO: 41720 - DNA, 248 bp, Zea mays
  Clone ID: MRT4577_138048C.1
gccggtcactagagtcggcctttgttctctacagtattttgatgaatcaattattcgttccctgtctgcaggcgcctgtgcctttccttcatagtaagggagagacgaaaacgggtacgtactccgcggccttatgcgctgacgaaccgaaattaggtgcacgcccagttgctcgccttctccttctccccgccagcctataggcgaggggtccccaatcccccaggtctgaccgctcgacgttgccc

SEQ ID NO: 41721 - DNA, 620 bp, Zea mays
  unsure (1)..(620): unsure at all n locations
  Clone ID: MRT4577_138049C.1
gnaaacacctgagcagttgggtggagaagataaagaagctctcgcgcatcacacacctagcgctcgacggaatgattgagttttaatcgtcgtcgtttcctttatttggtttagtatggtgagttctttcgccatccttgatagtagcgtgtaaggtggatgtatatgcatagtgtgattaaattgattctttgattttatatgaattgtgcgatcgagttaataataccaaggtagttctaatattgttttaactcttgctaataaggtgtttgttggggacttgttctcaaatgcttcgaattaagaacagggcaacataaaatgttaaatgttaatgcacttcgttcattgaagcattatctccccaagggtataatgaacttcggacgaaggtcatgtgcaaaaatcacgaaggtcataccttcgtgaatagagttgtgaaatagtgaaagatgaaatataaaatataaaacatgaaggaataatatatcaaaacacataaacttattcatatatttcattatacaaacttaaatattaaaacataacatttaatcacatttataccttcgtcttgacagaaggcaataacctaagtgtcacgtgcaagtgattac

SEQ ID NO: 41722 - DNA, 1019 bp, Zea mays
  Clone ID: MRT4577_13804C.1
atgtcgacctctcccccggcgagttcgactccttcgccgacatcctcaagctctacgagggcggcatcaagctgcccaacatccccgccctggaggaggtgcgcaagcgcttcccgctccagctcgtcaaggacctcatccccatgggcggcgacttcctcctcaagctccccaagccgcagatcatcaaagccgacgagaaggcatggatgaccgacgaggagttcgccagggagatgctcgccggcgtcaaccccatgatgatcaaacgcctcacggagttccctcccaaaagtacacttgacccgagcaagtacggcgaccacaccagcaccatcacggaggcgcacatcggcaagagcctggagggcctcaccgtggagcaggcgctcgccgacaacaggctctacatcgtggaccagcacgacaacctgatgccgttcctggtcgacatcaacaacctcgacggcagcttcgtgtacgcgaccaggaccctgctcttccggcgaggggacggcacgctggcgccggtcgccatcgagctgagctcgccgctgatccagggcgacctgaccacggcgaagagcaccgtgtacacgccgcatcacgccggcgtggagggctggatatggcagctcgccaaggcgtacgcctccgtgaacgactacggctggcaccagccgatcagccactggctcaacacgcacgccgtgatggagcccttcgtcatcgccaccaaccggcagctcagcgtgacccacccggtgtacaagctcctgcacccgcactaccgcgacaccatgaacatcaacgcgcgggcgcgggggctgctcatcaacgccggcggcgtcatcgagatgaccgtgttcccgcgcaagcacgccatgcccatgtcctccatggtctacaagaactggaacttcaccgagcaagctctgcccgacgatctgatcaaagggggcatgggcggtggaggacccatcgagcccgcacaggtgcggctgctgatcgaggactac

SEQ ID NO: 41723 - DNA, 383 bp, Zea mays
  unsure (1)..(383): unsure at all n locations
  Clone ID: MRT4577_138050C.1
tcacaaacgcnnncggcgcaatacttcttcnngcccgagnncccgacagtatgctgtgcaatgtccccattnnnccgcccacnncgatnncgacctgtgcacgccagntnnctcggtcttctttccgaagggcgnntcgcgnnggcggttgggtttgagagnngagaggaggnnaagatgaggnngagtgcatcnntccgtccacatnnncgggcaggtctcgtgcatccaatgtnncggcaacgctgtgcgtgggggagcgtttactgcctcgagcacggcattccatgcctgatggccaagtgcgctggagataagaccgcgggacatcacgatgatgccttcagcaccttcttcagccagactggtgctgngaagcacgt

SEQ ID NO: 41724 - DNA, 186 bp, Zea mays
  Clone ID: MRT4577_138051C.1
atgaggatggagaatccatgtctcatggaaaggcaagacattaacaatcttacaaaactaccactaaacgggggtatttggctcacaggaatacaaggaaacaacatattttcttaccttaaataactggaattaaattataaaatagggatggggacctttaaactaacccttgccagggacaaa

SEQ ID NO: 41725 - DNA, 314 bp, Zea mays
  Clone ID: MRT4577_138052C.1
ttccagggaggttatggtggcggaggctatggggatggtgctgtaactggtggatctgaaggagaaagggagagagacactcgtcccccgtaccgtggcggaggcagacgtggtggttacaggaatgttgagtttggtgatgactctgagaggccaccacggagaaactatgagcgccacagcgggactggccatggctatgagatgaagcgttgtgttgtctgctgttgtcatatttaaattttgtccgacgttacatttctgtgccacggtttaaacggaacaaataatggtgttgcatgtggctatctttg

SEQ ID NO: 41726 - DNA, 249 bp, Zea mays
  unsure (1)..(249): unsure at all n locations
  Clone ID: MRT4577_138053C.1
cggctgcagctcagcagctcctgacctcatcagaggcacctaccacaccgcccgccgccgatcccgtctcctgaccgctgggtgtgtgacaccctcgtcggcnccaaggtcgctcgcgctcaccggtcttttgccccgtcggcgcggcggggggcgtcttcgtgccctgggttgtgtaccttgcggtccgggccctgacgggcgtcctggtgggccatgccgtgccgggctgctactccctgggggtgc

SEQ ID NO: 41727 - DNA, 1212 bp, Zea mays
  Clone ID: MRT4577_138054C.1
aggtcccttccatcttctagccgccgccgccgccgccgctgcccaaaaccctacctaccctcttcttccccctcactctcctttcatctccattctaatggcggcccaacccgtccggcgaagctgctagtgcttgtatctactatcttcatcaggtacttcgccatcctactgaagtattccccgccgccgctgccatggccaccctcaaccctttcgaactcctcggcgccgacgacaacgacgacccgacgcagctgattgcggcggcggcggctgctgctcagaaagccgaggcgaagaagtccgccgtggcgcctgctgggaaggctgcccagcctgcggcgaccaccaagttcccgaccaagcccgctcctccctcgcagacggttcgggatgcacgcggcggtggctcatcagctcgtggaggctttggccgtggtgaacgtggccgtggcagaggtggacggggatatggccagaaccgtggcttcagtggtgacaatggcaatgagttccagggaggttatggtggcggaggctatggggatggtgctgtaactgggtggatctgcaaggatgctactgcaaatgaggaggaagaaaaggaagaggacaaggagatgactctggaggaatttgagaaaataagagaggagaagaggaaagcactacttgcattgaaggctgaggagaggaaagttgaagttgacaaggatttgcagtctctgcagccactttcaaacaagaaagaaaatgatgaagttttcattaagctgggttctgacaaggataagaagaaggaaaatgcttgagcgtgatgagcgtgccaagaagtcggtgagcatcaacgagttcctgaaacctgctgaaggagaaaggtactacggcggccgtggccgtggaaggggccgtggggatcgtggtggttttagaggcggatacagagggggatacagtcgtggcccagctgctgctgctccatccattgaggatcaagctcagttcccaagccttggtgggaagtgaagggcgcccagctgctgctgtcaccgagcgttgtgttgtctgctgttgtcatatttaaattttgtccgacgttaaatttctgtgccacggtttaaacggaacaaataatgatgttgcatgtggctatctttagttatgtggtacttgacgttgaataccggagttgttgtttaaaaaaaaaaa

SEQ ID NO: 41728 - DNA, 314 bp, Zea mays
  Clone ID: MRT4577_138055C.1
taataatgagattgaggttgacattgatagtatggatgctgagacactttgggagcttgaccggtttgtggccaactacaataagaacctgagtaagcaaaacaggaaggccgagcgagcgatgcgtgccagacaagatgcatagttgcgtgcgcagcgccgtatacagcaaccgcaaacaaccccagtcgcccaagaacctgttggtgaaagatctctacagcaacttgccaaaggtgagcacctaccaacatctgcatcagataaaagctaccagaatagacagaaccgtgagtggttcacgcaagtcaagc

SEQ ID NO: 41729 - DNA, 719 bp, Zea mays
  Clone ID: MRT4577_138056C.1
aatgaggaggaagaaaaggaagaggacaaggagatgactctggaggaatttgagaaaataagagaggagaagaggaaagcactacttgcgttgaaggctgaggagaggaaagttgaagttgacaaggatctgcgttctctgcagccactttcaaacaagaaagaaaatgatgaagttttcattaagctggttagtttccttgtaattaatgctttgataccttaagtttgctgagctttgcatgggttcttcgatattcttttgctctcttagggttctgacaaggataagaagaaggaaaatgctgagcgtgatgagcgtgccaagaagtcggtgagcatcaacgagttcctgaaacctgctgaaggagaaaggtactacggcggccgtggccgtggaaggggccgtggggatcgtggtggttttagaggcggatacggagggggatacagtcgtggcccagctgctgctgctccatccattgaagatcaagctcagttcccaagccttggtgggaagtgaagggcgcccagctgctgctgtcaccgagcgttgtgttgtctgctgttgtcatatttaaattttgtccgacgttacatttctgtgccacggtttaaacggaacaaataatgatgttgcatgtggctaactttggttatgtggtacttgacgttgaaaaaaaaaaaaaaaaaaagcggccgctcgcgatctagaaccgt

SEQ ID NO: 41730 - DNA, 252 bp, Zea mays
  Clone ID: MRT4577_138057C.1
tcgatggcacaattccacaatttcccaattagtatacatggggggcacgatatgacacatatcctgaattgtgaatccattttttttgtcttatcaagagactatccttgtatccaaaagaaatgagaacggaattcctaagggaattccaattccacattcatcagaaattaggcgtctaaaatctccatatatgaatcccaattctgtgctttgttgattaccctatcctgaatcccaactgaatgagat

SEQ ID NO: 41731 - DNA, 907 bp, Zea mays
  Clone ID: MRT4577_138058C.1
ggatgctactgcaaatgaggaggaagaaaaggaagaggacaaggagatgactctggaggaatttgagaaaataagagaggagaagaggaaagcactacttgcattgaaggctgaggagaggaaagttgaagttgacaaggatttgcagtctctgcagccactttcaaacaagaaagaaaatgatgaagttttcattaagctggttagtttccctgtaattaatgctttgataccttaagtttgctgagctttgcacgggttcttcgatgttcttttgttctcttagggttctgacaaggataagaagaaggaaaatgctgagcgtgatgagcgtgccaagaagtcggtgagcatcaacgagttcctgaaacctgctgaaggagaaaggtactacggcggccgtggccgtggaaggggccgtggggatcgtggtggttttagaggcggatacggagggggatacagtcgtggcccagctgctgctgctccatccattgaagatcaagctcagttcccaagcctcggtgggaagtgaagggcgcccagctgctgctgtcaccgagcgttgtgttgtctgctgttgtcatatttaaattttgtccgacgttaaatttctgtgccacggtttaaacggaacaaataatgatgttgcatgtggctatctttagttatgtggtacttgacgttgaataccggagttgttgtttatcagaattaacctccaatttttgtaggccagcttttaccattttgttgtcttagcatgcttgcttgtttggctgtcctgtatggcactgctgcagctgcaatccatattagttgcagctggattaaagcaatctatattagttgcagctggattaaagctgcagcgaacttgtcaaaaaaaaaaagaaaaaagaggagt

SEQ ID NO: 41732 - DNA, 332 bp, Zea mays
  Clone ID: MRT4577_138059C.1
ttgttgcccgcggacggaaccaagcaaagcggggggggatataaaaaagggccggccggacccacacaacacaagggaaaaggagcggacaccactcaacaggcagagggagcaggcagaaccagacgcggccgagcaacgccaccgcacccgaacgaggaggcaccaaggaggacacacgaggcgcgacgcaaaaggcgcccggcacgcggagggtgcccggacagaaaggaaacatcacgagaacggcacaggacggccgggaccagcacacgcggacaaacaaaaaacgttaggggaaaccgaccgaagagcagccagccgaccaaaga

SEQ ID NO: 41733 - DNA, 265 bp, Zea mays
  Clone ID: MRT4577_13805C.1
cccacccggaggagcgcgctaagtcacatagatagagacgttcttagctgaacaaaggaggggtaagatgaggacgtgcgcctgggcgccaactacttttcggagcgccaggccatttggaccgctgggcaaggagactgtgaccactaagtctattttgagcccccgcggtcgcctctgttctagccgccacagcaaaaatgctggtctttttaccgctacccccgtccctaactcgtagacaccttcctcttactatacatta

SEQ ID NO: 41734 - DNA, 1881 bp, Zea mays
  Clone ID: MRT4577_138060C.1
ccacgcgtccggtcatgaccatatctacctacgcatgatcacgacttgcatgtctactactactactgaataaaaaacctctccgcgcacgtcgtccttgtgtttgtgtgtgtgagagagagaggagatggagagccggccatgtccttttggctgtttggtttatttttgagttcatgcggtctttatttatttccatgtacgctgcttcctcgtaaaaaaaaaacttccatctcctagccgccgccgccgccgccgccgccgctgcccaaaaccctacctaccctcttcttccccctcactctcctttcatctccattctaatggcggcccaacccgtccggcgaagctgctagtgcttgtatctactatcttcatcaggtacttcgccatcctactgaagtattccccgccgccgctgccatggccaccctcaaccctttcgaactcctcggcgccgacgacaacgacgacccgacgcagctgattgcggcggcggcggctgctgctcagaaagccgaggcgaagaagtccgccgtggcgcctgctgggaaggctgcccagcctgcggcgaccaccaagttcccgaccaagcccgctcctccctcgcagacggttcgggatgcacgcggcggtggctcatcagctcgtggaggctttggccgtggtgaacgtggccgtggcagaggtggacggggatatggccagaaccgtggcttcagtggtgacaatggcaatgagttccagggaggttatggtggcggaggctatggggatggtgctgtaactggtggatctgaaggagaaagggagagagacactcgtcccccgtaccgtggcggaggcagacgtggtggttacaggaatgttgagtttgctgatgactctgagaggccaccacggagaaactatgagcgccacagcgggactggccatggctatgagatgaagcgtgatggcgcagggcgtgggaactggggcactgccactgatgaacttattgcccaggatgcagaggactccccgaagatggaggaggctgctcctgttgctgagaaacaaggtgagcagaatgatgccccagcagcagatgagaacaaagataacaaggatgctactgcaaatgaggaggaagaaaaggaagaggacaaggagatgactctggaggaatttgagaaaataagagaggagaagaggaaagcactacttgcattgaaggctgaggagaggaaagttgaagttgacaaggatttgcagtctctgcagccactttcaaacaagaaagaaaatgatgaagttttcattaagctgggttctgacaaggataagaagaaggaaaatgctgagcgtgatgagcgtgccaagaagtcggtgagcatcaacgagttcctgaaacctgctgaaggagaaaggtactacggcggccgtggccgtggaaggggccgtggggatcgtggtggttttagaggcggatacggagggggatacagtcgtggcccagctgctgctgctccatccattgaagatcaagctcagttcccaagcctcggtgggaagtgaagggcgcccagctgctgctgtcaccgagcgttgtgttgtctgctgttgtcatatttaaattttgtccgacgttaaatttctgtgccacggtttaaacggaacaaataatgatgttgcatgtggctatctttagttatgtggtacttgacgttgaataccggagttgttgtttatcagaattaacctccaatttttgtaggccagcttttaccattttgttgtcttagcatgcttgcttgtttggctgtcctgtatggcactgctgcagctgcaatccatattagttgcagctggattaaagccggagtgaacttgtcaccc

SEQ ID NO: 41735 - DNA, 658 bp, Zea mays
  Clone ID: MRT4577_138061C.1
ggccgctttttttttttttttctttttttttttttttttttttttttttttttttttttttttttttttttttttttttttttttttttttttttttttttttttttggggaaaaaaaaaaaaaaacgggccacgaaagcccccaaaaaacgggggtttattaaaaacaaaaaaaaagggccccccctaaaaaaaaaaacccaaaaacagggggaccaaaatgtcaggggggggcccgggggggaaaaagggaccctaaggggggcttggggaaacacattttccaaccccaataaaaagggccaggctttgaaaaactggaattggcttggtttgggtggccccaaaaaaaaaggcccaatggggggggaaaaaaaccgggggtggtttaatgccaggaaaaagttttccattattggaaaaaccccccgccttttttaaggggttggagcccaaaaaaaaaccggtcccttggagcccccccccccgaaaacgggaagctaagggtaaaaaaccggcccttaaaaactttaaaccccccccccaaaggaaaaaacctatggggttggccccccttgggggtcccccaaaaagggggcccccgaggaaagggactttttgggggagctctgaacatttgggtttcccccaaggccct

SEQ ID NO: 41736 - DNA, 1828 bp, Zea mays
  Clone ID: MRT4577_138062C.1
cattgggtacctcgaggccggccgggatttaggtgacctatagaaggacggccgggacaccttccctcggtcccttccatctcctagccgccgccgccgccgccgcccaaaaccctacctaccctcttctccccctcactctcctttcatctccattctaatggcggcccaacccgtccggcgaagctgctagtgcttgtatctactatcttcatcaggtacttcgcgatcctactgaagtattccccgccgccgctgccatggccaccctcaaccctttcgaactcctcggcgccgacgacaacgacgacccgtcgctgttgattgcggcggcggcggctgctgctcagaaagccgaggcgaagaagtccgccgtggcgcctgctgggaaggctgcccagcctgcggcgaccaccaagttcccgaccaagcccgctcctccctcgcagacggttcgggatgcacgcggcggtggctcatcagctcgtggaggctttggccgtggtgaacgtggccgtggcagaggtggacggggatatggccagaaccgtggcttcagtggtgacaatggcaatgagttccagggaggttatggtggcggaggctatggggatggtgctgtaactggtggatctgaaggagaaagggagagagacactcgtcccccgtaccgtggcggaggcagacgtggtggttacaggaatgttgagtttggtgatgactctgagaggccaccacggagaaactatgagcgccacagcgggactggccatggctatgagatgaagcgtgatggcgcagggcgtgggaactggggcactgccactgatgagcttattgcccaggatgcagaggactctccgaagatggaggatgctgctcctgttgctgagaaacaaggtgagcagatcgatgccccagcagcagatgagaacaaagataacaaggatgctactgcaaatgaggaggaagaaaaggaagaggacaagctatgcaggagatgactctggaggaatttgagaaaataagagaggagaagaggaaagcactacttgcgttgaaggctgaggagaggaaagttgaagttgacaaggatctgcgttctctgcagccactttcaaacaagaaagaaaatgatgaagttttcattaagctgggttctgacaaggataagaagaaggaaaatgctgagcgtgatgagcgtgccaagaagtcggtgagcatcaacgagttcctgaaacctgctgaaggagaaaggtactacggcggccgtggccgtggaagggggggccgtggggatcgtggtggttttagaggcggatacggagggggatacagtcgtggcccagctgctgctgctccatccattgaagatcaagctcagttcccaagccttggtgggaagtgaagggcgcccagctgctgctgtcaccgagcgttgtgttgtctgctgttgtcatatttaaattttgtccgacgttacatttctgtgccacggtttaaacggaacaaataatggtgttgcatgtggctatctttggttatgtggtacttgacgttgaataccggagttgttgtttatcagaattagactccaatttttgtaggccagcttttaccattttgttgtcttagcatgctgccttgtaaccctctcgcagccctcgtccatgctgtgagtcacagtctaccagttcttgctctaagtgagacgaggttgccggtgctgggcttcacaatgccctccacggcagctacagccgagaacgcccagctcagcttgtttggctgcaattaatattagccgcagctagattaaagccgcagc

SEQ ID NO: 41737 - DNA, 198 bp, Zea mays
  unsure (1)..(198): unsure at all n locations
  Clone ID: MRT4577_138063C.1
gaaataactgtcatcctgacatggcatgtaagtaactggggggggcgtgttcaaacttcaaaggtcagggaaatgcttattttccgctcaaggtgcaagcagctgtgtatagcaaacaatacatggacatctctgtcccttataaagatcacttgtntctaaaaaaaaaaaaaaaaaaaaaaaaaaaggagggggaaa

SEQ ID NO: 41738 - DNA, 486 bp, Zea mays
  Clone ID: MRT4577_138064C.1
ggtacgggggagcggggcggggtacttatatctacccataaggaatcagcttgggagaattttcagatacaggattattcaagaacactggaccgcagatcatgaactatggataggagtgtggacaacaaacaataactaaacaacaatgtcattcatacattagggcgggatctcatacctgactacctaactccgatatttacgtgctcactggaacaagtataaatggatttagagtttgctacagatcttgcagacggtcgtaatgatggaccgctgttacgcctttgccttagagtacaggaataagccagggatggaaaagacagcataccagtgcagtgacagcagggacaggagagaggaagataatgattgatgaaacaagcactgatatacactacattgaatggccaccgctgaatgacattggtataaactgaggggacagacatgtaggacaccggcatatataaggggaag

SEQ ID NO: 41739 - DNA, 420 bp, Zea mays
  Clone ID: MRT4577_138065C.1
gggagagggcgagctcctctccgggaggagaaaaaaacaatacggggggcaaacttggttaaaatttcaaaaaagaaaccctgaaacgggggaagacacaaaagcaacaggttggttataggacaaataggaaggtagcccgcccaaacaatggggggggcacaaacaactgagtgatcaccaaggaccgggggttcccccccttacccgtaggaattaaaggggggcttcttttttgcctggacttggaagaacccctcggtgaaaaccccggggggaacccctggagcatttcggggtaaagggggcatgccaacctttacccaaacagcctttaactgagccccaatgaaaacatcgggtgaaccccccaacttttcaaaggtgacaactggattcacaatcattttcctccagggg

SEQ ID NO: 41740 - DNA, 306 bp, Zea mays
  unsure (1)..(306): unsure at all n locations
  Clone ID: MRT4577_138066C.1
gccagatctggagtggtacaccgcgccgagcagtgagcaatccccgaacccgacacggctcggcctgccggctgccccgagcccccgaagtccggttcggctcggccgttcccctcccattcttctcgtacgcgatcgattgcgagttgcgcccctcgccctcgccccccactcgcccagtccctcgcaggcgcaccaccgaaactgctccgcctccacgcccgctcgcactgaccacggcgatggccgccgncgncctccgctcctccgcgcgccggctcctgcgctcgccccggcagcctcgtc

SEQ ID NO: 41741 - DNA, 205 bp, Zea mays
  Clone ID: MRT4577_138067C.1
aggaccaccaaaggagcagccccttgatttgatttttgcaattctactgtaccagcaagggctaaatacaggcatggggacctaaacgccgagcctaagtagaagatactcctcgatttcttacataaacacatgttttttagggacggtggcaccaacagaaacaatttatacctataatgatactgcaggacactgggaactg

SEQ ID NO: 41742 - DNA, 330 bp, Zea mays
  Clone ID: MRT4577_138068C.1
aaagggggcacgccccgccagagggaagcgaagggggcacagaaggggaaacgcgcggcggagaacgaacaaccgggcgacgctgacaaccctgccggtacccacaggacaccgggacacgcagacccacgtgaaagaacccggcgtgagggcgaagacgcccgcaccgaacgccctcccaaacacaggcgcaggcctgaaagaccaacgggacgcgcggggcacctgcacattaaccacggcgggggccgcgcctacaaacaccgagaccggaacactcgcgggggccgccgcgcggacaactatcacctaagggccaccatcctcgcg

SEQ ID NO: 41743 - DNA, 446 bp, Zea mays
  unsure (1)..(446): unsure at all n locations
  Clone ID: MRT4577_138069C.1
gcacgcgtacgttttctgggnacctctaaacggcccccctgggtgggttgtttttttttttttttttttttttgtgttgtgctgtggttggggcggggttgtggngttttttagtgcgggtgttggcgagggctttgagtgctggaaaattggttttttttttttccggcggggagaccctttgggggggggggggggcggggaccgggggtgccccctaccctgaccgtgggggggggggggcgacctatgtgggcgcctggagatcctggggggcgattcctgcccctccgtgggttcggccttcctgccgggggtgcggccagccctcgccgagaggctggttggctgggcccgggcgcgcagggtggtcttctgcggcgtggtccttctgcctggccgcggcggcggggcacgggccggcccgccgggtccgtgggctgggt

SEQ ID NO: 41744 - DNA, 637 bp, Zea mays
  Clone ID: MRT4577_13806C.1
acagaagagattgaggccactgtgctgtactgctgtgcgtcaatcatggaagcaatccaccttgcctacgtgctcgtcttcctcttgcccatcctcctcctgcgctccagcttcgacaagtacgccaagggcgcgctcttccgcgacgccaccgcggatctcatcggcgacgggctcttcgccgccgacggccgcctctggagcctccagcggaagctggcgtcgcacgccttctcgtcccgctcgctccgccggttcaccgacggcgtcctcgacgtgcacctgcgccgccgcttcctgccgctcctggacgccgcagccagggacggcggggccgtggacctgcaggacgcgctgcgccggttcgggttccgcaccatctgccacgtcgcgttcggcgtggagggcctggacgacgacgccaggaggcaggatgcgctcttcgcggcgttcgacgcggccgtcgagatctccttccggagcgcgctcacgccggacacgttcgtgcggcggctcaccaagctgctcgacgttggcaagtcgcgccggctccgagaggccgtccatgccatcgacgactacgccatgtcccgtcgtcgaatccaagggtggcgcgtcggaggaacagcctcgacga

SEQ ID NO: 41745 - DNA, 174 bp, Zea mays
  Clone ID: MRT4577_138070C.1
cgggtccctcttgatcacaacttatcctttttacaaggccctgcatttgctccttcacgcatactggaggccttttggtgtggaagcacaaactttagcacatatgaaggctaagaatcgtatgattctcgggtgcttactgatgtagaagattgccccattcacgagattcgt

SEQ ID NO: 41746 - DNA, 323 bp, Zea mays
  Clone ID: MRT4577_138071C.1
ggcccaaatccattcacctcctgtttatatatcatggaaacaagggagggaaccctgtccttggggaaaaaactaggggaaggccaaacccccattatttttggccccccaaaacaaaaattcccaatttttcctatttaacgcaaggttgttcatcacgggctggggcccccccccaattacagattccctggctgccgggggaaacaggaaaatccccgcataaaaggatggattggccacccttgataaaagacaaaaagaagctttgggattcacaggcagacctggaactgttccatttgcacggtggacccctttag

SEQ ID NO: 41747 - DNA, 557 bp, Zea mays
  Clone ID: MRT4577_138072C.1
ccgggtccccccctcgagttttttttttttttttttttttttttttttttttttttttttttttttttttttttttttttttaaaaagctaatctcaggccccattttagcgaggggatctgccacagagggtagcgggaagggaaacaaaagggcaaaacatgcccaaactcagaatgaacctggcgacccaaaggccccccccatccactttttttttggggatacacaagcagcacccttccatgaaaagcgggggggaaaaacccctacggggtcttgaacatgggggggatcaggtcaacaacccggttgttgaacccccactcgttgtcgacccacaaaacaagcttgacaaaggggtcgttaaaagcaaccccggccttggggtaaaaaatgctcaacctgctgtcaccaaggaagtgggaaaaaaccaaatccttttccacaaaacccatgatacccttggggggcccctgggaagcagccttaaaagcttttttgatatcccaaaaggaggcccccttttcgattttgacggggagggcaacacccga

SEQ ID NO: 41748 - DNA, 433 bp, Zea mays
  Clone ID: MRT4577_138073C.1
gaagaaagattgtggcccttattttttcctgtacttcatattatgggtgacggacacctacagagcgctttggacgtaaccaaagatgacccataccggtactgtgcccaaactgccccacgggacaatatgatatactgatagagaggaaccggccaaagctgatacgacaagttgctgtcggggaacgcatggggcacctttccacaggcagcgggcccctcctggagttgcttcaccgtggagatgtatttattcatcgccttatccttccgtttgcgttaaacagccttccaagcatactacttggccctgtacttttggccggatattgccggacgaccagcttttacaattgcaacccgggtttgatcttggagcccgaagaggattagctggttcctattggaaatggtttcacgcaaagaatttg

SEQ ID NO: 41749 - DNA, 286 bp, Zea mays
  Clone ID: MRT4577_138074C.1
ctcaccctttacattggttgcagtgatgatttgttaacgtcttctttcatgtaagtagcaaacagggctttactatcttttcatctcattaattcaattataaccattagcttaaaatttttgtcttacgaagtgtggtgtcttttatatttgaattagtaactgtatgtagtcatagataatagtacatgtcaccttaggtagtaggaagaattaccatttctttaaatcatttatctggatgtttatgtgttagtagcatgttcaagaagacggactatctaga

SEQ ID NO: 41750 - DNA, 857 bp, Zea mays
  unsure (1)..(857): unsure at all n locations
  Clone ID: MRT4577_138075C.1
cattgggtacctcgaggccggccggggcagcagtgccatgaacgccgtcgaaccctccgccgccgccatcgccgaagaccccattactccggccgcctccgcagccccgtaccctggccgcctccgcgaagcacttaccgccctttccgaggcttgcgagtccggcaacttcagtgcttccgaaaccgcctccttcaccatctccgacattcttgacaccgcagccggcgtaagtggcgagctcgatgacgggagcgacgacagccaagacgcgtcgaggtcaggggcctccgaagtgctgcttcgcgaggtgctcgagttcctctctcgcccgtcatcgatctcgaaccagatggcccttgacgcgctctcgcttgtgcttcccaaacccgtggcgaagctaggggctcgaatggggagatgccgggatgttgccgcagctatcctaaagttcttcgtgacgaattgcaatccgagggacatgctctccatcctctgtgaggcattagatgcaccaatggagctaccaaatggcttatccagttttgttcttctactcgatgcacttgctaaagaatgtgttgaggaacatggaagtgctgctgttgatcttttcaatgcagcacatggtgttggcaaggccattcaagaaatgtgcatatcaatgttcaacaaaaacaaagatctctgtgcaattcttggtttatactcccttcagaatatagctcttgtatcacgaagcagacagcaggatattcccctctgcttgtggntcagttgtttttcagagtttcagatttcttanaactagtggattcacctatcgtgggctactaactggcagtgatgtcacagct

SEQ ID NO: 41751 - DNA, 315 bp, Zea mays
  Clone ID: MRT4577_138076C.1
agtgcgatgaggacgaccactcctgtagatgcagaagcagatgaatgtgctacttcttcaattgctgatcacattgatcgatgaccatgaatatgtacatcatctatctagctatgggtgtgtgatgaacaataattagcgaggccgagctaattgtactacataactattgtgaagagtgtcagagagagtagagaaacacagttctttaactagatttctctttatttgaatgttatgggacaggattaaagctcatgacctgacagtttcttacttacagacctgatcctaaaggatgtgatgggaacatat

SEQ ID NO: 41752 - DNA, 593 bp, Zea mays
  Clone ID: MRT4577_138077C.1
tccactgtatcagaagtgttgaggaacatggagtgctgctgttgatcttttcaatgcagcacatggtgttggcaaggccattcaagaaatgtgcatatcaatggctcttgtatcacgaagcagacagcaggatattctctctgcttgtggttcagttgtttttcagagtttcagatttcttaaaactagtggattcacctatcgtggcctactaactggcagtgatgtcacagctgcaacggttgaactttccaaagaggaagatgctgattttatggagcatttttcctttgctatggatggtgcagcactttcagttgtgtggacacttatgcatgatgataaagatatgtcaaagtatgctggagaagagttggaattagcagtaaaggaagttcagggcaaccatatggaaaaatgggaagcaattaacatgcttaaatatgtcctatcctcaattcattacccatggataatcaaatcccacagtttaaacttaatgctgattctatccggtgaagatcatgttgaaggagatcaataatcatgtagatttcacatgctttgctcatcgcatttttgaaacactcaag

SEQ ID NO: 41753 - DNA, 2265 bp, Zea mays
  Clone ID: MRT4577_138078C.1
ggccgcttttttcttgttttttttcgtgaataatttatgagtgtattgttgtgagccgtcgcaacgcacggtctttaaaagtgctttttgggccggagtgttgacattgaaaatgtcacatgctaaactttcccccctacataatcggcaatagtgcgggctgcggcaccgcagcagcgccatgaacgccgtcgaaccctccgccgccgccatcgccgaagaccccattactccggccgcctccgcagccccgtaccctggccgcctccgcgaagcacttaccgccctttccgaggcttgcgagtccggcaacttcaatgcttccgaaaccgcctccttcaccatctccgacattcttgacaccgcagccggcgtaagtggcgagctcgatgacgggagcgacgacagccaagacgcgtcgaggtcaggggcctccgaagtgctgcttcgcgaggtgctcgagttcctctctcgcccgtcatcgatctcgaaccagatggcccttgacgcgctctcgcttgtgcttcccaaacccgtggcgaagctaggggctcgaatggggagatgccgggatgttgccgcagctatcctaaagttcttcgtgacgaattgcaatccgagggacatgctctccatcctctgtgaggcattagatgcaccaatggagctaccaaatggcttatccagttttgttcttctactcgatgcacttgctaaagtgtttactttaattcagaggcgacatatcgagcaagtaaaggtggcactgcccgttgtacttaaagttatgcatgctactgtatcagaatgtgttgaggaacatggaagtgctgctgttgatcttttcaatgcagcacatggtgttggcaaggccattcaagaaatgtgcatatcaatgttcaacaaaaacaaagatctctgtgcaattcttggtttatactcccttcagaatatagctcttgtatcacgaagcagacagcaggatattctctctgcttgtggttcagttgtttttcagagtttcagatttcttaaaactagtggattcacctatcgtggcctactaactggcagtgatgtcacagctgcaacggttgaactttccaaagaggaagatgctgattttatggagcatttttcctttgctatggatggtgcagcactttcagttgtgtggacacttatgcatgatgataaagatatgtcaaagtatgctggagaagagttggaattagcagtaaaggaagttcagggcaaccatatggaaaaatgggaagcaattaacatgcttaaatatgtcctatcctcaattcattacccatggataatcaaatcccacagtttaaacttaatgctgattctatccggtgaagatcatgttgaagagatcaataatcatgtagatttcacatgctttgctcatcgcatttttgaaacactcaaggccattgaaagcgttatgattgctgcccctatggcattggtgcggaaaaaagcatttgctgctttgaaaaaggttatttcaatggtgccatcatcccagagatttgacatcttacatggtcttgtaaacaatagtacatctccagctttgactgcaattctccttgatctagtgaggcaggaagtttcgagagagagtcgccaagctgacaatgattgtattgaagacgaaggatttcgaggtaatgggttaccgcgctgggcatctcatgcacttgagttagttgagctgattttgaggcctccagaaggtggtcctccttgccttcctgatcacagtgaacaggtaatatcagctctaaacttgctaagatttattctgataatagattcaagaggacaaagatctgcaaaattgtttcggaaagagacattgcacaaggtgcactcggagtggctgaccccattaagaccaatcgcggagcaaattcagttggaaaatgaaaaggatgctgatgagattacaaaacaaatagtgtgcatgttaaatcttgttcaactggtgctataccgctgcatcgagttggtggaggaaaagatgaaaggctgctaatgtttttggtacctgtcatttctatacagtagcatctgctgtatctggatggaatgttcttgaggatataaattccatcttctcaggttattgtatatttacatggccaggaagtctggttttatttaaagtgtgcataacgtattcacaggaatatatggtgttattatcataaaaaaaagggcgacagatagcgatctagaactagt

SEQ ID NO: 41754 - DNA, 295 bp, Zea mays
  Clone ID: MRT4577_138079C.1
acatgatagggttgggcaattagtgtagccaacagatattgttcttgtcagcaaaaagcctcaaaaaccgaccgcaagcttgacacgtcgtacagcatatccaaccaagaaaaagttacaacctaaccgtccaaaacagataataaaacagctcctcgttccataataaacagcaaaacgaggaggcgaaaaaggagactttaaaacaaaccaaatctggtggtagtggatgtcccgacacggggaatccacaccccttgggcgcacgcaaagaataagccaagactcaaacatg

SEQ ID NO: 41755 - DNA, 1085 bp, Zea mays
  Clone ID: MRT4577_13807C.1
gtccaacgggtatatgtatgatcgtgcaaaacattgtaggcatgtgtataatcgtacaaaacattgtttttatacgtggagattaaaactaaaagatgtggatgctgcagaaaattaagaagcgcaccaaacagacctttgttgtctgtgatgattccacgcccaggctgttcaaagtcaagcatacaacagcgtgcggccccagcagctgtcattattttgttctagatgaatgcgatttccctagccggtgcttttggctttttgaacctcatcaagaagcatccatcggtttgacagcaccgtctacgtgcccatcttccggagacggaagaatattgtagagcagtgcgacagagttccccgatcgaagcagattgaggtccactgtgctgtactgctgtgcgtcaatcatggaagcaatccaccttgcctacgtgctcgtcttcctcttgcccatcctcctcctccgtctccggcgccgcgggcctcctccagtcaagcggccacgaacaacgacggcccactgcccgcaccccagcccggtcctgggcaacaccctccacttcatccgcaaccgccgccgcttcttcgactggtacgcggacatgctccgcgccgcgccgtccggtgccatcgaggcgtgggggcccttgggcgcgggccacgccgtcaccaccgccagcccggccgacgtcgaccacctcctgcgctccagcttcgacaagtacgccaagggcgcgctcttccgcgacgccaccgcggatctcatcggcgacgggctcttcgccgccgacggccgcctctggagcctccagcggaagctggcgtcgcacgccttctcgtcccgctcgctccgccggttcaccgacggcgtcctcgacgtgcacctgcgccgccgcttcctgccgctcctggacgccgcagccagggacggcggggccgtggacctgcaggacgcgctgcgccggttcgggttccgcaccatctgccacgtcgcgttcggcgtggagggcctggacgacgacgccaggaggcaggatgcgctcttcgcgggggttcgacgcggccctcgagatctcctt

SEQ ID NO: 41756 - DNA, 368 bp, Zea mays
  Clone ID: MRT4577_138080C.1
atttcaaaaagccctgggctcacgatcatgaaccaatcaagaaacttgtcgatgctcgtaatggaatcaaaccaacagtgctgattggaacatcaggagtaggaaggacatttactaaagaagtggttgaggcaatggctgcgttgaatgaaaaacctattatattctccctttctaatccaacttcacaatctgaatgtactgctgaagacgcatatacatggagtcagggccgagccatttttgccagtggaagcccatttgatcctgtagaatacaagggaagggttttcgttcctgggcaggcaaataatgcatacatcattccctggcctttgtgttggggttaatttatgtttggttgcatt

SEQ ID NO: 41757 - DNA, 324 bp, Zea mays
  Clone ID: MRT4577_138081C.1
cttcccctctttcttctcttctttcttttccccctttttcccccctttcttttcttccttcttttcttctttggcggggggggggggcacaatgtcaatctttccaatcttctttaacttctgggggaggggtactgcatccatctcgcctatgaggggcatcttggtctccttcaaacccgctgctttgggggcaataccggaaatggccgcaacagcttcgagggccttctgcttgatcttggcatctggcatggggggaaccctgaccaccaccttttggtggtgagccatctcaaagctttggacaaaggaggggacgag

SEQ ID NO: 41758 - DNA, 417 bp, Zea mays
  Clone ID: MRT4577_138082C.1
ggcgtgaggagccgccagtgcgcgcccacggaggctagctatgggctgcccgtgtggtcgccaagatcgggtcgcaccggtacatgggtcgcccgcacgctcctacgcaggctggacagagcgacctgcgtgggtgctggggcacccgcccttgtagccagggctagcacgcccgcaaggatgcggcggtggcctgtatatgcgcgtggctcgtccatggacacacaggacaatcatggcagactccacgtactacacgctgtgtcttggcgcctgtagatcgatcgcgctggctggatgcaacatgccgccgttgttatccatggcccatctgcgcacacggtgcagagtattgtctcacggctcgaacgcactacctgatatcaaaagactgcgaccacacatcggagtaccttc

SEQ ID NO: 41759 - DNA, 400 bp, Zea mays
  Clone ID: MRT4577_138083C.1
aggattcatcgtcccatagctcaggctctcatcagatgatcgatcacgagttggagatggctccattctatcaatatggcatcactctaccattcatggggttgcgagcgccaccacgtgcatcatggatcctttttccagcgcatcagctttgatcagggattcacatgtagggttttatgatacggtcagatctaccgtcaccgcgagactatatacgctagtgcatatgggattgggattgtactacatggaacaagttctgtggaatcgcttgtcgttacgtctagatcatacgaggcagtgccggctgcggctcatgctcagatgtgagattcttggcatgactacaatgctcgggatttcaatctctgtgtatatcactgacattagctacgag

SEQ ID NO: 41760 - DNA, 285 bp, Zea mays
  Clone ID: MRT4577_138084C.1
ggaggaggccaggaaggaggagaccgaagccagggaggaggaggaggaagaggaggaggagatggtccctgcccctcagcatgtcactgagctagagctgggcatgtacgccctgctgggagtcttctgcatggccatcttcatcttcttggtcaatggtgtggtcttcgtcctgcgctatcagcgcaaagaacctcccgacagtgccactgaccccagctccccccagcgccacaactgggtctggctgggcactgaccaggaggaactgagccgccagctgga

SEQ ID NO: 41761 - DNA, 185 bp, Zea mays
  Clone ID: MRT4577_138085C.1
catgatttctttgatcatgccaccttaggatcagattgctcgcgtcactaaaatgctgggtgatgagtacagaactgcctcacacatcaagagcacactcaactcacagtctgtgattgctgccataacctacgctcaacagaagttgaagctttaacgtcgagttccccccaatggttgggggc

SEQ ID NO: 41762 - DNA, 271 bp, Zea mays
  Clone ID: MRT4577_138086C.1
acccgcccgaaatcagttttgttaattcacatgccccggtttatcatctgcaagcgggcggtggacagatacacaaggaggaatgcaagtacattccacaacccgacggggatgtacgaccgcggggcgtacaacctccgaaagccaaagaacaagagcgagagacagaagccaaattgaagcgaaatcaggagtgcccggtaccgtgggagcagcgctcgaaccctgagcagaaactgaacctgatgccccacggccgaggatgcggccc

SEQ ID NO: 41763 - DNA, 528 bp, Zea mays
  unsure (1)..(528): unsure at all n locations
  Clone ID: MRT4577_138087C.1
ctccattcggatctgggacaagatatatgcctggcttgcggctgatttggagcctcgtggggtatgtgaaaattttatatctgtgacagagtggtggaatgaggttgtacactcaaaactcaaaagggtgtcctagaaaggcattttgttcgatcccaattctgtaacctgggaaatctcgaaggagcgaaatgcaagaatttcaatcggagacactctttggcaatctatcttgtgacaaagataaaggaggaggccacgacttggggcagtgcaggtgcaagacaccttaaggagatcctacagagcacttagctttttgctgtaaattcttgttagtctttccttcctctcgtatttatgcatgtttaacaatgtatacagttgttggcttaagcctcttcccctataaagntcttatgttcatctttgtcttaatcactaagaataaataattcgtttttgaagttttccattctaatcaatgttatcaatttgatgttctcatgctgctttcaagatgtcaac

SEQ ID NO: 41764 - DNA, 458 bp, Zea mays
  Clone ID: MRT4577_138088C.1
ggaaaaaaaaaaaaatttgcaaccggttaaggggaatccaaagttacgggggaaaaattaacggttttagggggcccaacaaaaaattagaccccaaaatgggggaatttttaagttaaaaaaacgggagcaaaaagggttaaaccatttttaaaaaaaatggtggggataaaaagcccaaaaaaaaaaaagctttttgccccggggggggggtgtgtaaggccgaattttgaaaggggtttccccagggtttaaggaaaaaaaaccggggattggacctccccggagcccgggtggaaaaaaacctgggccaggtccagtttttgggaaaaaagggggggggaaaccatggttttgggggggaccttaagggggggggggaggggctctttggggggaaaaccggccttgaagcccctcttgaaaaaggactgggcggcctggtttttggccccaaa

SEQ ID NO: 41765 - DNA, 376 bp, Zea mays
  unsure (1)..(376): unsure at all n locations
  Clone ID: MRT4577_138089C.1
tttgggctgatttatgtgcttgctaggaagccggcgtatattccttcggaccctagccctagaggtcatcgggagataatggaggagaattcggataggtctagggagtctcacctggaggccgaagataagaccgacgggaccgataggcaaaccgacccgttagactggctggttgactggccttagtacctaatttacaatgagtccggaatctccgcgttctaccgggatctccgcataacgctcgggcgcgcgacccacacacacacacaaagtcgcaatacgcaacatcggaggacataactcccaataaagaaggcggtggtcgccttacctaaaagatagnaccaagcttttggattacctagtacga

SEQ ID NO: 41766 - DNA, 538 bp, Zea mays
  Clone ID: MRT4577_13808C.1
aagagcatcaattgcatgagccgtataaaattatccaatacttaacaacacacttcaacattagaacacattaagtaacaggattgagaatcacataagatcacaaattatagagtgccactactcgttggacaagagatgcatatcatttaaagccacattgtaaaactaagcatgacaagtgaaagttaacaggaaaaagcacgaactcaccaactcaaccactgctgactagaccatgcacaaacacacgctcgaaccataataaaccgatggctgtgaactgcacattgctcaaaaatatagaaaagccttcatctgccgaaggatgatccttcttgccatagaccagacatataatatataactcataacagacagtgcagcatcacataacactcagaatgactcactggtacaccacactgttgtatgtagcaatgtacaaacaacaactgccgtgagttgtggatgtgctgtgatctcaacataagcaccaatacacttgcatgtaccagtagaagcttaaagatatcat

SEQ ID NO: 41767 - DNA, 3072 bp, Zea mays
  Clone ID: MRT4577_138090C.1
cattgggtacctcgaggccggccgggatctctgttcgccccctctcgccttttcgctctgcattgcgcagtgcaggtggggaaaaaagctaaggtagcgtagcgtgcgttttgcttgtgcatggcatgtgctccgatcctcctccgacctcccggcccattctttctcccttcttcttgagggggcaccctccgtcctttcctcttcttcttccttcagaaatcgcaagaaaatggggaagagaagccagaagcgccttattcgacgccaccaggacggcagcataggctgcatggcaggcctcatccgcatgttctattcccgccatgacgccaataagctcctgttggacaggaagcaaccagggagtagaaggcacagtttcagtgccttttctggacgaaggggccactcaagaaagaattccaaggacttggacgaaatagatgaatacggcgattataacatggaggaatccagtttcagcaaaccaactgtcaaaagacttttggaggacgagctacgaaagctaaaacagctgaagcttccaaatgatgaggttgagagaatattagctgacctgggacatggtgcctgcctggacaaaagttcaacccagaacagcaaagcgaagaagggagaccaaaatcacatcagaggtatcaccaccacggctgctccatctggatctttggatcccactgcttccaactgcatgaaagaagcagaagaaaatgagcttgaatttgccttggcagatttcttaggacggattcatagaaattgcaacaataatggggagttatgtacggagatgaaagccctaatccaaacaaagattgcagagctagataatcctccgtgcacatttgcttatgagcagcaaacttcacggggtgacgaaaatgatactgctggtggcaaacatcgatgtagcagtagtaaaactcagcccaaaaaattcagagatgcgctggagatgctaagctcagacaccgaacttttctttcagaagtcaaattcacgtattttggagagcgcccaaagaaaccaaaacagactgatagggagcaatctagagcccacaaaaatagcagataataccgactccaacaaagatccaaagagtctgaaccagcatgagttggccaccaggagatatggtaaagagagcaggaatatctttttctggaagaaggaaagatcctcaccaaggcagactgcacaaggaaccagtagttctcagccagttaacaaaatagttatactgaagccaaatccaaggagagagatcggccatgctgtggctgttagttcaacccaagctccaaaactaggtgcaaccgagagctcaaaattttcaattaaggaggtcagaaggagattcagaatcgtgactagtgaagctacaaaaggaataccctcagtgtcagaagataacctccaaaaaggtcagcattggctcaacagttcagctttcacaataataaaagataccagacagctcgctgaacagacctcagaagggaaattctcatcttcagttatgaaggattttagatcatcaaacagcggtaggcaaaagaaaagaaaaaatgatgggccaaccgaaaaaaacggtagcataattacgtcatccaaggatgaatctgtcttctatgacgaggccaggaaacatctaacagagattctcaaggacaaaagacaaacaaccaagcagcacccgacacttgagatctcaaggtccttggtgaggatgctttccctccctcagtccagcacatcatcacctaggagtagccctagggcaaaagactgcatttacctctcacctgaagaggcaagcattcgtgccatatacaagtcaaataaagattttttagaagaagaaagccagtcgggagaatttccagagaatgttgtgtgtgatcctagtgaagcgctgcatgagcaggctgttcaggaaaggtggtgcgtcaaagaagaaagtcaagaaacaacacaagaaggtgcagaacttgacactctgcgcactaaagaaattgacaagctggattgcatgggaaaaaatagcaatgcatggggcaccccagcaaagcaatgcacatataaaccatcacaagatatggtgggagaagcagagccaggacaaaggcatgtcaggacgtttccaagctcccctgagaacgactttgaaaaactggaatgccaagagcccacgactccccgaccgagtgcacagatcgaacagatatcacaattttctcctgatggaaaccacgaaaagcaagaacagccgagccctcaatctgttcttgatgtgttcttcctcgacggtgagttgcacaaagatatcttgaggacacgctacaacaccacaggggatggttcagaccaagggattttctgggaggacaagcatccgaggttatgttacataaaggaattgctagagctgtcagaattgtgtgcaaaccagaacttagaggtatggtatctagaagatgaattaatcagcccttgcttgttcgaagaagtacatggaggcaatcaaattgatggtacgaagcttttatttgactgcatttgtgaagctgtgacagaaatccaggacatatactttagaaaccctgcatgcctatcttctctcacacacagcataagggcacctcctccagcgggacaaaaccttatctcagaaatcaataagcgtgttgaacgccatcttcactatcgatttccaagcacattagaccagctggttaacatggatcttgaaggtggcagttggatggatcttggatcagaaagcggagaggtcgctgtagtaatatgggactgcacactagatgagcttttggaagaattagtttacgacctgtggatttcaggcttcaatctcgcagccggtaaccatctgtagatttggtagagtcataccgttaaatagaagtaacatgtttgtgtggcaaaatcctgtgatttggacatggagggctgcatgagtcgttcttaaaggcatgagcatggtacgggatgttcacccaaaaaaaaaaaaaaaagaccctcaac

SEQ ID NO: 41768 - DNA, 849 bp, Zea mays
  unsure (1)..(849): unsure at all n locations
  Clone ID: MRT4577_138091C.1
gggcgattgggatcctcgaggccggccggggctcccgccgcctcccagatcactcctccctgtctccatcgccagcacctgcctgtggagtgaaatccaacgtcgcagaaagcgtcgcccgatgttgtctctccactcaaaaccctaggccccagccccacggatcatgttcgtagccgcctctctccacaactgctgccacgatgtcaccgcctccggagtcccactcagtatagtgaggcaccgccgctgcacaagtcgacaacgacgccatgaccatataccctggagcaaagagatctgcaatacagtgcagttcattgggactgtaggcaccggtgtcgacaggtggcaactgtcagcttcccagtcgctccgctattgtgaggagttgctttgtcgtatggaagtcaaccgtcgatactatatgaatcaccttctactactactaggagaaataatcaacaaaggcatccacaaatttcatactgccaagacgcttagatccatcgcagactcctttcacctagcttcatcttctaccagaacagcttgatgcgatgcctaatcagaaagggaaatgtctagcagatacaattggatcactacccaaaagggtgaagcaaggacccttgcacaacggaaaagaaacggacaacaaatcttccaacaaatttgttgagctagggaatgtttattttgcatcctccgtataattatgtttgaatgttcagttatttagaaccaatcgatgtaaatatagcaacctaactccggatattacaataaacatgttaattgttgccacaactcacttaactctattttaantaagtgtatctgttccgc

SEQ ID NO: 41769 - DNA, 595 bp, Zea mays
  unsure (1)..(595): unsure at all n locations
  Clone ID: MRT4577_138092C.1
gtacttagcagaagaatgcacatgagcaaagtttgttcatttactgaattgtgtatgttgcacaggaaatactacgacgtacgtgtacaccgatccatattagcctatgtttcataattttgttggaagcaggagtatcggagcaagctagactgctagagtacattacacagtttgctgtatgctcgatcagaacctacaagtacgtacgctagttgttacacgacgtgctccggcgtggccgcggccgtggcaaggacggcgacggcgttgcgcttgccacgctcggaccggctgttctcggcgaactttaggcttgcgctgtgacggcctacgctcttctcgtcctcgctccactcggaggcatagtaccgcttcctcgtcggcgtcggcgctgggcggcaggagcatggaacccccactgcgggaagtgcacgaggacgagcggcagcgtgcacgccatggccatgatgcccatgttctcgatgcccttcctcgtggantagctggacgtggtgaagaagagcagctgcgtgagccggcgcccccttgccgncggcgcccgtgagcccggaatgaccccagcgagcgcggg

SEQ ID NO: 41770 - DNA, 431 bp, Zea mays
  Clone ID: MRT4577_138093C.1
catcgataacttataacagcatatatggcgacaggctctaaaagcacaagctacgtggaacagtgcttgttcagggagggttcttgggagggtatcaacgcaatggagtcttagactgctgatctacacggatcaaatacattctgaatgcccatactcctgtcactaagcacagattgtgttgtttgtcatgacagtgtcactatgaccaagcgctgtactaattctctattgtggctgatatcatgcctaatataacggcataactaaggctatacatctctgcatgttaggaccttggatcctcaacatcgctggtagttggatggcccagcggatgcgggagcaacttggaccacagattctctacgcgtcgttttagaagatccgagcggtagcccccatatttgcgacgcgccatgtgttgtata

SEQ ID NO: 41771 - DNA, 464 bp, Zea mays
  Clone ID: MRT4577_138094C.1
gggaagggggtattttttgggggcagaaaaggggggggggggaacgaaacgggaagggggggggaggggggcccgggggcaactttaaaaaagaagaaagggtgggggggccaagggtaattattagggacccagggactttgaaaaaaaaaaaaacggtattaaaaggggaaaaaatttgaaaaaaaaaaaatttttttacaaagaggggaaaaaaaaaggggaaaaccgattttttcaaaaacaacggaaccggggggaaaacagggaaattcggagcgggacctggggggggggcaattttcggtaaaggggggccggttaaaacagggggaaaaaatggccaaagggggggcctgggtaaaattggtcttcggtcaaaattccacacaacacccgggcgggaagtataaagggtaaaagggggggggcctaagggggggggtaccaaaaaggaaaggggg

SEQ ID NO: 41772 - DNA, 805 bp, Zea mays
  Clone ID: MRT4577_138095C.1
ccacgcgtccgcccacgcgtccgaaaaaggaaaggaaaggacaaaggagcggcggcgaggtctatggcgtcgacggcggggtacctggcgcggcgggcggcgcagaaggagcgggtgcgcctgctctaccgcagggcgctcaaggacacgctcaactgggccgtccaccgccacctcttctaccaggacgcgtcggatctccgggacaagttcgaggccaaccgacacgtggataacctggacgtggtcgataggctcatcgacgatgcggaggctcagtacaggaacttccagcaccccgatccctacattgttccatgggcaccaggcggcactaaattcacaagaaacccccctccacctcaagggatcgagatcatctacaattatggcaaggaggaccagtaaacaagagtcctgcaagcgggggcagaacttccacagttccaaatcacttcctgtttaatcgagttgttgtacgagaaataagaatggaaattactggactccatccatgcttctcatttgcttgttctgataatcatatgctcttcatctagtgcatattgaagtgatgtttcctgtcataaaatggaattgtactatctttgtcgtgcagtttaaactgaccgccggcatctcagtttttttttctttggtttttctgcgttttcacgtttttctagagaaagtatatagattcatgacataagatttatgtttttagatttaaaaaaaaaaaaaaaaaagcggctttcataatatatgattcataatatgcaaaaaaaaaaaaaaaaaagcggcc

SEQ ID NO: 41773 - DNA, 1277 bp, Zea mays
  Clone ID: MRT4577_138096C.1
ttgggaccctcgaggccggccccatcaagcctcgcaagtactggtgggggaaggaggaccgcgaccccgtggggaacaccgacgacttcatctggaacaaggacttcctcccccacatggaacgcgtcatcgccaacggcggcgccgatgcagaacccaccatcacccgccttgcgccggtggatgaggagggggagtccgggtttctgagcatcaaccgcgcaatgagccttgacagcgtggaggttgatctgagccaggagcttcaggcgccgaccaggccaatcttgcaaacccaggttgaggctgcctggagaggacgggcaattggtgctgaggctgtgaatggagccagcgctcctagatggaggctagtccctactcgcagggagcaggcaaagtgggacagagcggccaaggcagccactggtggaagtgatgttatactaagggagtcaaagtcaagagtgcagcaaggagaccctaaggtattggcagctcggtccagagaagactacttacagctgaaacaaagattacagtggttcactttaggcattggtggcgttggtgtaatctctgcttatatttcatacactcctgaaattgctgtcagctttggtgcagggttgattggatcattggtgtatctccgcatgcttggaaccagtatagattccctagcaggtggaactggagaaactgtcaagagtgctgctgcacaaccaaggttgcttattccagtggtacttgtgatgatgtataacagatggaatcagatattagttccggattatggtttcatgcagcttgagttaataccaatgcttgttgggttttttacctataagattgctacattcgctcaagcaatccaggattctatacctccagtcggaaatcgtgaaggttgaaaagtgtcatgttgtatataaacgaaggtggtagccatggtccctggtcagtggtcacccagatagtaaggtatgtatagaagaatctggtctggtgtcatcgccaagtagatgagatgctcgttgaggacgccatttgaaaatctcgagtgcttaactatgttctgcacaaatattttgacgaaaggtgatgttaccacattcattccatattacacgcagatcatcagtgtataaatttacggctccgaacttttaccacaacgattaattgacaaaacaattgtatgattgaattcacatttagcactggatgcaaattatgcagtcaacaaaaaaactcatttaaaaaaaaaaaaaaaa

SEQ ID NO: 41774 - DNA, 974 bp, Zea mays
  unsure (1)..(974): unsure at all n locations
  Clone ID: MRT4577_138097C.1
ttgggaccctcgaggccggccgggaccggcccgggcgattgcgcctcgaggccggccgggccgacctcccaacccgactactactgcagcgagaggaaagagaaaaaggaaaggaaaggacaaaggagcggcggcgaggtctatggcgtcgacggcggggtacctggcgcggcgggcggcgcagaaggagcgggtgcgcctgctctaccgcagggcgctcaaggacacgctcaactgggccgtccaccgccacctcttctaccaggacgcgtcggatctccgggacaagttcgaggccaaccgacacgtggataacctggacgtggtcgataggctcatcgacgatgcggaggctcagtacaggaacttccagcaccccgatccctacattgttccatgggcaccaggcggcactaaattcacaagaaacccccctccacctcaagggatcgagatcatctacaattatggcaaggaggaccagtaaacaagagtcctgcaagcgggggcagaacttccacagttccaaatcacttcctgtttaatcgagttgttgtacgagaaataagaatggaaattactggactccatccatgcttctcatttgcttgttctgataatcatatgctcttcatctagtgcatattgaagtgatgtttcctgtcataaaatggaactgtactatctttgtcgtgcagtttaaactgaccgccggcatctcagttttttaaaaaaaaaaaaaaaaaacaaaaaaaaaaaaaaaaaactagagaaaatatatagattcatgacataagatttatgtttttagattactatgaaaaatactttcataatatatgattcataatatatgnattccctgcaaatgcagatgacattttcattacagacggagcaagtcctgaggtccacatgatgatgccattacagaataaaaataggggccctcgagttccgtgttttgttccctt

SEQ ID NO: 41775 - DNA, 191 bp, Zea mays
  Clone ID: MRT4577_138098C.1
gccggccgggccggaatcctctgattattaagaccatctagctttatctactccacagtacagaacaacccgagcgacaccaagataggtggcgttcgtaggcttcttgctcttgctgctagcggtgatagcgagatcattttatacgaatgctgactgggtctgatagctaccgttgttggctcatatat

SEQ ID NO: 41776 - DNA, 728 bp, Zea mays
  Clone ID: MRT4577_138099C.1
ccacgcgtccgccgacccccaacctcccaacccgactactactgcagcgagaggaaagagaaaaaggaaaggaaaggacaaaggagcggcggcgaggtctatggcgtcgacggcggggtacctggcgcggcgggcggcgcagaaggagcgggtgcgcctgctctaccgcagggcgctcaaggacacgctcaactgggccgtccaccgccacctcttctaccaggacgcgtcggatctccgggacaagttcgaggccaaccgacacgtggataacctggacgtggtcgataggctcattgacgatgcggaggctcagtacaggaacttccagcaccccgatccctacattgttccatgggcaccaggcggcactaaattcacaagaaacccccctccacctcaagggatcgagatcatctacaattatggcaaggaggaccagtaaacaagagtcctgcaagcggggggcagaacttccacagttccaaatcacttcctgtttaatcgagttgttgtacgagaaataagaatggaaattactggactccatccatgcttctcatttgcttgttctgataatcatgtgctcttcatctagtgcatattgaagtcatgtttcctgtcataaaatggaactgtactatctttgtcgtgcaaaaaaaaaaaaaaaaaaaaaaaaaaaaaaaaaaaaaaaaaaaaaaaaaaaaaaaaaaaaaaaaaaaaaaaaa

SEQ ID NO: 41777 - DNA, 304 bp, Zea mays
  Clone ID: MRT4577_13809C.1
gggcaagttagcgttggatggcattacctccctccattttttttcaataggaggtctcagggggttcatatgaaaacatatttagaccattcgaatttccctgcactgggaagggggggcctggtaacaaaggtacacaggggcccccaaatttggggacagtttttgggccctaaaaaaaaacttttttgccaaacccctacttcacataaatgaattcccgggggggggttttaaatgacaataatggctcccccggcaaacctaagctgagaaaaaaaaaattttaagggcaattcccctt

SEQ ID NO: 41778 - DNA, 302 bp, Zea mays
  unsure (1)..(302): unsure at all n locations
  Clone ID: MRT4577_1380C.1
gcaaaaccatcnagggagcaagaggtttctacagttttgggtcncngaacgcgagtgaccggagatgggccgagcgggtggaggaggagcgcggcggctcgggtcgcctggcgcccggccacagtttgcctgtaggctcacgctcgccgccaacatactaacgctcgcccaggctaataaagacctgacggaggtcacccacaaggtccacttcgacatcgagatccaccacaagcccacaggccggatcgtcatggtgctttttggaaaaacagtcctaatacaggagagaactttcgagc

SEQ ID NO: 41779 - DNA, 518 bp, Zea mays
  Clone ID: MRT4577_138100C.1
cggctcgagtgccacacttatggtcacaatgttaagggatgtggagtgccacttagagctgattgggagcctaggaagggagctaagtacacgagggcctcaattggtgttcctacttcatctcagccagacccgccgacatttgaaggaggatcaagaattaggccacaaaagttgtcaccgatcaggaaaaggaatgcttgaagtattatgtgtcgtgttgttagctgaattttaggcctcaattggtgttcctacttcatctcactactggaatgctagctgttttggtggtttcagtaattaggccacaaggtgaacgcctgctatgttgagatgaagtaggaacacctgctgttttgctgttttgtttgcctaagctagctgttttgttactgcaaactgtgtctgtgtttcaccttgttttgtgattctgaaagactgaaaccatgtacaaaactgttttgcactttgctgtaaagcaatgcgttatgcacctgtgaacccttgtgctctgc

SEQ ID NO: 41780 - DNA, 432 bp, Zea mays
  Clone ID: MRT4577_138101C.1
aaaccacaaacgggggttttaaaaaaagaggggtgaaccccactccactccttattccaaccaactttacaggggactaggggggggttttgggctatggccaaaaaccagcaaacgggggtgggggggggccccataaacttactggggtttttcctttaccacctacttaccctttccatgcctcgccttggggaggggatttggggggggattgcccacaggtataaacctttcctttttttccgggaccgggggtgggttgtttgatttctggcccccgggcagcctgggggggggcacgaagggcatcccacccagcacgtggttcatgcggggggggggaacaacggggcaccttgaacaccggggccggggccaccttggcgagggggggcctgacgcccttgaagggtgtgggcccgggggggg

SEQ ID NO: 41781 - DNA, 367 bp, Zea mays
  Clone ID: MRT4577_138102C.1
cacgcccacgtgagctcggaattcgtctcgaggcgagagcgagcgcgcgcttttttatagggggcgcatggcgtgcggaatcgatcacgggagtgcccttaccccaggataccggtacgcccagatgttatgtacctatggttcccagcgcacaccccgtgataggggcattagttctcactgtgcaactgttgacatatctaaaaatgtacgccgcgtgtgctattctcagagctcatctcggattgaaagaccacactcggtggggacaccaaaatgattgtgaaaaacatagaaataaacggctttgagacgattatgacatatgtatatgtcacttagggaagccaatctgccacgagatccc

SEQ ID NO: 41782 - DNA, 156 bp, Zea mays
  Clone ID: MRT4577_138103C.1
tcatgctaccgacctacgcggaagctgatgtggcggtctccgtagatgagtagtaccctatcgctgagggctataagtatgtatatggttctgtctcctagcaagagaccccgcattatgagctatgacatctgtggtgatctctctcgtgatcag

SEQ ID NO: 41783 - DNA, 513 bp, Zea mays
  Clone ID: MRT4577_138104C.1
gacttgattctgaattactgttccgtttgccaagacactagattcgtacatttagcacctcaagagctgcggattaacattaacggaatagtatacctttcctgcagtgtaacattaacatttacagtacggacaaagggctggacggctaggtttttttgagaacaaaccggacagattgcgcggcataatactgccctgtcctggtcctgtcctgtcgcccactataataagcttgcttccgtggcggaaaggacaggcagctcggcccaccagagcggagacaggctaggcttcgcatcgaccggacagatacccaccgcctgccttagcctagcggggacctgacttatgctaggccttggcttcggctcggtttgcatgcaatcccggatcacctcaccgatgaccggtccgttagcttgcctgtggtgtggacccaacgcaggatcaagaaacgagactacgctacggtccgagctgggtacgcgctccaccacagccgaggtcatc

SEQ ID NO: 41784 - DNA, 267 bp, Zea mays
  Clone ID: MRT4577_138105C.1
cgctccgagccggccgggccgagactcgcacgccaccctgccgccctgccttgcccaaccctgccgcagtgccgcatccaaatccaactcccacggggtatggatcctgatcaggtcgccgacgccggggtccagcacgacgacctcggcggcagcgccacatccgcaaacgggtgctttgacggtggcagtgacgacggctgggggcgcgcgttgctccggctgggatgggacctgtccaggaaggccgtcatcgctggcgtggcg

SEQ ID NO: 41785 - DNA, 474 bp, Zea mays
  Clone ID: MRT4577_138106C.1
ggccggcccctccgtccagagcagcaggccgcgtctactaccaccaggcacacccggtgccggtgctccaggcctccatggaggcggtggcgccggtgtccgcggcggcggtggcggcgctgctgctgctgccgtaggacgcggctgctggaggtgggcgctgagttagggatactcaaggtgcgtcactctaggctgttgtgatgtgtaattttgtgccaattcatcccgcaaaggctctgaggacgaaacctttgatgacacagctgtgaaggtggctgatattgatgacacattccggctacaggaagaacctccttttgacaagaaatcatttgtgtcttacatcaaaaaatacatcaagaatctcactgctgtgttgtacccagaaaatgcgtatgagttcaaaatggtgtcgagggctgaaccaattttctccttaccatgatgaaggacctccaattttttggttgt

SEQ ID NO: 41786 - DNA, 473 bp, Zea mays
  Clone ID: MRT4577_138107C.1
taaatgaacttctacatcctgggatttcttaccatgaagtgagaaaaaagcctcgattgctgaaattccttatttctatctcatgctaaagaagaggatccaaggcacagacgataacaatgaaaggaacacgtcctttcaggaggaattgtgggtcctcttaatcctctatatgggcacaagtaaaaaggcttttttgcctttttcttgagtcgattcttcttgaatcgacgtaagaatcattagtcttcttaattgatatggcaaagattactattcattctttattcgggtctgtcttttggactgcctttgctgaaggtcggtcgcggtagtggacaaacacagggaatagaaggtatggcggtagacacatttgttgtgagcaaataaaattgctttactttagtgaattaagatcagctctgtacttacagaaattatgtggaaaaaaacctataccctcccatgga

SEQ ID NO: 41787 - DNA, 212 bp, Zea mays
  Clone ID: MRT4577_138108C.1
actaataaacactattataattgttattgatagcgagatgatgtgatgagaggggaacatgctcataaatggctttgggacaaacatgtactacgctcgcacgttgttggcggttacagtatagaacggccacttgccgcgctaacacaaacgtacaggctgacgccgaacacggttttttattattaaaaattacacccagagaatgtgga

SEQ ID NO: 41788 - DNA, 336 bp, Zea mays
  Clone ID: MRT4577_138109C.1
tcgtatcagtacagcagagcaaagcaaagaggaacaccatttcccttgcctggtgtgccaacccaccaccaccaccaccaccacccacgaaggcagcagcaacccagcaccaccgatccatccatccactcgtcattcctccgccccgccgctcgccttcacccatctccgaccccgctccgccaccaaaccctaggctaccagctcttcccaccccgtgtgctccgctcccctgagggcggttcgcgcgccatttttccgtccgatttcctaaaaccgtactcccggattcgggatcggcccgcaacgggtcctcttcttgcttttagtttttcc

SEQ ID NO: 41789 - DNA, 105 bp, Zea mays
  Clone ID: MRT4577_13810C.1
caacttctacctccatatctatttggacctgctctgtctctacgcattatactctatggttctggtgcttaccaacatcactactgctccacttgccacctccct

SEQ ID NO: 41790 - DNA, 225 bp, Zea mays
  Clone ID: MRT4577_138110C.1
atggagggtaggggcatgagcataataaaggatggagctaaagcaatgattgtaactgacaagggagagaatgcaaccaaggtcaggataggtaaaacaccattctcaaatcgagatggaaaagatgatatttcaaaagagtcaaggcaagactcaccaaatggcaaggtggagaaaacaatcaaggataagataagtgaggttccgacagaagagttgaagtaa

SEQ ID NO: 41791 - DNA, 274 bp, Zea mays
  Clone ID: MRT4577_138111C.1
gatctccctccgccactcccgtgcatctcctcgctcccagtcgcccggaaggtacgaagcgtggcgtccgtcaccgcccgctccccggtcgcggcgcttcgcccgtcgtcggccttccttggccgctctagccgcctcgggcgcaccgcgtcgcccacgatgcgcactcgaaggcggaggccaagggcgagtggctccccggccttgcctccggctcgtacgtcgacgggagcctggcgggtgacaatgggttcgacccgttgagcctggcgga

SEQ ID NO: 41792 - DNA, 827 bp, Zea mays
  unsure (1)..(827): unsure at all n locations
  Clone ID: MRT4577_138112C.1
actacggttagaaaagccagtgtcaacttccccgtccgcgccgtctcacgcgtcgttcaaaccactcgaggcctcatcggcggccgtacacgccatcgaagcatcaaggaggagcaatggcggcggcggaggcagaggtgagcaacaagggggtgatcctgaagcagttcgtgacgggggtgcccaccgaggacgacctggagcttgtcaccgccgtcgttcggctggccgtgccgcctgggtcggcgtccgtgatggtcaagaacctctacgtctcctgcgacccctacatgcgcaaccggatgagcgagcacaacgaggcaagctacatcgagcagttcgtgccaggggaggttttggctactttttcagtaggcagggtggtagcatccgggcacccgaatttcaagtcaggtgatcttgtttggggcatgagcggatgtgaagaatacactttgatcacggatccagagtctcttttcaagatcaaccatcctgaactacctctgccgtactacacgggtgttcttggaatgcctggacttactgcatatgctgggtttttcgacgtatcaaaacctaagaaaggcgactacgttttcgtctcatcagcatcgggcagcttgttggacagcttgccaagatcactgactgctatgtggttggcagtgctggttccgatgagaaggtcaacctcctaanaaccaagtttggctttgacgacgctttcaactacnagaaggaagaggaccctcacgccgcactaaagagatgcttcccgcggggcattgacatctactttgaaaatgtgggtggtgcgatgctaa

SEQ ID NO: 41793 - DNA, 736 bp, Zea mays
  Clone ID: MRT4577_138113C.1
ccgacaattccatgccttgcccgtccagtagctcccatctcatcccatcccgacgaatcaaatctccatcaccacttcaccagtcaccaccttgcctagcctccgtctgctgcggacgccagacatcagtcagcacgagggaagcccaaactctgccgcctcttcctctgcgctgcgctaacaacgattcccgattccatggccgcgaccgccatgattaggattaccactttacgttgccgccacgacccgctctcctcccttccccgcaccacgtcggccgcctgctcctgtacccttccgcctcgatgtcgccaatgcagactgctccctccccattcttctggctgttccccttcctcctccatctttccgcgccgggtccgggtccgcccaacagcagcattgaagcgcatcggtggcggcaacaccagcttcatgggtccagccaacaatggcgccaccacgcttcagcgatcttcatcgcccgaccttcgtcgcagcctgatcgtcctcaagtctactgctggtacaggaggtggcaatgcttcctcaggactgctgcccaccattcttggggtggcgcatctgcttgtgtcgctgggcattgtgctcgccaccgataagttcctcaaacaggcatttgttgccgcgtccatcaagttcccaagcgccctcttcggcatgttctgcgtcttctctgtgctagtcgtgttcgacacattcgtgcctgctc

SEQ ID NO: 41794 - DNA, 2273 bp, Zea mays
  Clone ID: MRT4577_138114C.1
acactgctctgctctccgagaacttattgcgagcagcgccccaggtgaccgagcgagcgggccggcgagggctcagctttggataattcttgctccctcttgtcctttcggtttgaagctttctggagggagaagggagcacgcagctcggcgccagtgagagagaggattagaggagcgagaggaaaggggggagatcatgcttgcagagcgtgctccgtgatgcggtgagcgccgctaacctcggttgatttcttggtgggaggcgacaaacgcgtgcgtgagccgccgcttgcttgggaggtggtggtgagaccaggcgtgctccttcgcacttgtctctgtttgagttcgttgtcgtcaggtaaatatcacgagcaccatgctcgagttcttgtagctccgcagcttcctcgcttcttgcatcctttgcaacttgtctcctgttgttttcctctgatttccatggaggaaagatgctgggtgtgccagtgatgtgggcgtggagcaggcaacaattggctcgtcctggacattgatcgattctcccctattctcgtccaaggaattttattcgtttctcctagcaagtcgtgtatgcttgtttcgtggaggtaggagctaggatgacgagcaggaaccctaccaaaaccctgtcggtcctgaccactctcctgctgctgcttgagttcctcgcgctgtgcgcgcccgcctccgcccagccgctccactcggagcccatggctacgcagtccccgccgccgccgctgccgccggggtccacgattccccgggcgcaggccggcggcgccgcacgcctccgccgcattgcgctcggggtcctcttcggctccctctccggtttcctcctcgcgctcgccttcctctacgccatccgcctcgccatcctccacgccaagagcacgcccgcgatcgccaagggccccgtctccttcgccccgcaaatctccgccaagaacctcctggccgcgctccccgccgcgcagccgctcgcccatgggccccatggcaagtactacaagctggcactcgacaacgacctcaccgtcgccgtcaagcgcctcgaggcggccagccgccccgaggcctcgccgtccatgtccccgagcgcgtccaagtcggacatgaggagggtgcagaggcagcttgaggcacttgctcgggtcaggcaccagaatgtgttgtcgttgaaggcatacgttcgcgaggcggaccgcctctcgctcgtgtacgacttcgtccatgggggcagcctcgaggatctgatgaagagggtgaggtcgcagcaagtcagcctcggttgggatgcgaggagcaggattgctgttgggattgccaagggactgaggcacttgcattttgagtgcaatccgaggatagtccactgcaacctcaagccgtccaatgtgatgctagacgaaggtttggagccattattggcagattgtggtgttgcaaggctaattgcagcaggttcaggtgatccagaattgtgcactggcctttacgctgctccagaatgctatcaaagcagcaggtacacggataagagtgatgtgtacgcccttggcatgatcctgggcgtgctgctcactgggagagacccgacagactctttcttctcgggagagactaccgggcagggcgggggcggcctcccaagatggctccggcacacgcagcagtccgcggacccgaaagaaacgctggataccagcatcctgggggacgagggagaagaggaggagatgctgatggccattcgggttgccattgtctgcctctcggactcgccaaccgaccggccatccagcgacgagctcgtcgccatgctaacgcagctccacagcttatgattaatcaccatatatcgcaaatttcttgagcggctgccgctgcgcatggccttaaaaccatgggggggcgatcatgttggatcagtgcttcctgtttcacagctagcacgggggagtgtgcagcagatctcattgtgtggtgcttgtgagtcacaagcgctgaaatggtcgacaagggaactgacagttcaaggccatataggacaggcgcagtcgctgtgttccctgtacgattcatcagtgatgtagtagctaggtacaatacaagatggtggttgagcttcctgggttgttttgcgcgtgggctgtgaatatgtcttggtagaaaaaaaaactctgtgccgtggatctgatctgttggtgttagctgtagcctgtgtatagcctgtagaaaga

SEQ ID NO: 41795 - DNA, 752 bp, Zea mays
  unsure (1)..(752): unsure at all n locations
  Clone ID: MRT4577_138115C.1
ttccgacactactgtcactaaccaccatttgctactacataccaccaagtcattccctaccgccctcgactgccaacttttcagcccgcaccatgacaaactcccttgagtcttcacggcccatacttgccaacagcaccgccaaacgcgcctccacccgcatgtccacctacagcgccgcacccactctgactccctcaattgcgccctcgcacctctccgaagcctcgtcaaccgccggcgatcccaagtcgcaggacatcaaatcatggaacgccggctttaaccgtctcgaggacaagcgcctagtccaacaacgatacgccatgagcaacgagaagacagacgacatgagcaagctggccctgggtgctaaacttgatcgcgccctcggccgacgcatgtcgggccaggacgccgtcttccgaccgagagccatgagcgagaagaaggaggtccaggcatagacatgcacataccagacgaaactgttactctgcgccttgaacacacatacataccatgattcgatatcccacactggcggtttccaacctaccgcccagcatttcttcgccccgatgtcggcgtttctcaagcgtctcggtgccaatacctatactccaccagacacatgttttttttcggnggagggttggacatgtaaatgaatgccacggcatgacgcatgcaaactggcattcccatctgtcgctggntgcagaattgacttagcgcggcatatacatcgg

SEQ ID NO: 41796 - DNA, 389 bp, Zea mays
  Clone ID: MRT4577_138116C.1
ctcgaaataggttgaggtcaatagagagaggccccccataacacttatttcgtttacccaatttgtctccatcaatggcaggcctgacttagcatacaaaagcattgactattcctgattccatccatatgggatcagttataaataccattttgcaatgaaatgagtggaaagctatggcaaaattgtgttcaaaacgatgtggccgaaagcgacgtgcgacttgcaggacatcatcgattgagtgctagcctatccattattttccaaaactacgaaaacgctgtcggcaagacaaagtttgttctattccaacccaacccaattttctctgggttgtttcgcagtaaagcaactagaacccgatggaacttgagaggacaaaattt

SEQ ID NO: 41797 - DNA, 475 bp, Zea mays
  Clone ID: MRT4577_138117C.1
ttattctctttctgcatatattcagtcacattcagaggtgtcccatgtggagatcttggaacatgtttcatctatcctcaaagaacatgggtttcaccctactgaagaagacgacatggacactataaacctccaaccttatgactgcaaaatgtcagacaaaaaatcggatagcaaagggctcatagatccaaacagggcaattatggaatcggataatctacatgctgcaaagaaaaaggtaaaggctatgaccgtgacaaagaaagtagggagaggatgggatcccacatatacaaggagaagttttttcccatattggagatcaatattagtgatacggtgtcctgtgaaggtgtatccatgctacgcaagagcagatggtaggattcagcgtaatcttgatcatttctctgtctctcaaaggaagtcactgggcaatggtcatgtgagaagaacctcaccacttgcaagc

SEQ ID NO: 41798 - DNA, 1035 bp, Zea mays
  Clone ID: MRT4577_138118C.1
aggctggccgagcgttcgtttcgttgcggcagaacgatggcgatggcgatggccatgctcgcagtggcagggttgcagagcgcaggacggactgcccgcgtcgcaggttttgtcggccccagcctccgtcgggttgccgttgcagagctagctcgggggctctggcctctcggccgtcgtcgtcgccttcgcaacagcgacagcagtgataaataaggacggagaccgacgagcgaccgccgtggcgagcacgacgctgccgtgccgagtgcggcgccttagtgtttctcggtccatgtctcccgtcccgtccagcacatagtttcttgttattggaaaagtctgttcggatttctggatccaagtccagaatttgatgtcttcagctagctgaaactctagtgtggcttacgcacgcccgttcctgatttctgcaggtccagcgtgggaacactgatcctcctctacttcacgctatccatgagcagggcggactccagtagcggcggcggcggcggcagcggcggcagcgacgcccggtgaaggtaacgccgcctagagcgcgggggcgtttggcctgatctgagaatttccagacctgcaaagatttagaagaacaccgtggtccaggcatatagaagaaaaagctgtggtgttgcgggcctatctcatggatgaatatagagcgagccaacgacagcgaagaagtcgagccggatgtggatttgatggagaagtttgtgatggtagacatccttgttccttgttgtattctcttttttttctgattttctaaaaaaaaaggatatgaaaaaagagaggatatatgtcactgtacggaataatttggaaacttaaatccacttcgagattgaaggattaacaatgaatatttatatccctgcccccaaacacacgcacacaaaaaaaaaaaaaaaaaaaaaaaaaaggactctgtgttggtaccactgactgagggcggattacatcccactgactgccggtcctagctagtccgagctagctaccaacctt

SEQ ID NO: 41799 - DNA, 982 bp, Zea mays
  Clone ID: MRT4577_138119C.1
cgcacgcccgcgcgcgtgaaggtacgcggaagcaggggcgaggattctccgaagcggagggcgaggcggcggcagcgaccttgagggagatggcggcgggcggtagggtttcaatcccggcaggggcgcggcgcacgatcgcggacatcaaggagatcgccggcggccacaccgacgaggaggtctacgctatgctccgcgagtgcaacatggatcccaacgagaccgttcagaggctcctcctcgaagatacctttcatgaggtgaaaaggaagcgtgacaagaaaaaggaggttagtaaagagccatcagattctcggtggagacctgccgtgcaggggcaaggtggaaagaattgtcggaattgtgcttcacgcagtttgtccagctctaatgattctgctggacgaagtgctatttctggaaaggagaatggaataagtttgatcatgggaaaaggtagtggttctactccgataaccaatatgaatatggatgtcaaagcttccactttcatgccaagtaacagtttgttgagtggtctttgcaacggtccatatcaatcagttgatcctgctgctgtgctggtgtctagttctagtgctgttggtgataagtctggttcaacagccttggctgatcttacaggtggtcttccattcaaagatgtagtcgctactatagatccaaattcactgcaaccattgaaaccagcaccaccatcagatcctgtggttgtatcttttctcaactctcacagccttggtgacgttggtgcttccagacaaactattggaatcaagaagacatcagtagaacataaggtggggcgtgatgtatcaacagacaaaggctcctccgaacaatctgtgcaatcttcatttcgacgatcctctgctagtagaccatcttccagctacaacagtcattcagaacaatcccaaaaagcaaccgaggatgctaccgtacatgataatgacct

SEQ ID NO: 41800 - DNA, 469 bp, Zea mays
  Clone ID: MRT4577_13811C.1
agcaaatgggatgtatatataaaaaagtaatttgtttatttccccgggcccagcacaaaaatttcaaaaacaaaaggggggcatcaaagccccctatccatcctagaagaacattgacttcacagggggggggcttttgttattccttgatatccccatcaccgggaacaatattatggtttctacacagcaccagggttacgtaaaacaggggtgggtccataaggccccatttatttgagcccctcccaaaaccagttccttgaaccgggctttgcatcccatggcacgcttaaattcccccctttccaaaaaaaagctgaaccggcagtacccagggatccccgcccaggagctggtgtttatgcacagcccaggggccctaaggagggcttcccggatgttgttcgggtccagctcgccgtaaaaaccaacagttttgaaggccttccccatggacgcggggggc

SEQ ID NO: 41801 - DNA, 339 bp, Zea mays
  Clone ID: MRT4577_138120C.1
gtgaaccacccgtccgcttagagccatctaactgtccgctggacaacaacttttgcacttttaccctttattaacaggaatttgcttacggggtttaggctgtatctagcctcgccaatcctttttgtgaacataaatctattaatgacctctattggtcactggcgatgttcaaactccatccgtcataccaagcgtagacattacacgcgtggagacccggctatcaaccggtgcgccctaggagtttgtccccgacaaagtctaggccgaacacgaggctggtgatcctgctgatcccgaagagctatgcgctgccagacactattcatgcttcca

SEQ ID NO: 41802 - DNA, 353 bp, Zea mays
  Clone ID: MRT4577_138121C.1
cccgaaaaatcgggcccccaaggccgtttcgggggttctgggggaccggaaaaaaccaacccccccccccccccccgggtgggtggatttcgccgggggcccccccactacattatcctccaaaaaaggccggggggggcctccatgttcccgcaacccccaccaaggggggccaaaagggttgaaaacccggggaggcccagacccccctttttcctgtcaccgaaggagcccctgaggacccccgccgcgcccgaaaaagggcccttcccctgccccttggggcccgggggtgcccaaacaataaaatgcagggctcgaaaccctgccccttaaaaaccccggggaccatt

SEQ ID NO: 41803 - DNA, 344 bp, Zea mays
  Clone ID: MRT4577_138122C.1
acaagtaaccccgttcttttttattattcattccacctagcagtagtaatttacaagcaaagatctgatcgatacatgtacatatattaggaccggcccggcatggtgtgcatgctgcattaattcctgactttctgaactccccctcctctcctcgtgatggatactgtttgcccggcaaatgctgaagagcattccacgtgaagatcacctgtccggcaggctcggttcgaatcgggttgcgctgggggtttcagactgaagtgcaaccgggagccagcggcgtcttacgcggtcaccgaggtctcgatcgccacgcgatcggcgtagaggacgtcctccgc

SEQ ID NO: 41804 - DNA, 583 bp, Zea mays
  unsure (1)..(583): unsure at all n locations
  Clone ID: MRT4577_138123C.1
ccggccgggattgaattcgttgtccttgttggttcaattgattgcttgggcctccctgcttgactcgtgagagccctggtttttcttccaacggcgacaacgcgaaccattaatcttgccttgccctgttctgtctggtttggtctcgctcaggtacgctaaggctgcagtgtcaggtttgacagctctcgatgtgtccccgatgcttcccttccgtctgttgagtcaccttgaacgctctttgtttgttttgtcacttcccaccaactaccgcctgtctatgcctatgcggttccgtaactaccggcatccatagacagggtaccttgacaaaaaggcccgggatctacggctccgcaatggagtttagagtttgccaaatcatggaaaacggtcttgtcatgtcagaaagaggttaaagaggtttggtaaccgatggaacaatgatataattggaaatatttattccaaagattagtcactgtgtcatctggtttcatttcaacctgacttctctgngagacgaatgttccaacatcagattanatcttgtctggatggattcaaaaaggcgtcatgagcc

SEQ ID NO: 41805 - DNA, 1759 bp, Zea mays
  unsure (1)..(1759): unsure at all n locations
  Clone ID: MRT4577_138124C.1
gttgaccgctgttgccacacttctcaccaaggcagggagggactgccgtctggggagagttgccagcaaagtgccaaaggaaaggggaatcgccatcagctcctccaactccgacccacacccacggcacggcagtcggcagcagccagcgtcgagcgcagtgccctcttgtctgctgcctcctacctccccgcccgctgccccgcgcccagtctcactcacacactcacacggtccgatcggagggggctgaggagatggagccagattcggcgacgacgaggctcgcattgctggcgctgcttctcctggcggcgcccgcccgcccggcctcggcggctccggtggaggatggcctgctcagcaatggtgactttgagacggcaccagccggcggtttcgtaagatctgcgtctgttgctgagggtgcatcgtcaatccctggttggacaatcaatggcacagtcgagctcatttcagcaggccagcaccagggtggcatgatcctgattgttccacagggagaccatgctgtaaggctagggaatgatgctagcgttgggcaggtggtggacgtcgagaagggctcggactacgctgtcacattcagcgctgcccggacatgtgcacaactggaggcactgaacgtctccgtgctaggtggcgtgtcgcagacagtagatttacagacgttgtacaacatagaagggtgggacgcgtacgcgctggcttttcaggcgacggaagagcaggcgcatcttcagttcatgaaccctggcatggaggacgatccaacttgtggccccatcctagacaacgttgctgtcaagaagctcttcactccggacaaaccaaaggataacgtggtgctgaatggagactttgaggagggcccttggatgttcccgaacaccagctttggcgtgctgctcccaactaaccttgatgagcagacatctgccatacctggctggatgatcgagtcaaaccgcgctgtccgctacatagactctgatcagtacaaggttccccaggggaagcgtgccattgagcttctgtcaggcaaggagggtatcatctccncagatggtcgagacgacccctgangaaggtttacagcctgacggccatgcntgggcgcggcgggggactcgtgccaaccaccaatggcncatcatggcgttcgccggggaccaggcccagaacttccattactcaccattgggcaacgccacgagccaggctgtgaacgtgacgttcactgcgcgcgctgagaggacacgcgtggcgttctacagcgtgtactacaacacgaggagtgacgaccacagctcgctgtgcgggccggtgatcgacgacgtccgcgtatggggcttgaacaccgcggctgggttgaaggcgagtgttggactggttcttggcattgttggcgtcgttggcatggtgctgttctgaaatctggatctctcggtggctgtagtcttgggaagcatggatgtgtaatctcatgtgttagttcgaggaggggcagggcttactggttttggtagtaagcttgaagtttgtcgagtaatatgagcttaggctaaaaaaaaaccctaccaaaacctacatgttattgcctgtgttacttcatttgtgattcccgaagtaacatgcaattctatgggatagtgtggtttgtttgccctagcttgtactgtaatatgagatgttagaactgttacaagttcatctaaaaaaaaaaaaaaaaaaactc

SEQ ID NO: 41806 - DNA, 791 bp, Zea mays
  Clone ID: MRT4577_138125C.1
ggtaccctcgggctggccgggagttaacattgtggctacagagcactgcatgtcagcttaaccaactccttctaccaaagtgtcgccatcttgtcttttcgagcttgaagaacaatcagaaacctaccaacgcgtctcaaaatgtccctcgtacaggatatgctgtcgccattgcccgacatctcccccgagaagctcaccatcttgaagctcaagcacagcacactcaatcgcgacgtattctctgagccgtcttcgccgatccacgagcacgaaggcatgaacttctccaagtctcccaacaacatgagttcttcggtggtgtcgcgcagaaccagccgtgcaactagcggagcccgcaggcgcagttcgttcttgcactctcaccgaagcgagatgtcaagggagctcacctctcaggccgaaggcaaattctttgccttgatggatctcatgtcaacagcttcgagggaggcatcctctctgaaggagtcgtgggcacgtattgtgtctgagcgtgagtctctcttcaaggagaaggaagagctcctgtcacgagtggaagaagtcaccgagacactcgagcgcactcaaaccgaacaccatcaccatggccacgagcatggggagcgcaagaagcaggtagaaaagctgttgctcgagctctcagttgctgtcaccacgatccaagaacacaagaagaagatcgctgatcgcgaccacgaaatcgaccgcgtgcgtacagagatccgcgagctccagtctacgtcatcgacctcgtacaacgagca

SEQ ID NO: 41807 - DNA, 475 bp, Zea mays
  unsure (1)..(475): unsure at all n locations
  Clone ID: MRT4577_138126C.1
tttacccaggccctatttacccaggcggggggcgcgggagcgaaaccaacccgtagagaacgttgcctcaatccaactctgctcctaattgcccgcgcgatatccctagcgctaccttaggactcccccagcctcggaaaaatcccatccccacaacaacagcaagaaatacaaaatgacccacgcaagggggggggggaaccctcatctgncgcccttcagactctctttgagatgccccgctagccagattgcttcgagcaagggactggnatgtgcagaaagctagccctctgatgacaagcagctgtgaagaggcggctcgcattcgaacctgaactcctctgctgggatgatatcgcataggaagcagagaccggaaagatctattgagcggcttataaggccacacagggcaaaactgttctatggtagaggcctggctcacagacactgcctcagccacggacggatc

SEQ ID NO: 41808 - DNA, 373 bp, Zea mays
  Clone ID: MRT4577_138127C.1
gggggacgggcagagcagagctgagctgatctgcctccaactccgacccacacccacggcacggcagtcggcagcagccagcgtcgagcgcagtgccctcttgtctgctgcctcctacctccccgcccagtctcactcacacgctcccacttccgagtctcgctcgcagcctgttctcctggggtccgatcggaggggggtgaggagatggagccagattcggcgactactaggctcgcattgctggcgctgcttctcctggcggcgcccgcccgcccggcctcggcggctccggtggaggatggcctgctcagcaatggtgactgtgagacggcaccaggcggcggtttcgtaagatctgcgtctgttgctg

SEQ ID NO: 41809 - DNA, 583 bp, Zea mays
  Clone ID: MRT4577_138128C.1
aaacttacccgcttcgaccttcaccaaccccttcatccttgatgcatctcattcactccccctcagctatctatatcccttgcattcatgccaaatcatcgccgccgagaactctgacaatactctgcgcttcgcttcacacctacgcttcatctgaagcacacatgatgtccgccataaccaacataaagatggctgcgccactacttctccgacatcgtctgcatgaaggacgatcttcacatcaaccagaccgacctggaccagatcctcgaaaagctcaaggagcagatgacgagcgcattgcacaactcttagcagatcaagaaaccgggatggttcaatccatctacatgaaaactacatcgacggaaagatcacacacactgttaccaatttcctctatgagaatctcagacacaacatctagacgctcacaaagataaggaaccaccttggacctgatccactattgtgggcttattgaacgtggacacctcaccgagaacactggtgacatcattaagactgttcttctctccaagactatagaagctacccatgctatcgacaaatctcagat

SEQ ID NO: 41810 - DNA, 879 bp, Zea mays
  Clone ID: MRT4577_138129C.1
ccggccggggaatcgccatataaaaagcgggcgtgggcgggggacgggcatagcagagcagagctgagctgagctgcctccaactccgactccgacccacacccacggcacggcagtcggcagcagccagcgtcgagcgcagtgccctcttgtctgctgccccgcgccccgtctcactcacacgctcccacttccgagtctcgctcgcagcctgtgctcctggggtccgatcggagggggctggctgaggagatggagccagattcggcgacgacgaggctcgcattgctggcgctgcttctcctggcggcgcccgcccgcccggcctcagcggctccggtggaggatggcctgctcagcaatggtgactttgagacggcaccagccggcggtttcgtaagatctgcgtctgttgctgagggtgcatcgtcaatccctggttggacaatcaatggcacagtcgagctcatttcagcaggccagcaccagggtggcatgatcctgattgttccacagggagaccatgctgtaaggctagggaatgatgctagcgttgggcaggtggtggacgtcgagaagggctcggagtacgctatcacattcagcgctgcccggacatgtgcacagctggaggcactgaacgtctccgtgctaggtggcgtgtcgcagacagtagatttacagacgttgtacaacatagaaggctgggacgcgtacgcgctggcttttcaggcgacggaagagcaggcgcatcttcagttcatgaaccctggcatggaggacgatccaacttgtggccccatcctagacaacgttgctgtcaaaaagctcttcactccggacaaacaaaggataacgtggtgctgaatggagactttg

SEQ ID NO: 41811 - DNA, 259 bp, Zea mays
  Clone ID: MRT4577_13812C.1
cacaagatgatcggcatgggccaggccaaaccggacaacaggttgaaccgatctagaaggtcatgttccatacttttaacattaacagcatatagggcctgtaatgaaaccaacaaaacacaagctttgtccggttgaaagaacagggcggatagggactaaaggtatccgggttccaccatcctgctcccagaggttgatgatatttgaggactctatgagaaggatgctcatttgcttatgagagatccactttttc

SEQ ID NO: 41812 - DNA, 341 bp, Zea mays
  Clone ID: MRT4577_138130C.1
acaaaaccaatttattcgaaccatgccccttgatcgtattaaggacaaatcgatggggatttgggtgtacaaaaagaacgttgtttaccccataagctgggttggtttttatacaggcccaacgactggtccattagggcaaatttttttcacgtttttggacacggagtattttacaaaaccgatgcctgattggtcacaagtgttttgttgcgaaaaaaaacaaaggggctgcgggcactagagcagcaccttttcaggccttgattcaacaccggaaggtggttaagaacttttttctctctcgtggggaggggtctttggcggggcccgggcggggg

SEQ ID NO: 41813 - DNA, 551 bp, Zea mays
  Clone ID: MRT4577_138131C.1
cacgcctgcgtgtaccgggctcctaattacacggtcgaccttagcgttcgttgcatcataaaagagctcattttatgttaccggacaatggccaccataattcaagatatctaatgctgaacgatcactcatgaaggagctgataccgggcaccgtcaatgacagggctgacaggctgaacatagctggctttgttaaacaagctgttacaatgggagcattgaggtgtgaaaaccaggtgccagaaccttacgcgaccacaggcagaacggaaacagcagttgacgtgtataaaacgcgacaggtcctaaaatcatctagcttattacatgagggaccttgggggcgttggtaagtcacaaaacatttaaatgcatcaactacaacaacttgggctaaaaaaccttggtgggtactctcaacatcaccagatggttccatgtcaaccaactggatgcattgaactctggtgcttatttgcaacaacaactaccaactagtgatgctagctagctggctacccggagcaatatcttacattgaaccaactg

SEQ ID NO: 41814 - DNA, 226 bp, Zea mays
  Clone ID: MRT4577_138132C.1
cccacgcgtccggtctcggtctagaatccatgcacgtttcaagcggcaaaattccgattatgtccctcccgaagccagactatagctggattcttatcaaggttccacatgatcaggcgcctttcttcctcaagagttagagccacatatatgctggacagaatgagtggtcggaattggcctggggacagatactcatcatatggataagtgtctctcatatata

SEQ ID NO: 41815 - DNA, 881 bp, Zea mays
  unsure (1)..(881): unsure at all n locations
  Clone ID: MRT4577_138133C.1
cgaggccggccgggaccgcaccctaggtcgccgcctcttttcctctcactcgtccgcgcgacgcgacgcgacgcgacgacaaccggagggttttctgcggggatttgtttgtcgccgactcgccggcagccaagatgaggccggtcttcgtggggaacctggactatgacacccgccactcggagctcgaccgcctcttctaccgctacggcagggtcgagcgcatcgacatgaagtcaggctatgcttttgtctactttgaggatgaacgtgatggcaatgatgctatacgggctcttgatggttatccatttggccctggcagacgcaggctttcagtagagtggtcacggggtgagcaagctggtagacgtgatggcaacaaaccagaagcaaatactaagccaactaggacactgtttgtcattaactttgatccaatgaacacaagagtcagtgacatcgaaaggcacttcacaccatttgggaacatatcaagtgttcggataaggaagaactttgcttttgttcagtttgaaactatggaagaagcaagaaaggctcttgaagctactcatgctaccacccttttggacagggtgatttctgtcgagtacgccttcagggatgatagtgaagtgagtgataggtacggcagcccaagaagaggtggtggctatggtaggcggngtgatagcccagtgtaccggtcacgtcctagtccagactatggtcgcccagcaagtcctgtatatggttcatatgacggtcctggtcctggtcgtgatcgctatcggagatctcttgcttatcgatncaggtcccacccctgcgaacgagagcatatgactaatcgagaaccctctctgntatgccatata

SEQ ID NO: 41816 - DNA, 402 bp, Zea mays
  Clone ID: MRT4577_138134C.1
gtatctggttggggcattctatttgtagaaaaacttgtaccaatcattgccaaccttttcttggaggctccaccaaatgaaaggtttagtgtctctcctgaagtcattcaaggtcttggaaggtgtatgaacacaaggagagacaacccaaggggtaccctttggagaatatctgctgaatctttcaatcgtgttgtgacagatgaggtcaggcaggacaatgttgattgcagaagtgatgtgaattcatataaactttctagagctcgtttctggaaggaggtcgcagatgtgtatgaaacttttcttgttggttcttgtggtcgcgcgtcttcattcagaagtctccttaagctgaattatattacagcttatgaggtccttgaaatgagtgctcttcac

SEQ ID NO: 41817 - DNA, 775 bp, Zea mays
  unsure (1)..(775): unsure at all n locations
  Clone ID: MRT4577_138135C.1
gtaccctcgggtcttccgggatggcccccatcccagcatccccggcctcacaaaacatcgctatgtttttgagtaccacaactgaaaggccgcctgttcacggaacaagaagttgagcaacttgaggtcgacatcgatgaagcttttaagaaagcatacgacctcgtccacttcaagtccaaaacgggaagaaactgggctgattatgaagacgacatctcatacgaagccccaaagtttcagggaaacgacgcacgcggtcccgtccgcgaaaacaaaacggactcgcccacccctacagtctcgcccgtcgctacttcaaacagcgatattctcaacaaggtggtggaagcgttggtcaacaagatcgacgtctcagtcatagagcggatggttgttcaacaaattgcggaatcagctatgaaacgaccaaagaacaaccggaggcggcaatcaaagcccaaaacttcgcctcctatttctcctccctttacaggtgggaagtatgtgacgcccgctctgagatcccagggttcgaaacctgtgggtccctccccaggtactacttcacaaaacaaaaagaagaatcagaatggngggaggttacttgcagagggaaacccggcgctggcagaaaaagtcagtggcttcgggtggccccagnttggtcccgcggccgaactgaaaagcctgcgccttcaagcgcagcgatggctctcacgcgcggagtcagctaaaatcccgtcaactgaggacagggagcgcgtgatccgga

SEQ ID NO: 41818 - DNA, 1665 bp, Zea mays
  Clone ID: MRT4577_138136C.1
ccggccggggcaggagagaagagaagcaccgcaaccctaggtcgccgcctcttttcctctccactcgtccgcgcgacgcgacgcgacgcgacgacaccggagggttttctgcggggatttgtttgtcgccaactcgccggcagccaagatgaggccggtcttcgtggggaacctggactatgacacccgccactcggagctcgaccgcctcttctaccgctacggcagggtcgagcgcatcgacatcaagtcaggaactaccagggcaaaacatagcttccccagggctcttcaactccttccattcaataacctggccatcatttccttcacttgaaaccatctgttcatgtgccctgatgcaaactgttactgctgctcgagcatgtttagcgggatcgtgccatcagtaccatcatgccttaccatgccacgactagaagtatcaccaacatgacaacatgctatgtgtactacattgataagcaagagttctatttatggcgaagcatgtccaatgtctccggtcattctttcttactttggatataagttgttcaacaccatgcttaggtcttatcatgaatggaatctaccactctagtgctcttcataccatcagaactatgcaggctatgcttttgtctactttgaggatgaacgtgatggcaatgatgctatacgggctcttgatggttatccatttggccctggcagacgcaggctttcagtaaaagtggtcacggggtgatcaagctggtagacgtgatggcaacaaaccagaagcaaatactaagccaactaggacactgtttgtcattaactttgatccaatgaacacaagagtcagtgacatcgaaaggcacttcacaccatttgggaacatatcaagtgttcggataaggaagaactttgcttttgttcagtttgaaactatggaagaagccagaaaggctcttgaagctactcatgctaccacccttttggacagggtgatttctgttgagtacgccttcagggatgatagtgaagtgagtgataggtacggcagcccaagaagaggtggtggctatggtaggcggggtgatagcccagtgtaccggtcacgtcctagtccagactatggtcgcccagcaagtcctgtatatggttcatatgacggtcctggtcctgttcgtgatcgctatcggaggtaatgccattgaattgttttcattggtgtgcatgcttgtcctgatgtccgtgccatatgctgtagcagggctcctggagccctccacgttgaataatgataggacatcttggtagtctattgtacatgtaccatgaagtgaagtggttggtggctgcactcaatttttgtttggtatatctgtgtgatttcctggtttgttacctacttcaatcatggtttatagtttatttgaattcaagcgcaaggtttctttgagcaaacattgtcctatggaatattttttcccagaaactacgtcatgcgccatgtaaccttccttggttgcaaccatttcatctttttggtttggtcagtctgcagtttttagcatactgcttcctttttagtatttttacttattaattaggtttcctcttgttatctaatgagaacgcaattgtatatttccgcaaatctcctgcttatcgatc

SEQ ID NO: 41819 - DNA, 177 bp, Zea mays
  Clone ID: MRT4577_138137C.1
taacagctttgcctagcttactccttaccgactaacaaaactgatcatggatccgcacaggccatagctagcttaactaactcgtccagtccggctgctgctgcactacggactcgttctcacgggcccgtcggctcgcagccatgcagacgcatcccgcctggtcatgagtggcgg

SEQ ID NO: 41820 - DNA, 351 bp, Zea mays
  Clone ID: MRT4577_138138C.1
gaaaaaagggacccgcacgcgtgcgattattgaaacctaatagcaacatatcatgcattttcaagcaccaacaatcacaaccgggatattgtgcttttttatactgctgtggcgtctcccaaatctcgctaccacaaccatcagcccacaatgctcacaagctcctatatcttcccttcttcccccttacctctcaacaacggtgtcttcggaatttgaaaacccaattcttcaaccctacaggatccaacagctaatcgcagctcgaatcttacctttatcacccttgttccttcaacaatcattagacttatttcaacatatacctttgctgcatttattggcacaaaa

SEQ ID NO: 41821 - DNA, 1899 bp, Zea mays
  Clone ID: MRT4577_138139C.1
tttggacatttgttattcaatttttatcgtctgggccacaggtggttggaaatcatgtaggctcaaaggtaaaagtagtccagttcatagccgagccgcaggagagaagagaagcaccgcaaccctaggtcgccgcctcttttcctctccactcgtccgcgggacgcgacgcgacgacaccggagggttttctgcggggatttgtttgtcgccaactcgccggcagccaagatgaggccggtcttcgtggggaacctggactatgacacccgccactcggagctcgaccgcctcttctaccgctacggcagggtcgagcgcatcgacatcaagtcaggtctgcctgcccttgcattccctccttttgcccacccccttgtttatcttcgtcttcggccggttttagattcgatctcatcttattgcatacctagccacttggtatatcttcatggtcaaataccaacgactaatggaaaaaaaagtcagtgacatcgaaaggtctttcacaccatttgggaacatatcaagtgttcggataaggaagaactttgcttttgttcagtttgaaactatggaagaagcaagaaaggctcttgaagctactcatgctaccacccttttggacagggtgatttctgtcgagtacgccttcagggatgatagtgaagtgagtgataggtacggcagcccaagaagaggtggtggctatggtaggcggggtgatagcccagtgtaccggtcacgtcctagtccagactatggtcgcccagcaagtcctgtatatggttcatatgacggtcctggtcctgttcgtgatcgctatcggagatctcctgcttatcgatcaaggtccccacctgcgaaacgaagagcatatgactaatcgagaaccctctgttatgccatatatggcctaggaacaccctgtagcaagaacttactgtacctgtaccggagcgtcaccttaatgtccttaaattcccgtgtttaatggtctgtacatggttatgctatgcgactgtcaggtttcactgcatgcaatattgtcatttggctgctaccaaaaaaaaaaaaaaaactgagttgcacgtttacatctgtaggctatgcttttgtctactttgaggatgaacgtgatggcaatgatgctatacgggctcttgatggttatccatttggccctggcagacgcaggctttcagtagagtggtcacggggtgagcaagctggtagacgtgatggcaacaaaccagaagcaaatactaagccaactaggacactgtttgtcattaactttgatccaatgaacacaagagtcagtgacatcgaaaggcacttcacaccatttgggaacatatcaagtgttcggataaggaagaactttgcttttgttcagtttgaaactatggaagaagcaagaaaggctcttgaagctactcatgctaccacccttttggacagggtgatttctgtcgagtacgccttcagggatgatagtgaagtgagtgataggtacggcagcccaagaagaggtggtggctatggtaggcggggtgatagcccagtgtaccggtcacgtcctagtccagactatggtcgcccagcaagtcctgtatatggttcatatgacggtcctggtcctgttcgtgatcgctatcggagatctcctgcttatcgatcaaggtccccacctgcgaaacgaagagcatatgactaatcgagaaccctctgttatgccatatatggcctaggaacaccctgtagcaagaacttactgtacctgtaccggagcgtcaccttaatgtccttaaattcccgtgtttaatggtctgtacatggttatgctatgcgactgtcaggtttcactgcatgcaatattgtcatttggctgctacc

SEQ ID NO: 41822 - DNA, 110 bp, Zea mays
  Clone ID: MRT4577_13813C.1
aagcaacatacaaaggcgacatcagaagcggcattcgagcaacactggcgggcaacaatggcggcctacatatgctccatgctcttgctgcatgcgttgcttacgcgacc

SEQ ID NO: 41823 - DNA, 457 bp, Zea mays
  Clone ID: MRT4577_138140C.1
gcgtggggggtggttttttttttttaccgcagggggcgggggtgttgcccaggtgtgggaaagcaggtgcggcgtgcgtactagccagcgccaacacttgggggggccgtcttattcttcagctgcttgccccgtcgcggatccacgatagggggggggggggggggcgcgtcgtcgcgctcggatcgatggcgggcggggcgataccggttgcacacccgccctgcttctgtatgtcttgttggggcggggggggcgccggcagcccgcacttccctgggtgtttgtaagtgctgttagatgtctgacggctggacgcggtgggccacctgcgctccgcgtcccggccgctcgggtgttcgctgcgccctgcttgggggtggggctggggtattggttttctcggtgtggccggcttctggggggtgttggcgccgatgccggtgcggtggggggg

SEQ ID NO: 41824 - DNA, 1289 bp, Zea mays
  Clone ID: MRT4577_138141C.1
gaagcaaaagcacattaaccgaaaggaaccccaagcgcaaaggaagaccctttcgcccaggaaacaaactgggggacaaaggccaagaatgagcggcacgagagaacgaggccctggattccaaaaaagacaattgaaattcccggcgaggaggaatcaactagggtggacaacagtgtctccagcaccaaagaccacgctcaggcagaaaagatgctagagctcccacagtcgattttggatgcggaggctgagatgcacgctcccaagatgtggcggatgctgataacgcagaataagaaagtcgaatctggacctgggaccctcgcagccggccgggccggaatacacagcaaagcctcaaaacctgatcatcagagaaacgaaaaggaagaggtgagcgtgggagaaaaaacaaaagaaaggaaaagagatatagccctgagaagaatggcccttacaactgatgaactcaaggccaaggccgaggtatactacggtgacgagatctgccagctgtgtacccagctcctgctcagggaagcaggcctccccaatggtctgcttccattgaaggacctaatcgagtgcggctatgtccaggaaactggattcgtgtggctgaagcaaagcaagagggttgaccacatcttccatagtctaggaaggctggtctcttacggcacggagatcaccggctatgccgagaagggcaggatcaggaaggtcaaagggataaagaccagggagctcatgctgtgggtcccggtggaggagattgctcttgatgatgatccagcgactgggaagcttgtctgcaagagcattgctgggattaccaaaaccttccctgcatcggctttccatatcccggagaaggagaacaatgtgaaggcgaactgtgctgcactcaagccggtggtcctcatggagagagctccacgagttgttaaaaacagctgatccgccttcaattctgcatccactggtatttggagttgacgtacggccgccatatcagcccttaatcctacgtatttaaataatggttgaactagtgctttactgttttccgttcatgtacttgggaaatgataacacaaagttcttccgcctatatatatactgcggttgtacgattgccctggcatctatataatattgtcctgtaaggtaaccacccaacttcctttcatgtactacgtagctctatattactaatacaaagcatgttgtggacttctatgaaaaaaaaaaaaaaaaaaaaaaaaaaaaaaaaaaaagagggc

SEQ ID NO: 41825 - DNA, 544 bp, Zea mays
  unsure (1)..(544): unsure at all n locations
  Clone ID: MRT4577_138142C.1
ggtacacggccgcccccctcgagttgttttttttcctttttttttttttttttttttttttggcgcacaaccaaaaacttggaggagggagaggggggaaaaaaaatagagtaacttatataatttaaaaaagtggaagcaaagttcattatgctgatgtacccgaacaaacaacaaattcagggggcgtctggggggggggcgcccgctcatcctttcngggtaaacgggcgcgcgccggggggggcactgttgcccctgcgcgcccgccacctcgcccgtgtggcccgggtcctcgctggggggatcgctgctcctgcactccgggatggggcggccgggcacggggctccctcacgcgcccgagccggttgatccgggtccggggggccnccncccgaccgctgcaccgggctttgccccggtaccacgcgggggttcaggtgctccaccgacaggtcgccctccaggtgccgggcgatctggctcatccgggggcgacaccgggcggtttggcgcacgggggccggggggcacccgacca

SEQ ID NO: 41826 - DNA, 565 bp, Zea mays
  Clone ID: MRT4577_138143C.1
tcggtttttttttttttttttttttttttttttttttttttttttttttttttttttttttttttgggggcaaaccttttgagttagcaaatcggcaattttaagggctgtctaaatggacatgaatcgcatacaagccgtagtcagtcaaactggggacaattgaatgcagttagccacacaaaactcgcaagctgtttgggtacaatggacaaattttttattttttaacagcaactatttggagagggcagcgacaaaaaaatccggaaacaagggggcctaattagtcttgcccatttttttccgccagaacaaaattggggggctgaagggctcgttgcggattttttttgagggtgccctccagtcacacttttccattttttttttgggagccattccaaggggttccctgaaatcttttgaactgaggagctggtttattttcctcacacactcatcgaaatctccgggggtaaacaaaaagcttggcttaccctccttggccttcggtattatatcaggtatccctccagcacgagcagcaacgactgggactcca

SEQ ID NO: 41827 - DNA, 348 bp, Zea mays
  Clone ID: MRT4577_138144C.1
gatctatccattctttaaacctaatttcactctcagataatcgtctccctctacggggtcagaatgacacagaagctgggtcataaccacatagactattcaatcaaattgcacacatatccctatcactattacattctctactcaagattcgcatctctcaaacacaagaattcatgatccatgcattgatatctttccatcaatgctccatatttcatccaatataacctaactctccaacatacactatctcatttaccattaccttccagtttctcgatcatctctcctacattagctagagctactcattcaacgatttcataatcatataagtatctctct

SEQ ID NO: 41828 - DNA, 601 bp, Zea mays
  Clone ID: MRT4577_138145C.1
atctacaagtcgttttagatctataaaaatagagaagtttggttagattactgtatatgcaacaaattcaatctatagagttctttctaaaacacgcaaccagctggatgctttcaatcacacaaacgaagacgttaacttccaccgatcgtatagctgctcgatcgatagatatattttagccaagctgcatgcacgcgacaggcaacaacagtccggtcacgtacaagacgtggaagctagtaaatccacccatattatcatcgtcgtcatagcacggacggaagagggaacatcactcctctggccgcacgacggccgcgccttcgcctgacgacctcctccggcctcctcgtctgccggatccttccttattactactcaccggcgccgcttcgtccccgttggcggtcgtcgtctccggcggtgcgatgtagacgaagggcccgacgaggcagtcgtcgagcgcgaggagcggctcgagcgcttcgacgacggcggacatgtgtgggcgggacttggggttgagggcgacgcactggtgcgccacggcggcggccttgtgcgcggcccggctggagtactggcccaccaggctggg

SEQ ID NO: 41829 - DNA, 542 bp, Zea mays
  Clone ID: MRT4577_138146C.1
gaatcacatacgaaagagcatagtctacttctgtcatggtaggcaagaaaaaaatgaacggtgcggtgcggcgcagactgtattgttggcacttcatgtcatgtcaactgaagagaatggcatgcccgtccgctcgccgagccgagccgtatgggatgcttccctcgacaccaaacgcgacgatactatgctgcacgctacgctatgctacacagacaagacaagacaatacccgctctgcttcagttctgttcggtactttaactgaaaggatctgctacgccacattaaatccagttgcgttagttgaggtcaggccactaagccaaaacacttatattacatggatgggccaagagaacaagactaactctcctgacgtgatgttctagtgatgcgagatacaagacatcccagccatgtatacttatatgagaaacaaataaacaagccgatgtaaccgaacagaacagaatgcggtgttatttaaatcacctgctctggcgataaaatgaaaagataatatatgtttgttgtgagcc

SEQ ID NO: 41830 - DNA, 250 bp, Zea mays
  Clone ID: MRT4577_138147C.1
ggggggggcgggggggggggggggggggggggcgcgtatcgcctcctatagggggtgttgggccccctcgaggccggccggagttgccagttgcgagtggctccaactatccaccggcaccaacccagggtggtgccaccggtgacccgtaccctctcccccgtagagcgatggcgacggtgctgacgtccgcgcagagtgccgcttacagagtaccgagccgtgcaatgccatctacgtctccgtccgg

SEQ ID NO: 41831 - DNA, 880 bp, Zea mays
  Clone ID: MRT4577_138148C.1
cggccgcccttttttttttttcactactcaaccattcttgaatcagcatacggatttctcctattctcatgaaagaaatcgttactggtgacttggaaagaagaagatatacgaacagtaaggtcatagaagtgttgtagaaattgtgccatcttctttgcattatcccaatcatcttcatcaggatgcccaggaccatctcttacttcagacaaatcaatgacataatttgtgtcatcttcaactaattttaaaaacactttctcataaacaattgcagccttcaacatcaaatatgtgtaattccaccttgttggcacatcaagtttcaaaaatgctttgtcgtccacattctcttcctgagcgatttctttgaacttgaccaatcttgaagtcccattttttatatatctaacagcagccctaacacgcttaatagattggtccacttcttgcaatccatctcttacaataagattcacaatgtgggctgcacacctcatatgcaagtacttgcccttggcaatgttggttttctgcagatgcttcctcaaataatcaacaccactgtcattcgcacttgcgttatccacggttatagtcattactctatccaaaccccaatcagctaagcatcttgtcaagttcttcccaatatcctcccccttgtgaccttttaccatgaaaaaacttatcactttcttgtgcaagttccagttttcaccaatgaaagttgctgtaacagtcatatatccatcttgaacctgagaagtccaagcatctgttgtcaggcacactctctgacaagaatctttgaacaacttcttgagcttggctttctctaacaaagtaatgacgtacaatatcccttgtgcaagtt

SEQ ID NO: 41832 - DNA, 198 bp, Zea mays
  Clone ID: MRT4577_138149C.1
gtttgtaaagtacaaataggagtgtaggtagtgatcagtagcaggtcagaagcaggattagtgctaccacaggcaggttcctaagcagataaagatgagtatcatagccatgtcctttgactccttgactagagcaattgtgagcttcagtgtttcgcctcattattgtcaagagaaaaaagtggccacctgttgctt

SEQ ID NO: 41833 - DNA, 320 bp, Zea mays
  Clone ID: MRT4577_13814C.1
gggaggaacagaggttttttattaggcaacagctcacacacatgtttggcattctacacgcagacgctccatatgacgattatactactattaaatagcaccagctatctatctatagccatggctggagtctgcactaacaagcaatcgagaccgatgatacagagatagactcatatggttagcaagatcatgactctgctttgaccactatgagacactaccattcaccaacgcatgtgcacagatcagtataatcatcgcatcgcctgcgtctgattatgatagatccgtgcagatgtgtcaggacagaacaccct

SEQ ID NO: 41834 - DNA, 600 bp, Zea mays
  Clone ID: MRT4577_138150C.1
ctcgaggccggccgggattgcctggtcaccttccacagcttcccggcacccatcaacagatttgcttctcacacttcaatctcacacgaccctttcccacctaccaaaaaccacttcatcttctcctctacatcatgtcttacgcagagatggctgccaagggccctaagcaaagccctgaagaagctcgtgcacccgcacccccacaagtcgaacacacccctgatgacagtgttcactcgctcgtcgacgtagatagcccccacatttcttccgtgccctctgactacgaatcacaatctatcaaaaccgacacacaagccgaacgcatacaacgcgaagaggaggtcaagaaggaagctgagaagctgaaagaacgggctgctgcaaagaaggagtctgctaaggagaaggccaagaagaacgctgataaccctgttgttatcggcaatgccgtaggcctcgccattgttggtggtattgtcggattcggcgcatacaggcaatatgcacgcggtgaactgactggcaaagtcgtcgctgcctgggccgctgcgattgggctgttcggtgttggtgactactacgtcagccagtatt

SEQ ID NO: 41835 - DNA, 932 bp, Zea mays
  Clone ID: MRT4577_138151C.1
tagctaaattatgcaaaattgttttcttccttttctcgtataatatacacacatgtatcgagaaaaagggcaggaattaactaaaaagttggcctatatacacacctatcattggagtcagacaatcctcactgaacctccgcaaatttgtaaaatattagactgctaaatcctgaagcacctccaaaactgtcagaaccttctccgcaaggccaatagaaggtggggagactttaggacaaaagtgctgacctaagcttacactggcgccctggaaagaaaactgagactctgccctcgaacactatggtagatgtatattagattcccattgaggacttggatttgatcattcactagacactgaaaccaagaatgttggacttagcaattaacatttgcaggctaattcttggtaagaaccccctttgccagttcggcactagtcaaagtcatcatctacaagaaatattccgggcaacaaaagtagcaatatgacttggtaaagaaacccgttttagcagtttggcgctggtgaaatttgtatcacccacatataatacttccatgcaaccaagagaaggcaatgtgaaccctttccattcacaactgattactctctaaacttgtttacttctacatccagattggaggaggtaccactttcatggttgatagactccaacgaatgacgaatcagttgcagcaatcccttgacattatgaaaactgaaatcaagtactttccttacaagagcaacttcatccacctgattcttcccaatgccagaaagataagctgaaaatgaagtttgtgattttctggttccctcaaatgaattatttgtgtcctctgcataagaaagcaatcccatcaaatgatgattgttccgagataggaattgctagcaattgaggagaggatcacctctc

SEQ ID NO: 41836 - DNA, 789 bp, Zea mays
  unsure (1)..(789): unsure at all n locations
  Clone ID: MRT4577_138152C.1
atccaagtcactcactcgcttcctttttactagacgcgctagctctctcaagctttcgtcccgatacatgcagtagtggccgcaggagaagcccccgtgcgttgtgtcctcgctcatcgccaaccaggcagagggcagaaaaaccctgaaaacagttgcgtatcagctgctcaccgatcattcttgcggttctggcagtacttcgcgccaatatcactgggtaattcaccgacccgtccgaagaagccagcagcttgtgcttgaagagagtagggattaattgatggggatcatcaactgggtgcagaatcgcctcaacaccaagcaggagaagaaacgatccgccgccgccgccgccgcgggcgcgagctcggttcgcaatgccccggtccgggagaagagctgccgcggccaggccgacgacgagctccccggagactggagcatgctctccatcgggactctcggcaacgagcccacgccggctccggcgccggcgccagatcaggcggtgccggacttcaccatcgaggaggtgaagaagctgcaggatgcgctgaacaagctactccggcgcgccaagtccaagtccagctcccgcggctccaccgccggcgccggcgacgaggagcagaacctgccgctcgacaggttcctcaactgccctcccagcctcgaggtcgaccggcggctctcgctcaggctgcangggcgccgacggcgggannaaacgggaagttctcgccggacacgcagatcatactcagcaagggcagggagctcctcgtc

SEQ ID NO: 41837 - DNA, 308 bp, Zea mays
  Clone ID: MRT4577_138153C.1
ccttagcgagaaaaaaaaccgaagaacaaaactaaaaaaaaaaaaaaaaaaaaaaaaaaaaaaaaaaaaaaaaaaattaaaaaaaaaaataaaatataaaataaaaatctttttcttgggtcgggcccccccttggggccatttctgggggtttccgcccccctggggggggttcaagcctccttttagggggcccatttccccctttatggccgcgttttccaatccccgggccggggtttaacaacggctctcctgggaaaaccccggctgtccccaacttcagggccgtgggcacactccccctt

SEQ ID NO: 41838 - DNA, 780 bp, Zea mays
  unsure (1)..(780): unsure at all n locations
  Clone ID: MRT4577_138154C.1
acccttcctcaatttttcctcgtcgtctccctggaacccgctcgatatctgctttcccctttgccgttcgtgcgactcgtgagagcagctaacccaagagcgatggacgccatggagttgtcctggggcgcgcggtgcgccgggctggccttcttcgtcctgtccgtcctcgtggtggcgctcgccgcggtgctcctgctcgtgcgccggtggccgtggtgcagttgccatgtctgccggacgtacctcacgggctcctgggccaaggacttcaccaacctcggcgactggtacgcgcacctgctgcgcgagtcgcccacgggcaccgtccacatccacgtcctcggctgcaccgtcaccgccaacccggccaacgtcgagtacatgctcaagaccaacttcgaaaacttccccaagggcaagcgcttctccgcgctcctcggcgacctcctcggcggcggcatcttcaacgtcgacggcgacgcgtggcgccaccagcgcaagatggccagcctcgagctcggcagcgtcaccgtgcgctcctacgcctacaagatcgtcgcccatgaggtagagacccgcctcctgcccgtcctcgccgacgcagccgacaangggcaaggtggtcgacctccaggacgtgttccgccgcttcgccttcgacaccatctgcaagatctccttcggcttggacccgggctgcctcgacctcgacatgcccatgtcggacctggcgaacgcgttcgacaccgcctcgcgcctctccgccatgcggggcgc

SEQ ID NO: 41839 - DNA, 672 bp, Zea mays
  unsure (1)..(672): unsure at all n locations
  Clone ID: MRT4577_138155C.1
ggccggccgggttgaatattctggaacanaaaaaaaaaaaaaaaaaaaaaaaaaaaaaaaaaaaaaaaaaaaaaaaaaaaaaaaaaaaaaaaaaaaaaaaaaaaaaaaaaaaaaaaaaaaaaaaaaaaaaaattactttcctccccaattcgccgttggccttcggggcctccttttcggcctctgtcccttgaaagttcaatctcccctccaaccatgggaaaaaaaaagccccacatcaactttggggttattggccatgtcaactctggaaagtcaacccccacaggaccccttatctacaagtttggaggctttgacaagggggggatcaaaaggttcaaaaaggaggttgttgaaatgaacaaggggcccttcaagaacgcgggggggctcaacaagctcaaggttgagggggaaaaaggtatcccctttgatatcgctctggggaagtttgaaaccaccaagtactactgcacggtctttgatgcccctggacaccgggacttcttcaaaaacatgatcactggaaccccccaggttgacggggctgcccttatcattgactccaccactgggggttttgaggctggaatccccaaggatggccaaacccgggaacatgctctccttgcgttcacccttggagggaaccaaatgatttgctgctgc

SEQ ID NO: 41840 - DNA, 437 bp, Zea mays
  unsure (1)..(437): unsure at all n locations
  Clone ID: MRT4577_138156C.1
ctcgaggccggccgggacaagtttcagaggggaaaggtgtatataacaccgggcgccgccgcttccgtcctcttcctctcgctccgttgctcgcctcgggtcaaaccctaagcagggagttgatttatccgctgcaggcatgagtaagttgcagtctgagtctgtcaaggatgccatctcccagattgttgggtatggcaaggagaacaataggaagttcgctgtgactgtggaacttcacattgagcggcagaattatgatgcacagaaagacaaagactgctgcaatgctgtattttgtgcttatgaccctcataccactattggntacgggaggtggtgctttcctgatcattttgacgaggccccactgcttatgggtgttacaagatgcatgtgcttcggtgcacccttgcaccaantggaancagagcatg

SEQ ID NO: 41841 - DNA, 314 bp, Zea mays
  Clone ID: MRT4577_138157C.1
taagcggcgcacaggccgcgcaggacgcacccagggcttgggcgcgctgtcagcacatgtcgcagcagcactaactggaagaagaggaacatcccctaatggccaggactacgccgggccgatcctgaaggactgagcatggtcatgcaccagcacgcagtcgctggacgtgggtatgagaaactgacgccccctatgtggccgacgaacgcagttatcgcgcagctcgcgcacaccaacatatagacttacactgcgaggttgaacacctgcaggggtccggcctcgttactattcctaaacatggtcataga

SEQ ID NO: 41842 - DNA, 294 bp, Zea mays
  Clone ID: MRT4577_138158C.1
tcttattattttagttatacttatggtgatcataggtaaaactaaaataataagatctgaactaaggtttggtcaaagttgaagagttcaaatcttattattttagttttacctatgatcttcataagtatagttattggctggtggcagggagcttagctttctgtgtaccaactgctctcattcaatcttttacatctgaggtgatatccatgtactgtgcaccattgtaattcgtattttaagattctgtagccttcaaagtgcttaacattggatagctctcctacttaa

SEQ ID NO: 41843 - DNA, 509 bp, Zea mays
  unsure (1)..(509): unsure at all n locations
  Clone ID: MRT4577_138159C.1
gggggggggggggggggtgtttgttggnggggcaccctcctgggggccggggccctccccgggggggttttttttttttctgttttttttttagcacacagttgcatgttacttaattagtgcaggctgcctaaccatgacacagattgtcccgaggaacagcccgtcctacctgctactgaggcattcgttcctctctacgccgctcagcttatgactcagagtacatcggagggggacctgccccagattatatattatagatcactcggacgcgcgagtgatacgcagatccgtacgtacgctgaatcgtattaggaggggggggatagccctacagggtgcctggccccatcagcatggatcggggcgcagctgccggccaaggctgtgccagtcccatccagcacctgctcttgggttccgcctggggtcagcccgcccctccaggggcaccttgtggcctcttgctggggcccgctggtgagtcatgccccggtcccccgggg

SEQ ID NO: 41844 - DNA, 406 bp, Zea mays
  Clone ID: MRT4577_13815C.1
ggggaaaaacaaaaaccctttagagctgttcagttcgtagcaaacaaaaaggttcagacctccgggccatattttttttccttaaggccttggtggggtaaccccctcccccctgaatggggtgagatgggaaaaaatttaaaaagaggtggccttattggggatttaaacccccccaaaccccctcaaatcatgggggttgggagcataccgaaccaggcccaaaggggaaaggcgggtttttcggacccccgggcttaacccaaaataaaaaagggtttttgaactaaaactgggaataaactaatccggcccgtccctccaaaaaaagggaaaattttgggggccaattgtttctttcccaaaaaaagcaccccccccccctctttaaaacaaaatatccagt

SEQ ID NO: 41845 - DNA, 1556 bp, Zea mays
  unsure (1)..(1556): unsure at all n locations
  Clone ID: MRT4577_138160C.1
ctcgaggcggccggnngaccgtacgtctttggtgatgaagcatcgatccgggagaaggttcagcattagctctagctagagctagatagccggaggaggagctagtaggaagaggcatggataatcatcaacttgtcgccatggcagcggtggctcagccggcgagcccgacctcgccgcacgtcgcgcacaagatcccgcccggcgacgggccttacgcgagggccaagcacttccagctggtggagaaggacctggacgcgtcgatcgcgtggttctggaaggcgatcagcgcgggcgacaagttggacagcgcgctcaaggacatggcggtggtgatgaagcagcgcgggtacctggcggaggccatcgacgccatcaggtcgctgcggcacctgtgcccgaagcagtcccaggagccgctggacaacatcctcctggacctctacaaggccagcgggcggaccaaggaggagatcgagctgctcaagcagaagctccgcaagatctacctcggcgaggcgttccatggcaggaccaccaagcgcgcccgctcgcacggccgcaagatccacgtctccgtcaagcaagagacatcgcgcgtcctgggcaacctcgcgtgggcgtacatgcagcagcgcaacttcatggcggcggaggtggtgtaccggaaggcgcagatgcgagaccggcacggcaacaaggcgtgcaacctcgccctctgcctcatcgagcaggcccggctcgccgacgccgagctcgtcctcgccgacgtgctcgccgggaggtacctgcaggcccgcgaccagcaggacggcaagatcgtccggaaagtggaggagctgctggcccggatcatggcgcatacgacgtggccgggcggtggcggcggtgacggacgacgacgcccggcggataagagcgggagcgggagcgagagcgacgacgatgactgggtcgagaaccagatgctggctttgctcgacgtggcggtgccgtaccggaagaagagcaggaggctgccggtctttgaggagatctcgcgagcagaatagcagatggctgatatagattagcagcagcatcatcatctttcgatcgagctccatgcatatatcgtttgagcgagcgcggatcctctggacctaactgcagtctgcagataggtaggtaggtaggtctgagctgatccagacccacatgtcagtgaccggacgcagaggatctgcttccattattatttgatcgactcctgtccagctcaaccttttggaccaactccgtggcgatagcagtagcagcagcagaaaggtaaagcgcgcgtgtgtgtgtgtgcccctgtgaatctgtggatcggagacagtgtgcagtagcatagcatcagcagcaaggtatttaaagcgtgcaagtgtgtgtataactgtatatacgcttcttatatgcatctgtggatattttgcatggatcggacgcatgtcgcagtcgtgtagtacgtgcgtttgtaaagctattttcaccagtatactcatctctatgctcatattcaaattttcact

SEQ ID NO: 41846 - DNA, 101 bp, Zea mays
  Clone ID: MRT4577_138161C.1
gtacttggttcatgccgatatcgaagtggtcagcaaggaccatgatcgtaagctgtatctgcgggaatccacagctgatggatctttgccatctctgacga

SEQ ID NO: 41847 - DNA, 689 bp, Zea mays
  Clone ID: MRT4577_138162C.1
cgtgatcttaatttattcgaacaattaagctggtggagaaggacctggacgcgtcgatcgcgtggttctgcggcacctgtgcccgaagcagtcgcaggagtcgctggacaacatcctcctcgacctctacaaggccagcgggcggaccaaggaggagatcgagctgctcaagcagaagctccgcaagatctaccttggcgaggcgttccatggcaagaccaccaagcgcgcccgctcgcacggccgcaagatccacgtctccatcaagcaagagacctcgcgcgtcctgggcaacctcgcgtgggcgtacatgcagcagcgcaacttcatggcggcggaggtggtgtaccggaaggcgcagatgatcgacccggacgccaacaaggcgtgcaacctcgcgctctgcctcatcgagcaggcccggctcgccgacgcccagctcgtcctcaccgacgtgctcgctgggaggtaccaggcgcgcgaccagcaggacggcaagatcgtccggaaagtggaggagctgctggcccggatcatggcgcagacgtggcagggcggcggcggcgtcggtcgacgacgccgggacgagagcgacgacgacgacgacgactgggttgagaaccagatgctggctctgctggacgtggcggtgccgtaccggaagaccagcaggaggctgcccgtcttcg

SEQ ID NO: 41848 - DNA, 520 bp, Zea mays
  Clone ID: MRT4577_138163C.1
aaaaaagggggccccccctttttttaaaaagttttaaaaaacatcaggggccggggggattaccgaaaaaaaccaaaaaaaaaaaaaccccccccgggccattttaacaacccccccaaaaaactttttttttgggggcaaaaaaaaaaagaaaggggccccccacaaaaaggggccaacccgaaagggaaagggggggggggggcccccaaatccccaacctaaataatattccccggggccaaagggtatacccccggccccggccccggaaagtcaagggacacagggccgggggaaaaatggaagggaaaccccctttcggcggggccaaaagggccccccccgggtccccgggggaagaaggggccaaaccgcccgcccccgaaaacccggagagccggggctttgcccccaaaattgttaaaaacggggcacccctaaaggggcccccgggggtaaaatatgtcaaaaaccccgaggggcgaaaaaaaaaccccggggagaggggggggggggg

SEQ ID NO: 41849 - DNA, 148 bp, Zea mays
  Clone ID: MRT4577_138164C.1
cgaagaatgggcctttctgccataattcttcactagtcaagaatgccagcagtttctttgtataaagagacctgcctttaaaatcatacattctgaacattttagtcaagctacaacaggtttggaaaacctctgtgggggaggggcg

SEQ ID NO: 41850 - DNA, 413 bp, Zea mays
  unsure (1)..(413): unsure at all n locations
  Clone ID: MRT4577_138165C.1
caggcgggaagaggacggcagcgccaccaacaggacaccagggggggaacacgacagacgaggaccagcccagagagacaacaggcacaaaaaacacaggagagccgcaaggccaacaaggagaaccccccggagaagagcagcagagagngccaggaacagggggggggagccgcgagcagacggccccgccgcacaaccagaagccagacagagaacacacggccaggccaagcgcagcagaggccaagcgagaggaggaaaaagcaaaaggagacagngccgacgaggcagccgaaaaacaagagaaagcgcngcgcgacgaaaaggaagaagacgaggaagaggaaagcgaggaggaggaagaaggcgccggccgagagccacaagggaggggaggaagaggagagggg

SEQ ID NO: 41851 - DNA, 515 bp, Zea mays
  Clone ID: MRT4577_138166C.1
ggaaaagaagggatcaaaaatttttggcccctgggaacaaattgaaaacttgggccccatttttttggggggcaaagaaaagaattttttttggttgttggttaacgggaatatgaatttttaaacccggaaaatggggaaaaccctttttgaaaaaatttttttaggggcccaaaccaaccttttaaagcaaacgaccccaggggcaaaagccaaaaaaaacggccttgaaaggggggggcaggttaactttaatggcccgataaaaacggttaaacccccctgcccgatggggggaaatggggggaacaaaagcccggcccgggcttcccaaaaagggacttaccctggggcacactaatggggtgcaggggttgggtcggcgtttttttccggttaacctctttaaacaccgacctgacagccgggaacctgccaaggccgttaaaaccggccccggcctcggcttgggccgtggccaaaaccttgcccttccctttgcctgccttgacctt

SEQ ID NO: 41852 - DNA, 447 bp, Zea mays
  Clone ID: MRT4577_138167C.1
tggggagggaagacggatagatttcacatataccccgcccgcggccagcactagcagtaagccagcaacagcaagaatcatcgctgcgctgtttccttcctcggtccccctccctcgtgctcgcctctctctcccacctctctcgccgccgtggccttttgcgctcggcggacagcacaaaagttacccttttttctcctgtgctttttttttttgcttcgccaaacggcggaacgagcaggcagctctgccccagggcattgtccccttcgtcttcgcaaaggagtacaacgtgcaccctgacattctcagcaccgcgtaagttccccgtgtcggaagacacgagcacaccaagatctgttcaaagattctctcagtcgccgctcgctgacaccacaagcgcctgttgctaaccctcccttttcctgcttgcagagtcatttttgg

SEQ ID NO: 41853 - DNA, 806 bp, Zea mays
  Clone ID: MRT4577_138168C.1
cattgggtacctcgaggccggccgggctcgctccctgcctccctcagttccgctcttcgtctttggggggcattgcccgtgcgtcacccgagcccgtgcccggaatccttgtagaagcgtctggaggactcccaccgacccacccggctgccagccatggctgagaatctggcgcccgagaagcgccactccttcgtgcacaacgggcagaaggtgttcgagtgggaccagacgctggaggaggtcaacatgtacatcgagctcccgaagggtgtgccaaccaagctatttcactgcaacatccaggctagccacgtcgaggtcggcatccgcggcaacccgccatacctcaaccatgacctgacacacccagtgaagactgactcgtcgttctggacaatagaagacggtgagatgcatataacactgcaaaaaagagagaaggggaaaacatggtcatctccaatacaagggcaagggattttggatccatatgctgcagatcaagagcaaaagcggcttatgctccaaaggtttcaggaagagaaccctgggttcgacttttcacaggctcagttcagtggaacctgccctgacccaagaaccttcatgggagggatacgctccgagtgaagcaccatacctgcctatgtacgtttctactatatccttggcatcttgatagatgcagcaggcgtgcttattatgtctgtaaatcggttggtgtctgttatagagataattgtcatggaaataattgtgatgtgtgaccatttgtgtgcagcacattttgcgtgcttaatcgt

SEQ ID NO: 41854 - DNA, 305 bp, Zea mays
  Clone ID: MRT4577_138169C.1
taggttattccccacataaatactaccaagtatattatgctcatgtgggtgttcacatacacataaacatccaacaaaaaaaccatgtcaacaattgcttaaacatacaaacataactcctttattaaacatcctaattattaccaagactttttataaagctttgtgacaccaattgaccataccactaaactttttgtttactcatgttacattgcttccaactttatcctataacaatctcattaagaattaccacttttttgctcttttaaaacatatttaattaactcactcgacatttt

SEQ ID NO: 41855 - DNA, 171 bp, Zea mays
  Clone ID: MRT4577_13816C.1
gcgctcgaggccggccttgcctgatctgaggagatcgccatggacttcctctcgtctagccgacgtaaccgacccttcgttcgccgaaccagcgtcaggccgcgccgtgcatcaaaggaggtacttgcaccgagagcgacacatgtccgaaaggtcaccgggagcggcggc

SEQ ID NO: 41856 - DNA, 1243 bp, Zea mays
  Clone ID: MRT4577_138170C.1
ctcgaggccggccgggccgcccgggtcgcagcaaccgtcctcgctccctgcctccctcagttccgctcttcgtctttgggggccattgcccgtgcggccgtgcgtcacccgagcccgtgcccggaatctttgtagaagcgtctggaggactcccacccggctgccagccatggctgagaatctggcgcccgagaagcgccactccttcgtgcacaacgggcagaaggtgttcgagtgggaccagacgctggaggaggtcaacatgtacatcgagctcccgaagggtgtgccaaccaagctatttcactgcagcatccaggctagccacgtcgaggtcggcatccgcggcaacccgccatacctcaaccatgacctgacacacccagtgaagactgactcgtcgttctggacaatagaagacggtgagatgcatataacactgcaaaaaagagagaaggggaaaacatggtcatctccaatacaagggcaagggattttggatccatatgctgcagatcaagagcaaaagcggcttatgctccaaaggtttcaggaagagaaccctgggttcgacttttcacaggctcagttcagtggaacctgccctgacccaagaaccttcatgggagggatacgctccgagtgaagcaccctacctgcctatgtacgtttctactatatcctcggcatcttgatagatgcagcaggcgtgcttattatgtctgtaaatcggttggtgtctgttatggacatggaaataattgtgatgtgtgaccatttgtgtgcaagcacattttgcgtgcttaattctagtttatagttgtgatcttcattcaggagctgtttgtttcagcgttttcacccggtgggtaaatgggtaacatttagtgcatgtttgggaacacactattttcctagtttcccatcaaaggctccctcgatcagtacgacccggacaaggtcgcgcctttcaacccggaccagaaggacgcgtcagagctgtggacggagagcaaggacgtgggcaagggcttccgctgcatccgcatggtcaacaacacccgcctcaacttcgacgccttccacggcgacaaggaccacggcggggtgcacgacggcaccgccgtcgtgctctgggagtggtgcaagggcgacaaccagagctggaagatcctgccgtggggtccagaggccaactcctccgcggcccacgcggaaggcccgcacgccgtgcgcgtcttct

SEQ ID NO: 41857 - DNA, 126 bp, Zea mays
  Clone ID: MRT4577_138171C.1
acttagaggaaattttttcaagcggaaacccaagggacaacgacaaagttgtgacagcacaaatttcggcataaatggatatgaagctatcaacaccagttgttttcccacaaatgcccaaagaag

SEQ ID NO: 41858 - DNA, 439 bp, Zea mays
  Clone ID: MRT4577_138172C.1
tttgcaggctggacctactgctactacgagtgggtccacatactatgcagtctgtcagggagcttgacgtggcgcccaccgggatgatggccacgagggggagggacgtctgccggtctcagggatgcaaggacatcgacaggctccaggtcaagggccgcagctccagcagcctcagaaacatcggccacggaggatggatccagtgcatgcacgagtggccggtctacagtaacaagaagatcgagacgctggataccctgccgccgctggcgacggacgacctgttgaagcatgtggactacctgctgcgcaacggctggataccctgcctggagttcagcaagcttggtgtcgtgtaccgcaagaactccaccttagcgtgctactaccacagacgattctggaccatgtggaagctgcccatgggcggctgcac

SEQ ID NO: 41859 - DNA, 369 bp, Zea mays
  unsure (1)..(369): unsure at all n locations
  Clone ID: MRT4577_138173C.1
ctctttttcaaccgcccttggggggggggggggttaaaaaaaattttttggtgggttttttttttaaaaaaggggcttttttacctggccctttccctgtgattcccgtgttgtttttttccctccctaaaattaatatttttctttttncncaaccccacccttttggtttgtttggggggacaaccccaanaaccctttttcctanncccccaacctgacaaatcccccccccccccccccttccattattaccttnaactcctccaaaaaaacaaagccctccccctttcnttcnaccccctttatcattcctccncacttnnccaccttnncnnactccccnnaacccctcattaccccccccaa

SEQ ID NO: 41860 - DNA, 117 bp, Zea mays
  Clone ID: MRT4577_138174C.1
gcggccagtaatgattgggatgatgacttcaagatggagggcgcacgcttgctatgcccaccctcattccatagtccaaaaaagacataaaattcggggcctaaaaaaaccccaaaa

SEQ ID NO: 41861 - DNA, 275 bp, Zea mays
  Clone ID: MRT4577_138177C.1
tatatataaatatattttaaaaaataataaaacaaaaaaaaaaaaacaaaaaaataaaaaatggcgttggagctaacattaaagagggtaaggtactatttacatcctacatcacaaattttgagatgatcgcacaccaattcaataatctatgcatattgatacaacgttttatccacaaataaacttaactattcccaacattattctctcactcttcatcaacatttcaactttttatatattatctatgagtcatcaaacctttctccctt

SEQ ID NO: 41862 - DNA, 364 bp, Zea mays
  Clone ID: MRT4577_138179C.1
gcattcattctctgattaggcgacacacaaaggatgttcagggtccaccaacgtacacaagacaagcggggctcacgaccatcacctgtaatttttttactcagggcttacattgaacacagctcactgacaggcctacaactttcgctgacataatatgctcacttatatccacactctgctccatactatagtaaccgcaaaacatacacagctacaaactgtgagttccacgcgtctaacattgactgggttcttgatcaatcgccacacagttcactgacacgatcaatctgaagatcttgaatcagttaccacctctttcgttccattcgtaaaccacctggagcttgcgcataaataa

SEQ ID NO: 41863 - DNA, 208 bp, Zea mays
  unsure (1)..(208): unsure at all n locations
  Clone ID: MRT4577_13817C.1
gtcaagaatggtcgggcccatgagagttggtgtattaatatatccggtggtcgtccctgaggacggactactggtggctgtgcacggtcgtttcatttttggcaaccaattgtataggtcaattctatgatccnggtaaatgacaagactggacagcataacacgaaaagtgatgtctacagctaaagaattgtgctgctggagcttt

SEQ ID NO: 41864 - DNA, 202 bp, Zea mays
  unsure (1)..(202): unsure at all n locations
  Clone ID: MRT4577_138180C.1
ggcgaacgggtgagtaacangtgagtcacctgccctngcactctcggataagcctgggaaactgggtctaataccggatatgacttctcatcgcatggtggggggtggaaagcntttgtggttttggatggactcgnggcctatcancttgttggtggggtaatggcctaccaangcgacgacgggtagccggcctgagagg

SEQ ID NO: 41865 - DNA, 105 bp, Zea mays
  Clone ID: MRT4577_138181C.1
ctcagttcggcttgagcggaagtgtgcaagacgacgaggtccgcttacagctacacctgttttcagtgcgacctcagctttcaccaagacgccgtgcaggccgtc

SEQ ID NO: 41866 - DNA, 640 bp, Zea mays
  unsure (1)..(640): unsure at all n locations
  Clone ID: MRT4577_138182C.1
ccggccgggaccgagttctttggagccgcacctggagtaggtttcgacgcacacacatatacccacacacccaccgatgtatacctatcatactgacttataagtgtgttggcttcctctacaactcatagtacagggcgcgccggcggcgccggcgtgctgctgagggctgttgccaccctgtgcgtatgcggcgccatggccaaaccagaccggggactactacgacatggcacgccctgatgctgacagcactgcaaatgatgagactgaacgatgctgcacaagcctcgacggcgcgcatntacatcagtcttacccgtactccacttaaccaattgcttcccacaggctgcggtagatcaccgctaatttacttacggaccgtgcttcgaccatgcactgagatgctgctgccggccactacaacctgggatacctgttcgcggcggcgtgacgacggtcagcaagctatgaacgacgcactgtcgcggcgatgcttttctgtgaatgacataacagccgcttgtcattacatagtatacccagacctgtccgtaccgaccgagcgcgcaaggtgttcctagatgctagactaatgaagggcctgttccataatgataagaagctgctgtaccca

SEQ ID NO: 41867 - DNA, 497 bp, Zea mays
  Clone ID: MRT4577_138183C.1
ggcagccacaagatccagggaatagggccgggattcataccggaagtgctggacacctcggtcatcgacgaggccgtcacggtgaccaccgaggaggcgatggcgggcgcccggaggctggccagggaggagggcctgctcgtcggcagagttttcgtgaaaaatctgtggatgtttatctaggtcgcggcgcgagaagagagcaaggggaagatgattgtcaccgtgtttccgagcgggggcgagaggtacatgacctccgacctgttcgccgccgccagagaggagtgtattgccatgacgttttgatctttttttaccccctccccccagaaaaaaggggaaaacaaatacgcgtgtatctttatcttcacatggtattggtttaccatgcatgtacatttaaaaatatttttccccgaaacggaatagaacagctgcgtgcttgtttacacatcaaaaaaaaaaatttcttgtttatattttttataaaattt

SEQ ID NO: 41868 - DNA, 661 bp, Zea mays
  Clone ID: MRT4577_138184C.1
ccgggtccgagctcgaattccgttgctgtcgaagaaatcgccatagttcctttctgcgtatttccattcccccttgtgtggtctccctgtgaggtgagctagacgtttgcctagatctagcacagagcttgctgtatgtgtactgtgtagtatgtgctcaaccggcctttcaatcttgtgagtcgtcgtgactcgtgagatcgagcgcaagggagaggggagagctgagcttctttggccatggtggtggtcctgctctcttttcttgctgtatttatgcactttcctttctttatctttaaattatagcttatatctccactaaaattctaaaatttatttttaaagttctttaaatttttagagctctaaaatttgacgcttcctgccttagacgctgctgaagctccatgcgcttcctgcctctttgtcagccttgctggttacacagaagacgcatttggcttgttggtgctgctcctcgtgcgagagaaggagccagtagtgccaccactgtccagcagcttgaggacttcaaggtcggtggctagtgcagcccccgcccaaagcttagctgacttctgcaaggattcctcctcttcagctgcacacggtctcctgaatattctacctaacatgttgtttctctaaggctactatg

SEQ ID NO: 41869 - DNA, 546 bp, Zea mays
  Clone ID: MRT4577_138185C.1
tttttttttttttttttttggcccaaacggtctaaccatttctaaaactcgtctgtatatacattacagtccaataattcagctgaaacatagattacatacgcagctatcttgtgcatgcatgcatgcgcacaacctgcaggtgcctagcactagatggcgccaatgacgggcggcggctttcatatctagcaaccaacccattgcaagagaagatctatacacaacagctgcggctcaattcggaaatcctcgatctacgtatgtagcactaggttactagctagctagtatatgaacactgaccatgcgcgtgcatatatgaatcaagcatacgacgatacgattatctacatgcatatgcaaatacaattatcgtacgtgcccctatatttttacccctgttaactacatgcccatgtgaaccgtgcatatatacatagtaaagcagctgttaattttgttttctgaagggcatgtcatgaactgtgcatgcaggctaaattattttatgcagggctcaatttgtagatatagagacgatgc

SEQ ID NO: 41870 - DNA, 736 bp, Zea mays
  unsure (1)..(736): unsure at all n locations
  Clone ID: MRT4577_138186C.1
gttttacataaccctccattcccctctcctcgcctgccctcgactgcgtcctcctctgccttcctctcttacgcagatcttttcccccatcatgttctcttcacgcggcgaaggtgttgtcgctggagtcggttctcctccggcggaatttctcggagcagtgctccgacctgaaaaaggagagaccactgcgcgacagaagagactccttccagagaccgaacctcatcttcgccccctcctcgaagttcaccgacgagtacgatgatcacaagatggatctgtcatcctttacgccttcggtccgattgaaggttgtattctatgtccatcctgagggattgctgctatttgtgctccgtatccgtgctatctatgtcatgtcccctatgatccagatattattgctacttctgcgtttgaggataatcttctatgatgtgtttctgaaaggcatctaggttaccattaatatgcttcgcagggtggagccttatgtatgcatatgtgtaccccaacttgaagagtgtcatgcaagttgatctacattacgggctcnggaaaactgaactccctgaggatccctctgtctaactacaagtcatcttagagggcttgattaagcacacatcatctgcatttgaggatcttgttcacgagatcatgactgttgcgctcacttcaggaggagacaacttcctttggcatttagctgaacgaacgctgttaggtctga

SEQ ID NO: 41871 - DNA, 504 bp, Zea mays
  Clone ID: MRT4577_138187C.1
gccgccaaggggcctccccctaaaacacaaaatgggaagcttaacttacactggggggggttttgaaacggcttaacttaccctggggggggcccaaaactagcacaggctgcagcaaaagcatttgcaaggccagaaacacaatccttgggggaggcgacaaacttggacttgaagggtttttttgcaaaaaaagctaatgaggaaagggtcatgttgtttttaaaaaatccctttccctggagcactttgatgacacaaaaccggggcactagccgtttttccaaactgaatgcgaacaggaaaggcctttgcaaaaaaaactgggggtttatccccccctcattgaccaagaactcgattttgggaaaaaaaatccccccaaacaatgctagtttttgggggattttggacactggttttgaaacctcaaactcaaaacaaccaaaagtcctcttaaaaaaacaagtttggcagcaacctttttagggggaaaactgggga

SEQ ID NO: 41872 - DNA, 1130 bp, Zea mays
  Clone ID: MRT4577_138188C.1
tttggggtttttttttttcttacagggcagtgcaagtttttttttcccctttttacctgaaacaatggttacagattatgcataaacggaaacacacagcaagcgcgcattttcgtttggacagcagatttaacacattctgtgtacctaatccattttcaagcagctaaagtagcttcaaactttggggcctttcaacaccaaggcctccctccctctaaatgcaaacagggagctacaactctatcctcgattacacgtggacatggacaacaaaatccagttctccaatcaccctgaggtcaatcaaagcaacaaaactagctagctagctagatctatctttcaccagcaccatctgttcctcttgagctgtagaactgaaacaacgggactatacccctaaaagtatctccacccttttgctttcattttttttcccttacatttttccttctctcgtttttcatctctttttacttctgccttctctcttgtcgcaagaaagcacaggctgcgttgcagtggtggtgcttaatggcaactggagaaaagggaagaaaaaaaacaggatgtacatcatggcgtatgcttctgccaaagaactcggcgccattacatgatgtcccattcgtgtcgggagcacaccactcatcattatcctgctgcctctcatacacacggaatcgacatcaactggacagtggcgggaagtcaccactgtccttgagacggtatggctgaacattcctcattccattggaacccattccagtaattttggccacagacatggggctcacaggcccagaagcttgattgttggagacagaacctgatctgttggcatggtctttagaggcaacttccgaaggcaatgcccccaaggtcccaaactcaagtttactgtcttgcgggagcataaaaccattgccatgaaaattatcctttcggacatgggaagatggggaatgcattggtacattcaaaggatcccttgaagactgggaagatggggatgatattggtatattcattggagatgggattccatgaccatttgcattaggagcatatgtctgcagtggcagctcatgccgcaattcctccaaaggtatcatatctacggc

SEQ ID NO: 41873 - DNA, 1437 bp, Zea mays
  Clone ID: MRT4577_138189C.1
cccccctcgagttttttttttcctttttttttttttttttttcgcacaaactttctttctcacttttacttccattctgtctgtagatagaggtgtcaaactgtcaactacatccacgcaactaggtcaatacaatcatgtactagtagtattgtagtagtattctgcagcgacctgtctctgcagactgcggacatactaggagacccataccgagacacccacgcatacacacacacctttatgactctctatcctggcttgggatcttgcactagtagcagttaaaatagcttacagacaactgccatggtcatgtgcacttctacagtcactgggcctccctagtggcctagtagtatacaatatctgatgaatctcgcagcaggctgtagctgtactgctctttacatgtgacatgtggctggtaccagaatcgtggattaacctcgcatttagtataataaacctagtgggggtggggtgggttggggggcctgtcattgtagagtacatcaaggacagtgtcacagtaacatctttgtgctcatgttacctgcctgctactggtaaacattaagtacagatactatttatatatctctctctaaagactagggtgacactggattatttgtatatataatatatatatacttatatctggcaatactgcatatgctgccgttttcttaatcaaggctaatggcatcttcttctcttgtggtttagtagaactatcctctaaaaaaggtactagaacataagggagctaacactatgctgacactcgactcctttttttttccctatatattccaccatcgcttttcttggcttctagtattctatgattaggttggggggtataactcgcctacaatggtgaactttagatccccagggctccgtgatcggaggacagcctgtgcatggggaagaagtaggagctgggcgaagggatttccaacgcgggggggcggagatggttgcttccaccgtcgatcttgctcccgacaccggcatccacgccaacacgggacgcggcggtgctctcggtctccgtggcagtgaaactgtcatgcaaaagcgcagcagatttcgtaggggatgcgaatgggctgtccggcaaattgtgctctccgccgctttggtcgctctcagcggtgtctgggctcgcctcgcgagcagattcctccttatcaccaccgttgaccttcccctccagagcaaatccgctcctcagcttgagcagctgctgccctgtcaacggccaaggaatcacagtgatcagtaacatttgaaacaatttggtttttactcaactacgcaagtgaccaacgtgctcccctgcgacgcctaccggactctggcggcgatggcgactcgactgcggtggtgctcacaggttggctggacgcgaaggcaacagaacgc

SEQ ID NO: 41874 - DNA, 189 bp, Zea mays
  Clone ID: MRT4577_13818C.1
acgtgcgtccaactgtcaccagtgttagtggaggccatggctcccgtgagggactcatcatgtcaagacctcaggtactccaagcccagcgttctgctcaatgactcttgccctcacgtacacaaagagagtcaacttgggttgagtctttcaatgctgctctgagacataatttcagagtgtcttaca

SEQ ID NO: 41875 - DNA, 371 bp, Zea mays
  Clone ID: MRT4577_138190C.1
aaaacttcaatctataaaacaatagggtgcgatacaaaaacactggtttacacaatcagataaaaaacagggttttacacaggcatataggcatatacatgatctgggggccatagcctaaactttaagcacttacacaaacatgccccaccagtaagttccataacccggccaaattttactgggggacccatacccgaaaaccgaaaatttttttcgggggtcataacaattacccgaccccaaaatggatgaaaacttgggaaaccgcttgtgttgcggggggcttactaatcaatttacaattttcttaatttacgactactttttttttttccaaactcggattacgcttaacaatggggggcccc

SEQ ID NO: 41876 - DNA, 471 bp, Zea mays
  Clone ID: MRT4577_138191C.1
ttgggtacctcgaggccggccgggtagtttatcagaaggtgctaaaaaagggagagctcatggttttccccaagggttgttgcacttccaattgctgttggtaagagaaaggcacttgcttttcctgtcttcagcagtgcttttcctggccttcaaatccttgactctgcactctttgccagcaatttctccactcctttggtgacacagaccactttccttgaccctgccatagtgaagaagcttaagggtgttcttgggggaagtggctagagtactacttatttgtgttcatggatagttttttattattttgctcaatttattattattccttgtgtttgtttcaattcgttagacttgtgcaggtctcatggtcattgaattattatgctcgtgtcaatgtagagcaattaataaatttgcatgctttatttgtcttccagcaaaaaaaaaaaaaaaaaagcggcc

SEQ ID NO: 41877 - DNA, 169 bp, Zea mays
  Clone ID: MRT4577_138192C.1
cgtgcgtgtgaaatcacaagcacaccacgcgtagcgcactagcagcgtcctagcaactgtgggtagcaagatattagccttgcttgcgcttctagccctagcactgatgcgcaccaaatgctttcatgcttctatagtgctcactcgatcctagtgccatatattccac

SEQ ID NO: 41878 - DNA, 610 bp, Zea mays
  unsure (1)..(610): unsure at all n locations
  Clone ID: MRT4577_138193C.1
cctagnactagagcttgacgcgcacctaattttgcgcgccaaatgctcgaacaccttcgcgccatagctacccgctggcattggcaatatccgaacgaaagggctcccgcaccccaacacctaatttgtgcgcgcgcccgtgtcacaaagagagtgaagagagagcatggaaggctcacccgccgatgccgccggctccggccgccgcacgcgcacccggggcgcggaggcgtcggggcgtgccgccgtgctccaacaactccgcgccgttcgcagtggtcaaattcgtgcctccgacgccatccaggtgaaggttgacgccccgatttacgacaccgtcccggaggaggagtacaacgtgctcgtcgctcgccgccgcaaggaagcaggcgagttcatcatcgacgacgacgggctcggttacgtcgaggacggccgcgaggaggactggagccaccgcgctctcccttcctcctccgacgagggatctgaaggcgaggacggcgccccccgcaagcggaagcagacgcgccctccccaggcgaagcgccagccgcagcagtccgccaaggtggcctctctctccgccgctgccgcaaagagggccagc

SEQ ID NO: 41879 - DNA, 2642 bp, Zea mays
  Clone ID: MRT4577_138194C.1
gcacgagatcagtcctcttcgggcctcggccttctccccctctccacacggcgtcgcggctcccctcccatttcgccggcgtcgacgatgaacggcggcggccggcggcggcggtactcctcggagcagctcctcttcgacgtccccgccaatgccggtgccggccggtgggcgcagcagcccggtggagtgcgtcgcggggacggggagatcttcgtgtcggtggagcccgcgacgccggcgcggctgtgcggaggggacgccgcggccggggactcgccgggacagaggcagcagctcagtcccgggttgctcgacctccatgctttcgacaccgagcttatccccgattttcaagtaccagggatgtatgatggtgcccaaaagtttggctatggaggaggtctagatgaatctgatatgagattcacagcaaacaagctgatgagcaagtctgctgtttttcctgatggtaactacctgaaggccttcacagagaaagagaaggcagcacctgtcgcgaaaatcaaagtggtggtgcgcaaaagaccacttaacaagaaggaagtatcaaagaaggaagaagatatcatagacattgaacaaagatcaaactctttgactgtacatgagactaaacttaaggttgatcttactgaatatgtcgaaaagcatgagtttgtattcgatgccggcttagatgaagatgtttcaaatgatgaggtttatcgtgaaacagtggagcctgtggttccttcaatttttaatcgaacaaaggcaacttgttttgcttatgggcaaactggcagtggaaagacatataccatgcgtccccttcctcttaaggcttcccaagatatcttgaggttaatgcaccatgcatatcgaaatcaaggatttcaattgcatgttagcttctttgagatatatggtggcaaattatttgaccttctcaatgataggagcaaactttgcatgagagaggatgcaaagcaaaaggtttgtattgttggtttgcaagagtatagagtgtccgatgtagagactatcaaggagttgattgaaaaaggcagtgctaccagaagtaccggcacaaccggtgcaaatgaagagtcctcaaggtctcatgccattcttcagcttgctattaaacgccgtgtggatggcaatgactccaaaccacccagacctgttggcaagctgtcatttattgaccttgctggcagcgagcgtggtgctgatacaactgacaatgataaacaaacaagaattgagggtgctgagatcaataaaagtttgcttgctttaaaggaatgcattagagcacttgataacgatcagactcacattcctttccgaggtagcaaattaactgaagtcctgcgtgactcattcattggagactcacgcactgtcatgatatcatgcatttctcctagttctggctcttgtgagcatactctgaacacattgagatatgctgacagagtgaagagtttgtcaaagggaagcaatgccaagaaagatgtgtctttggcagtgcctttaagagagtcgagcccttccccactgccttcagttgtaccctcattctctgcatctgaggtgatgaatgatatcaccgagagaaacaattttggttggcccaagcagcagtatgttaaagaacggcctgctccgacatttgttgaacgaatgcccaaagtgaaggatgccgtggagttcgcaacatcagacggtgcttatttgaagggacaaagaagccagggctgtatggcaccaaatatagctgaaataccggatacaatgtaccagcagagaaggcaaccagcaaggaaggctaaagataccgctttgcggaataatatgagaaattccgttgcttacccaactagaagtgttgagccagacgaagatgatcatctgaataatcttctccaggaagaggaaggcttggttagtgctcatagggagcaggttgaagcgactctggacatcctcaaagaggaaatgaacatattaggcgaagcggatcagcctggcttccaacttgacgactacaacattacgagactaagcagtatactctcgcagaaggcggctgggattgtggacctacaggctcggttggagcagttccagaggcttttggatgagaacaatgtgctgctatatgctcagagcccccggttgtagttccatctgttgccttcatggcaccgtaaaaggtgggcatcggtggcttctaccagcgcctcaggtggcatcatatgcggtatcggcgtgtcgctgtggccatgacccatgatgctgcaatttgtttttaacccataggtgccggtgaaacgcaaactagatggctagttcacagcctgttgccatggttctttggcatggccggccccgcaacctattttgtactagagttgctccattcttgtctttccgcgctccatccttaatccaatgtgtatatcttgtatttgtccgtgtcacatgagtgctctgttatttgtagctcaacaaatacatttttttacctttctgatgtatgaagttttccagagtgtacggtatcatccagttacacacatacttttgccaaaaaaaaaaaaaaaaagggcggcctcgcgatttaggac

SEQ ID NO: 41880 - DNA, 554 bp, Zea mays
  unsure (1)..(554): unsure at all n locations
  Clone ID: MRT4577_138195C.1
gnaaaaaaaaaaaaaaaaaaaaaaaaaaaaaaaaaaaaaaaaaaaaaaaaaaaaaaaaaaaaaaaaaaaaaaaaaaaaaaaaaaaaaaaaaaaaaaaaaaaaaacccccccccccacccattggttttctcttccttcgaaggcccggttttcccaaacaaaagttgggttcaaggcctcaaattccacccaagggaaaaaaatcctttccaaaagggggggggaacaaaaggcttcgggaagggggcccataacgggggcccccgggaaggccttaaaggacaagggggccctttgccgttgaaataacgggttggggcccgccccccgaaccgtaagggcaaagtcccgaaaaaccctccccgcaaaggggaaaaaggatttgcccccgggggggggggggaattaaaaaaggggcccggaaaagccccccccgaaggagggaatgagacccgtattgaccctcatttgtggggaccccacttagggggactacttggggtccacggttaattcattggccggggtggggtcaatttaaaaccgggttgggg

SEQ ID NO: 41881 - DNA, 345 bp, Zea mays
  Clone ID: MRT4577_138196C.1
gaattatccaatttaatcctttgaaaataacaagaaaatttttttacccaaaaaagttgtcttcttaaatatttccttccatcatcaacaaacatataaacataaataattacacattcttgtaatgatcacccccaaatcgaaaacaaaaaaaaccccacactacaaatttacaccccgttcatctaaaccaccaccgtccaaaaaataacaaattaatttccatccatcccaagtttttgtctgcttttacttgataacttttcactccgtgcggctacccttaaatatcaccgcaacttaatttaatttaccaccaccaagcaagcaagggagccaggaggg

SEQ ID NO: 41882 - DNA, 312 bp, Zea mays
  Clone ID: MRT4577_138197C.1
ctacaagtggctgctttacaactgcccagaaaagggtatacagcttgatggagaacaactcttatcctcgtttcttggagtcagaattctaccaggacttgtgtaaaaagccacaaatcaccacagagcctcatgctacatgaaatgtaaaagggagcccagaaatggaggacatttcattctttttcctgaggggaaggactgtgacctgccataaagactgaccttgaattcagcctgggtgttcaggaaacatcactcagaactattgattcaaagttgggtagtgaatcaggaagccagtaactgact

SEQ ID NO: 41883 - DNA, 1071 bp, Zea mays
  Clone ID: MRT4577_138198C.1
cccagcgtccgaggaaggctacgggcaccagggccacctgttgagccccgtgggcagcccgctgtcggacaacgagtccggcgccgcggcagcggccggcggcggcgggtgcgggagcagcgtggggtactgcggcggcggcggcggtgagtcgccggccaaggagcaagaccggttcctgccgatcgccaacgtgtcgcgcatcatgaagcgctccctgccggcgaacgccaagatctccaaggaggccaaggagacggtgcaggagtgcgtgtccgagttcatcagcttcgtcacgggggaggcctccgacaagtgccagcgcgagaagcgcaagaccatcaacggcgacgacctgctctgggccatgaccacgctcggcttcgaggcctacgtcgccccactcaagtcctacctcaaccgctaccgcgaggccgagggcgagaaggcccccgtgctaggcggcggcgcgcgccacggcgacggcggcggcgcggcggacgacgccggcccactcgccgcgggcggcggggccggggacggtgtcgaccgcgcgggccacgacgacgacgcgcacgtcgggctcatgatgggagccagcagcgtcgggttcggctctggcggcggggcggccccgtcgtactacgcggcggcatcacggaaggcgtacggcgcgggggaagggtccaaggtgatggagttcgaaggcgaggaggagaacggcggcgtgcaaaggggaaggggatttgccagccacctccacggcgccgtgcaatggtgaaccaggtgaagggcggcgtagctatagcctataactaggtgcgacgcgaaacgatatttgcatggtgctggtctgctggtgactaaatttgcgtgcgtacgttgcgtactagtaattgattgcagtttctgctctccgtcaaacgttttaatgagatttatttgaattgaaactcaaatgtttctattgacctggaagaatttcgggtagttgtgcgtcgctattgacctcttgttcaacgaggtaaactgatttgatggagagtgaaatatgaagcagtacgtacgtat

SEQ ID NO: 41884 - DNA, 634 bp, Zea mays
  unsure (1)..(634): unsure at all n locations
  Clone ID: MRT4577_138199C.1
gccgggccggggatctcaaaccacaagagcacggactgtacaatcacttcctgagctgttgttcatgcacacaccgcactactaacactccatcaccacaatggctcccaagatttgcgatcttccatgtgccctcaaacgcctcttcactgccaccgcgcatgcttgtcaatcctactgtaccgtgccaaactacccaacgacatccgtaaagccgtctcacatgcacaagggctgcccgatcgacgtagctaaagctcatggagtgctccaacgtgatgtgctctgcgaaagaggtcgcgcatgccccaacatgtagacaatgctgccctctgctggaaggaatgctgaaactccaagccgaaactgcgtctctgcaccgacatcaaggccaaagacctcagcatccacctcaacgtgtcccttatgctcaagctcatcctcgacaattgcagaaacatgtgcccaaaggactctacttgcctcaactaattgagactgaatatggagatacagccagacatcagagaatgtaccccttaccgttccatcttgcaattcctattgttacttgatgatggncactgcttatctatttatatacttaattatcataagaaacattcacattttt

SEQ ID NO: 41885 - DNA, 323 bp, Zea mays
  Clone ID: MRT4577_13819C.1
ccgcgaccccccaaccggagggggaactttattaacagggggctatctaacgggctgcggtgggctgtgactggtgcgcgtatagaccacggagctggggtcgtcaagaccaatcggccatgggtacccgtctccagtttgagaacaagctgcgaaataggtgcatgctccaagctgacaaatgcttactgtctggaagcgactggagggtcatagaactgctacagagcctttgaggctaagcttgcaaatgccatccctgtggtcaagacctgtataggaggctctagaataataagccatctttgggttggaaacaagaa

SEQ ID NO: 41886 - DNA, 263 bp, Zea mays
  Clone ID: MRT4577_1381C.1
ggtcgttagagcaccaattatctcatcgacttctgatcggtgaactcgacaccatgctggtgctgatcgttgtacttgctctcctggcgctttctgcgagcgccgacttcagtacaagcgacggctgtgacttccacacaccaccgtttcatataccggctccgtgctatatgccgcctacgctctatctgcctgcggagcagcagccgctgacattgctataccccactcaaccaccgcaactaatcccgtgccatcagttc

SEQ ID NO: 41887 - DNA, 526 bp, Zea mays
  Clone ID: MRT4577_138200C.1
ggctcatggtggtagtaaattgtgcctcccttctccgggttccactctctggtgactgccgctgccgcgctcgacgtttggagccgcggccctggggctccgtgcagtgcagtcccgttcctggccgttactggctacaccagttttcgttcctttcccggcttgtcccgcgtggcggttgttcgtagtttctcttgcattcattcgtcgttcagttccatctacgtcatcttcctttattgatcttattcttgtacgactgattgatgaagcatgcttccgtcggcagtgcaagaccttgttgcctatcgaagatccttctcttctatgtttcccctgacgctggtttcgctcgtacctgagtgtgcagggcccaggcgggccctaccggtgctggcgggatcccctctcccgcctccggcgtccggccccggcctcccggcggtggccgggtgcgcgcccttgctggtggttacttgcgcagctttcctccagtaccctgtcccacgtttcgaccattgccgcg

SEQ ID NO: 41888 - DNA, 262 bp, Zea mays
  Clone ID: MRT4577_138201C.1
ggggaggagtcaaagcgtgacgggggcggaaagcatcagtcagacagagacctgctgctgctgtacataattcgacatgcttcttcaagataaacttaaaacaaagtcccaatcgccagcggtccaggataacaatagctagataggagcctaacgctaccgcctgcatagccaaaatatatgttcacagcccgacttcggttgtgggcacttctgtttgtgcacatacacacagattggacttcaccagggacatgttgtt

SEQ ID NO: 41889 - DNA, 300 bp, Zea mays
  Clone ID: MRT4577_138202C.1
gaatgaataaacgactatttttatttgttcagcaatccattccaagggcgtaaagcccccatacattaacacacttgggagaaaataggcaaacaggtgaacaccacatatggatgacaactgatggggccacaaaaggaaaaagagaaaacctggtcccccaaccgaggggtaaaacggcggtgtttactgacgcacaaagggttttagaaaaaataaatctcactggaacatggggcggggtagagacagaacaaacgggcccagtgcgggagctttcttaaaaaatgtttggcatgg

SEQ ID NO: 41890 - DNA, 635 bp, Zea mays
  Clone ID: MRT4577_138203C.1
tcgagccggcggggtatttctcattccatccttccctggctcacggctcggctggctgcctggctgcacgctgttggccggagccccggcgccagacctcgcccagtgcccgggccgccgcaggcccctctttgcctgcgcgaggtctcagaatcccgtgggggaaaaaaagaaaagaaaagatgatgaatgcctcagcctcttgctacctgtgccgctccctcgtccgggctcctccgctcaagtccaggagtgcagtgcgctgtccaagcgccgccccgccaggagccagcggtgccacctccacctccaagacacaagatccagttgaaaaccagaagctatgtgcctatttggttgagaaggcagtcaacagacttccgccaggagcagagaatatacttgggatctttgatctgcgaggctttcgggtagaaaatggtgatctccaattcctaaagtttttggttgttaaacctctgttgaaatcatatgcctccctgattttgtgataccgagactgggaggaaggaatacttcaaagaagaaactgtgcatcctgatttccgcgattaggtgacatgattatttcttcagtaattgcaaaaatgtacagggtggtctcggaaacatga

SEQ ID NO: 41891 - DNA, 628 bp, Zea mays
  unsure (1)..(628): unsure at all n locations
  Clone ID: MRT4577_138204C.1
actattactacccgaacggcttggccaagttctttttgtcgatgctccatttgtttttcaaccaatgtggcaggttgttaaacctctattgaaatcatatgcctccctggtaagattttgtgatgccgagactgtgaggaaggaatacttcaaagaagaaaccgtgcctcctgatttccgcgattagattatttttagttcttccaatccctcctaaaagctattttgcagaaatgtgcaggtggtctcggaaacatgacctttaattgattgagaatcgattggcacccaggggggctggcgccttcctataccttttgattaacttctcaaaagttgctcagacggcagaaaacgattggagagtccagtaaaaaatgaccctgtacttgtataacttctgcgaagtagaatgctgagtttaggctggtgtctggagtgctcctgtaccatatttttctggttttggatgaatctataaggaccaaattcatctctgttgaacaattgccaattacataancttgtgtttgcccaattccattggtgtagtaccataacttctcagtgcagtggagacaaacatgnattccatttttgattaaagtatcatctgctacaaatatga

SEQ ID NO: 41892 - DNA, 608 bp, Zea mays
  unsure (1)..(608): unsure at all n locations
  Clone ID: MRT4577_138205C.1
caccactaccagcagcaccagnaagccacccaacgcacgcgcacggcattgctgctggatcagccaacctagctacacgagtagcggccgtcctcctgaattctcatggacggcgacggcagcaaaccacgcggcgngaaataaggctgcacggcccgcgccagcccccgatgccacgcagcagccagcgtcatccaccgcggccggcgctggcgagaaggtcgatgacggccgccagcagcccgtggcgccagtggacgagagccgccgcgctgcgggcggcgccgagccggaggaggaggaggggggcaaccgcaacgacgacgcgcaggtggagatgttctacgcgctgctggccaacatccgggcaatgaggaggggcctgccgccgcacgacgtggcggcctcctcgtccgtgcgcggaggcggcggcggcgacaccggcgacgacgccgtactggactctgcgagggagaagcggctgcgcctgagcgcggacccgccgtggcggccggcgttcaggatggaggacttcgaggagcccgctccggcggcgtgcgagacgaggaagcggacgaggggcacgggccacggcgacggcgcgagca

SEQ ID NO: 41893 - DNA, 677 bp, Zea mays
  Clone ID: MRT4577_138206C.1
gaatatacttgggatctttgatctgcgaggctttcgggttgaaaatggtgatctccagttcctaaagtttttgatggacgttttttactattactacccgaagcggcttggccaagttctttttgtcgatgctccatttgtttttcaaccaatgtggcaggttgttaaacctctattgaaatcatatgcctccctggtaagattttgtgatgccgagactgtgaggaaggaatacttcaaagaagaaaccgtgcctcctgatttccgcgattaggtgacatgattatttcttcagtaattgcaagtcagttctacctctgcctttgtgttgggattgtaattctaaattgtgcagatgaggaagagttacttcaaaaaaaaaaccgtgcctcctgatttccgcgattaggtggtctcggaaacatgccctttaattgattgaaaatcgattggcacccagggggtctggcgccatcctataccttttgattaacttctcaaaagttgctcagacggcagcaagcgattggagagtccagtaaaaaatgaccctgtacttgtataacttccgtcaagtagaatgctgagtttaggatgctgtctggagtgctcatgtaccataattttctggctttggatgaagctatatggaccagattcatctcagttgaacaaaa

SEQ ID NO: 41894 - DNA, 1193 bp, Zea mays
  unsure (1)..(1193): unsure at all n locations
  Clone ID: MRT4577_138207C.1
gccataacttgggactggagccatcaaagacagggaaattgagtttaggtaaccctccgccatggcgattcaacaggggaacgtatctggtgcaaaccaacccctccgtgcaaccgtgcaaacttttaatctgaaccacatgatgttgatccaaggggtgtgcggggggagtgggaggggggatttgaaaaaatgtgattagcagcgggtggttaagtgtaaaattatccacgcccctgtgtccattggattaacatcatgtggcccagattagaagtttgcacgattgcatggaggggttggtttgccccgtggatccaaatcacttcctacagaatgacctggttatggaaaggaaaatagtggagacggggggcgccacatacccttgaccgggaagcggccatcggcagtcaggataccgaagcccactgtctcggagatagttttcgtagctgggcccaaaacgataggcgtcggagtggtcgacggtggcagatgggcgcaccggtaccgctccggtaggagcgaaggaaggtggggatccgaggaggcctgacgaagtcgcgccggaaccgggagatccgagtacgcccggaaacccgccgaacacaccttggaagcctgcgacctccatcctggacgcctccgaacagagccgatccaggttcgtcttcatggcgtcgagggaggagtccactcgggggcgccagcagtcgaacagctggactgcggactctatggcggtgagacgagagccggtatccacctcgatctggcgcaggcgggcatcagtagccgcgtcggacgccgtgaggtgagcttcgacatcagcgcggagcccggtggagaagttggtgacggatcgagccgcatccgtcgccgcggattcgagagcgccacccgcgtctcccatttgttgtcgagggtttggagccgtttatccaatttggcaaggaccgcccgggtttggttttccaaggcaagagtgagggacgcatcatcagatggagatggcggcgccatgggacagagcaaggaatcgcctaatctgatactagtttgttagcagcttggataggaacggaaacgaggataccagaagaggaacattgatgtagtttagggcgcgttctttctgcaaaaaatgggttcagntgatcaaaattatacaaaagcaatttaagctggac

SEQ ID NO: 41895 - DNA, 691 bp, Zea mays
  unsure (1)..(691): unsure at all n locations
  Clone ID: MRT4577_138208C.1
ctttggtgttgcagtattatcagaagnaatcagtngaaaagcctgtaccaaactggcaaggcatatgtacatgattccttggacatttatggccgacctgtgctgattgtagtggcagccaaacattttccttcgacacaggatccagttgaaaaccagaagctatgtgcctatttggttgagaaggcagtcaacagacttccgccaggagcagagaatatacttgggatctttgatctgcgaggctttcgggttgaaaatggtgatctccagttcctaaagtttttgatggacgttttttactattactacccgaagcggcttggccaagttctttttgtcgatgctccatttgtttttcaaccaatgtggcaggttgttaaacctctattgaaatcatatgcctccctggtaagattttgtgatgccgagactgtgaggaaggaatacttcaaagaagaaactgtgcctcctgatttccgcgattagaaatgtgcaggtggtctcggaaacatgacctttaattgattcagaatcgattggcacccaggggggctggcgccttcctataccttttgattaacttctcaaaagttgctcagacggcagcaaacgattggagagtccagtaaaaaagaccctgtacttgtataacttctgcgaagtagaatgctgagtttaggctggtgtc

SEQ ID NO: 41896 - DNA, 691 bp, Zea mays
  unsure (1)..(691): unsure at all n locations
  Clone ID: MRT4577_138209C.1
ggtaccctcggtctcgccggaaccctagctcatttatgtcattcacgtccctagccgccacaaaacagccggccgccaggttgtctcctggccgaccgcgctctgctgctcaaaacttcctctctccctatctgttctgcctcggccaaaacagctcttggcaaccggcttggcaagcagctatctgttggcttcttgccttagccaaatgaagatcatatgcctcacgatctctcttttttttgttcggctgaatctcagagaaaacgtcctgctccctccaccaggccgccaggacgcaacgtttctctctttttgatctgctgtttttttttcttgaatctggcgctagttccctggcctagcgcaggcatgtcttttcatttaccagagatggtcggccgattatggggcgctgtctctaaccttttaaaacttggatctagttctcatttactcaaatcccttactgtgagaatgaatgtatgagatggatctaatgtaatatttgggatcgagttatgagctgataaaaaaacgtggatccgagagtttgcgttatttctgttattttctgtgatgattttctgtaccatttctaatctgttcatctaggccacggatttaaaataccccgagccactgtgatctatgttgacccagatntaacacagattatggntaggttatt

SEQ ID NO: 41897 - DNA, 339 bp, Zea mays
  Clone ID: MRT4577_13820C.1
gaggttaggtttttttttttgacgggggtattaaaaattttaaattttttaaataaaatttccatgctacaacacaagttactttattcaacttttaaaggacaagtcaatatataaggcccgagtggtttacccaaccaaaaacaaggcctgaacgtgagtgcctttttctgtgcacccgcccacaggaattccaaacccaaaagcccctcttgagaaacagtttttctacgaagcttttttttaagctatgctaaaacggggaaatccccacccatctttttaggctttgggggaaagcaaatttttttctaccaacttttaaaacaaaaccctttc

SEQ ID NO: 41898 - DNA, 572 bp, Zea mays
  unsure (1)..(572): unsure at all n locations
  Clone ID: MRT4577_138210C.1
agaacgaaanagacagaccgccgagacaggcgccacaccgaccaagcaccgcaaacagacagaccaagcccacacagacacacacccagaacgacagaaaaccgcacgcagaacccaaaaggaaccaggcgaagaccccacaaagagaaccagcacgaccaaaagcccccaacgagagaccccggcccactgagcgccagaccccgaagaaaagagcaaaggaccgccccgagacccacaaaaaccgcgcgcaaacagcagcacgcaaacaaaaaaaccaccgccaccagcggcggcacgcaagccggaccaagagccagggccgcgcccgccccagaacaagcggaccccccggcccgcaggaacccgacaccaacgccaccgaaaccgacgaccacgagggggggcccggaacccaaaccgccccacagcgagccgaaacacgcgcgcccccaggccgccgccccaacaacgccccgaccgggaaaaccccggcgaaaccaacacaaaccgcccagcaaaaaaaaccccaacaacaccccgcgggcgaacacgcgaacagggcccccacc

SEQ ID NO: 41899 - DNA, 288 bp, Zea mays
  Clone ID: MRT4577_138211C.1
gggggccaaggccaacagaccaggcctatactttacgtgggggggggacaagggaaagggacatattttccccccagaacccacttcaggcacataacacaggtccccccccaacaaatttacccatataaaaaggcagctggtgccctttgtccacctgtgcccgggtttccagcggcgaaggggggaaaaataaaaaacttgacgagttaaagggggggggcgctgaaggccggggttcttccccggaaagccatttaaccattcaaaaacccggccggggcgccc

SEQ ID NO: 41900 - DNA, 1832 bp, Zea mays
  Clone ID: MRT4577_138212C.1
aaagtaaagtagatgactgtctctacctcttgctacatgtgccgctccctcgtccgggctcctccgctcaagtccaggagtgcagtgcgctgtccaagcgccgccccgccaggtgctagcggtgccacctccacctccaagcttgtcctagaggtgaaagaacggctagcaagggagcacccaggcctccccacgggcaggaacgggagggacgatgacgacatggtcctctggttcctaaaggaccgcaagttctccgtcgatgaagccgtctccaagctcaccaaggcgattaaatggcgtcaggactttggtgttgcagagttatcagaggaatcagtgaaaagcctgtaccaaactggcaaggcatatgtacatgattccttggacatttatggccgacctgtgctgattgtagtggcagccaaacattttccttcgacacaggatccagttggaaaccagaagctgtgtgcctatttggttgagaaggcagtcagcagacttccgccaggagcagagaatatacttgggatctttgatctgcgaggctttcgggttgaaaatggtgatctccagttcctaaatttgatggacgttttttactattactacccgaagcggcttggccaagttctttttgtcgatgctccatttgtttttcaaccaatgtggcaggttgttaaacggccggggaaatcatatgcctccctggtatgctctccctctcccttaggttagcgcttcatagaacgatatggaacgatatggagaaccttatagtctactgctatgttgcccctgctaggtaagattttgtgataccgagactgtgaggaaggaatacttcaaagaagaaactgtgcctcctgatttccgcgattagaaatgtgcaggtggtctcggaaacatgacctttaattgattgagaatcgattggcacccaggggggctggcgccttcctataccttttgattaacttctcaaaagttgctcagacggcagcaaacgattggagagtccagtaaaaaatgaccctgtagtcctgtacttgtataacttctgcgaagtagaatgctgagtttaggctgctgtctggagtgctcctgtaccatatttttctggttttggatgaagctatatggaccaaattcatctctgttgaacaattgccaattacataacttgtgtttgcccaattccatggtgtggtaacaaaattccaaagtccataacagacaacacatggattccatttttgaattaccataacttctcagtgcagtgcagacaacacatggattccatttttttattaaagtaccatctgctacaaatatgaatcatggctttgtttgtagacttcataaagaaacacacagattaatcaaaccagtcttcgaagagtctgctatggataggaacgttccaaagcaaaataagatgcaagttgtattgcataaaaaccaggtacacatcaatcagctgcattctggaagactaaactgcaacacaactacatctgcaatcacagagaaatcaggtgctcattcaagtactctactgatcgaaaatggatggcgtctgtgatggttgattcttttgcacgtcttctacactggtacattgacggctgatggagatggatggtggtgtcgctgttttgtgttttgtttagcactctaggtgacacattgttatgggattgttacacagctgatatgttatgaacctgatatggagatctttttgcgtcctttgtttgggtgttactgttgtgccattcgtctcataagttatgccattttattacttgcttttggattgatat

SEQ ID NO: 41901 - DNA, 1047 bp, Zea mays
  Clone ID: MRT4577_138213C.1
cctcgaggccggccgggacccactcccttcccaaccggaaaagagaaagatgagcaccaattcggcgaggaaacacatagccaagccaaggaaatggcgcactaccaccccgtgtccgcggacacttaccaagacctcgaggccggcttctccggccactcctcctcccctctgaagcccgcggcctcgccgaggcggcccggccgcatgttctgcgacccctgcgacgacggcgacgagctccacggccgccaccactacctcgacatctgcttccgctgccgtaaactcctgtccggcaacagagacatcttcatgtacaggtaaacaacaccaccaccgatctagagactagagtatccgggggggtcccttcccctagaagaagagatctccgtccgtggcatggaggaacggacgaatggttcgctgacggcggtgtggctgtttcttttttttgctatcgcagaggtgacctgccgttctgcagcgaggagtgccggcaggagcagatcgagatcgacgaggcgcgagagcagcggctgaagcagacggggcgggccgagcagcagcggcagcggcagcagaagcagagcccccagaggatccccatctgggcgtggtaggatgagaaaaattttgggcgccgggaaaacgaacgaacgtagtaggatttagctgcacctcaagaagaaccccccaagcaagggcgacttgctgcgtgtggaaacaaacggccgtggatcaccgccggctcgacgcaggaagaaggccacgcgccacggcacaggccgggcagggcagggcatccaaccggctgcgtctttttaccttcgttggttgacgaaaccgaatgacctctctcctcctgatctccgaaagatggagatggaggggggttggtttgtgcgtgagtttttgcacggttgcacgagtgaaatggtgtgcgtacgtgctgcgtctggctgggatctatcgccgtgtaaaccctgtcgatacggtatgaaacaagcgagaggcctaaacaagtccctctcgaatttctcg

SEQ ID NO: 41902 - DNA, 928 bp, Zea mays
  Clone ID: MRT4577_138214C.1
cattggggacctcgagcgccggccgggacccacttccttcccagccggaaaagagaaagcaggagcaccaattcggcgaggaaacacatagccaagccaaggaaatggcgcactaccaccccgtgtccgcggacacttaccaagacctcgaggctggcttctccggccactcctcctcccctctgaagcccgcggcctcgccgaggcggcccggccgcatgttctgcgacccctgcgacgacggcgacgagctccacggccgccaccactacctcgacatctgcttccggtgccgtaaactcctgtccggcaacagagacatcttcatgtacagaggtgacctgccgttctgcagcgaggagtgccggcaggagcagatcgagatcgacgaggcgagggagcagcggctgaagcagacggggcgggccgagcagcagcggcagcggcagcagaagcagagcccccagaggatccccatctgggcgtggtaggatgagaaaaattttgggcgccgggaaaacgaacgaacgaacgtagtaggatttagctgcacctcaagaagaaccccccaagcaagggcgacgcgctgcgtgtggaaacaaacgcccgtggatcaccgccggctcgacgcaggaggaggaaggccacgcgccacggcacaggccggcagggcagggcagagagcccatccaaccggctgctgcgtctttttaccttcgtttgttgacgaaaccgaatggcctccctcctcctgatctccgaaagatggagacggaggggttggtttgtgcgtgagtttttgcacggttgcacgagtgaaatggtgtgcgtgctgatcgccgtgtaaaccctgtcgatacggtatgaaacaagcgagaggcctaaacaagtccctctcgaatttctcgtcgaaaaaaaaaaaaaaaaa

SEQ ID NO: 41903 - DNA, 324 bp, Zea mays
  Clone ID: MRT4577_138215C.1
ctgcagctgacaatcgggatgactcagcacagggtttctggtaatcgacatccggctgcatagcagagctcttcagctgctgtatggacaggtactggtctggatgctagctggattccaacgtggtctcgcgctgtgatacatgatcccagtccctctagtgcagtgacgccagtaagtctgtctggagtacagatgatgatgaggcaatggcgtctgtgaccgacacttatgggcatgctgatggcacctggaacctaagggccgagcacatggctcggaccgcacttgttcgatccactgcctcgatggcacatggtagtg

SEQ ID NO: 41904 - DNA, 275 bp, Zea mays
  unsure (1)..(275): unsure at all n locations
  Clone ID: MRT4577_138216C.1
ccnnatagcgctcccctttttttttcaacgcaacaaaaagaacgagcgggttacataataaattgtcccgcacaacaaccaggcctttacatgatccccacatattcataaccactaacatataaagacacggcacaaccattacaatccactattggcccaagatctatataactcacataaccacaccaatacgattaccgaattaatagactaatctaccataatataacatattatctgtctcaatttaaacctaaccattatcttacatt

SEQ ID NO: 41905 - DNA, 1011 bp, Zea mays
  Clone ID: MRT4577_138217C.1
aattcggcacgagggtcaagctctgagagatttgatatacatgcatttgattctccacctgctcggcgctctttgaggaaaagagcagccccatctccaccacagccttacacagatgaaaatcgaaggccagccaagcgccgacaggtatctaagaagggcaaggagtgggcggaggatgatgcggggcaagatctgccaaggcccctgttttttgcgcagcccgctgtggtgtggtcatcccaccaaaggcatctaaaattgggcttcttagtacttagaaggccatattttacaagaggaccgatgtcgttgtctgatctgttgaagaagaaccctctagctctcgacgacagcctacttcgtctaatctgccatttgggctggtgagccttcagtctgcactatctgaagctatatcttgccttgatcatgagccaagcaagattgcagcaatggcggctttgaaagattacgatatagctgtatcaaatgtctgccacagcatcaactcaaaccagaagaagattaccagagctcaagctcagatttccaaggatcaaaagtctatccagcaggcgtagtaagtgcttgttcgtgatatcaaatcaatcattaaacaagcaccatttcagactgctcaaccgcttgctggattgcgcaaaggtgtcaaaagagctgttgataaatacaagatgtcagctcaaaaggctaatgtctcacccgcccctaagcagtcatgtcccgcgcagcattcagcacctccttttccagttcaagttttagcttcagcagcaccagcatcagcaacaacatcatcagtagcagtgcagcaccagcattagcagccccagcttttccagttcctgcacacacaacagcagattctccagaagcaccagtttctgtttgttcttctgtttttttctctcccagcaccagcttgtactgcacttacagttaaaagattattactaacgttgtgtgccaaatatgacccccccccccccc

SEQ ID NO: 41906 - DNA, 576 bp, Zea mays
  unsure (1)..(576): unsure at all n locations
  Clone ID: MRT4577_138218C.1
catgaaggaaatctttgcagtaatggcatcatctggnagaccaatcacattctgtgtcctctcctttgaaagagcagcagcaggagtttgtagatgtgtcaagctctgtgagatttgatatacatgcatttgattctccacctgctcggcgctctttgaggaaaagagcagccccatctccaccacagccttacacagatgaaaatcgaaggccagccaagcgccggtaggtatctaagaagggcaaggagaaggtggaggatgatgaggtgtgtatctaagtattttttacctatctggttttatgttcagtaacttcattacctatgctgagatttaccacaagggacaagatctgccaaggcccctgttttttgcgcagcccgctgtggtgtggtcatcccaccaaaggcatctaaaactgggccttctgagaactaagaagccatattttacaagaggaccgatgtcgttgtctgatctgttgaagaagaaccctctagctctcgacgacagcctacttcgtctaatctgccatttggngctggtgagcccttcagtctgcactatctgaaa

SEQ ID NO: 41907 - DNA, 818 bp, Zea mays
  unsure (1)..(818): unsure at all n locations
  Clone ID: MRT4577_138219C.1
cattgggtacctcgaggccggccgggacggcagccttggctccctccggcctccgccgtgcctcttcgcctccgacgcggcttccgggcgccttctcgccgcttttcgctcctcagctgatggagcccgcgccgactgaacaagactatggctttcttggcgacctgcagctcagcaccgcgattgacagtccccacatactacagatagataatcgtggagcgcgcgatgaggatacagtgatgatcctacaactgttggaagggccccaagatgagacaaacctagatgattggttatcaggtgatttgcatccatccccattgttggagacaaatgcccattaccagccaagatgtaggaaaagcggccgaagaggagctcggaggagaaggacgtctccatgggacccgatgttctttgagagacctgttagcagggagtactccacagccaaaggtaggaaaaacaatagccggtggacttctaaagaagtggagagactggcacgaggcgtctcaaggtttggtgtcggacaatggaccctgctgaagcaggaatttttcaaaagctcaattaggacagcagtaaacctcaaggacaagtggagaaacctgctgaaaggttaccaggcttgcagatactactccccagaaagtaaaaaaaatgcagtaagatcatcttcaaagatacggaatgggggcgccaactggccagggccagtttggaaaggaatccagtagctggacgtgaatctctttttcangtttggcttccctctatggctttttggaagggtacagctctctctttttttt

SEQ ID NO: 41908 - DNA, 305 bp, Zea mays
  unsure (1)..(305): unsure at all n locations
  Clone ID: MRT4577_13821C.1
gcgaangggaaccctcgaggccggccgggcggngcatttatcggctccccgccgagagggggccgggacgccggtggtccgctcggccgtctacttaaaggaggccctgcgcggtgcgctgtgcccgaccgggaaggccatggcgggcccggcggtgtccaggctgtgcgctgtgtgcgctgggggttgttgaaggctagaagttgtggggggggggggcgccctcttttttttttgggggaggtggggctctgggggtgggtgagtcggaggattggggggccccccccgtctgtggggggggg

SEQ ID NO: 41909 - DNA, 927 bp, Zea mays
  Clone ID: MRT4577_138220C.1
cacatgtccacgttcgtccacccacgtgtgggggggttcatcgggtctcctgctgcggcccctgacctcggagggtgggtgctggctgcgggggatttgtgctccatgacggtcggctcgtcctgcttgcttcggctgccgtatcccctgcctatcgcgtctgcccgcgggttttttccagaactcatcatggcagcccctgacggccgcagacatgcccgctgggaaaaatagcccaagaagatcagccgattagaagattgaagtggggaactgccagtcttattgtccgagcacctataactccaatagttttgccaattgttcactctggtttcgaaaaggtcatgccagaaaactcgttctttggacggcgaccaccggtgccactctgcagtaagaagatagatatcattgttggagagccaatagagtttgacttgccaagcttgaagcaagaagcatcaacggtaccccatgactcatcctctgaacggaaggggtggccgaccattacaccggatgggctggacgaggccgcccagagatggctttaccagaagatgtcagacaaggtccagtctgtgatggagagactgcggaaaacagttaccaaccttaagcagcgttgatcttcatctatcaggcaataccctgttgaactgctgattaggattcgttaaccagcttgagttggtggatacagaaatggacaagtggtcgtcacacaatgacacaagttcgtcaaagtattggtaataatagaattagagctcagattgtttcatttttgagtcttctttttgttattgttttgaaaggtttcttcatgtttttctttcgactggtctcgtcgcctgccactttcaactgttcaggttgcctgccagttttactgaggcatgaataaaaaaaggcttttgatat

SEQ ID NO: 41910 - DNA, 496 bp, Zea mays
  Clone ID: MRT4577_138221C.1
aaaaaaaaaaaacccccacccattttttaaaaaaaaaccttggcaaaacagggcaaccaaaaggggcccttaaaattaaaccaaaaaaccattggttgccccaagggtaaccccaacttttataaaaatcaaggccccccccttttggcccccccaaaattgaaatcccttttttggtttcccggcccacaaaaggggaaaaacctaaccttggggggcaaaaacccccaagcaccccgtgaaaaccccaaaaaaccccctgggccttcccccagttttggacccccccacccccccgggggtcccccccccgggccccaaggcccccgtggccgacgtaaaatggaaaaaacccccaggggaaacaaatttcccccccccaaaaaaaaaccccaccccccggatggttttaccaaccccgggggcccccttgggtcccccatttaaaaaaggaagggcccggaacccccccagggaaaaaacaaggatttttttt

SEQ ID NO: 41911 - DNA, 793 bp, Zea mays
  Clone ID: MRT4577_138222C.1
ctcgaggccggccgggaggtgcagctcgcggagccggtagcaccccagacgcggccaaccgctagctaggccggtgccgccatggctgcgtcctcctgctgccaggcccgctggctgctccccctgctgctgcttgctgctgccgcgggtgctcttggtgcagagggcgcctcctccattgtgcagctggacgtggagtccctgctcccgtccgcagccgctccttgccccacccctcaagcagagcaaaaacaaggtgccgcgccgcccacaaggatgcccgtcgtgcaccagcacggcccgtgctcgccgctggccgacaacaggaacgggaaggcgccgtcccacgcggagatcctcgccgcggaccagcgccgcgccgagtacatccaccgccgcgtggccgagaccaccgggcgggcgagacgacggaagcagggcgcaccggtcgagctccggcccggcacgccgccgtcgtcgatcgtcgtcccctcgtcgtcctccgccacgtcgacgacggacctgccggcgtcgtacggggtcgcgctgggcacgggaatctacgtggtgcccgtccgcctcggcacgccggcggagcggttcacggtggtgttcgacaccggcagcgacacgacgtgggtgcagtgccagccgtgcgtggcctactgctaccggcagaaggagccctctcttcgaccccaccaagtccgccacctacgccaacatctcctgctcctccgtctactggtccgacctctacgtcagcggctgctcccgcggccactgcctgtac

SEQ ID NO: 41912 - DNA, 380 bp, Zea mays
  Clone ID: MRT4577_138223C.1
tctctttttaaacggaatgaaagcagatgataccaagattcattggggagacaacccatacttggaactggtgagtggagagagaccataactaacaccagattatgaaagcgtacagtgaatacactatacaaaactctaaattgacagcttgatagagctcaccaaacgggcggataactggatgtttgcaggacctggcaggcacaggatacatgggctgatgcaccaacagaaaatgcataaccacaggcactggacccaaaggggggttcacaagatatagagtttgtgcagcattgcaggacctcagtggcaaaagaagggactgaactagacgccacggactcccctggagtcccgcgcgggggtgcacccca

SEQ ID NO: 41913 - DNA, 147 bp, Zea mays
  Clone ID: MRT4577_138224C.1
acgacgaataggatgtgccttaaaaaataccagaattcctttcgagggttgactatgcaatatcaaatcgctccataacgttacacatgatacacgtagtgtgctaacagatcacaaccaaaaagaatgttattgagaagcaaaaag

SEQ ID NO: 41914 - DNA, 441 bp, Zea mays
  Clone ID: MRT4577_138225C.1
gattgccatgatgattatggagatactcaattgcaatctagggagagaactagaaataacactagaagttacaacactgtattttaaaggatgccaagtggtagggctatttcagcatgtaagtttttttcaaaaggtgatggcactgaaggcaaccagcttaagcctatgattgatgtggaaatgattaatgtgactgcagcttaagcctaataatactccagcttcagaaatattgtaagaagtcaagctgtctcaagaaatattgtgaacgctatcagggaggtgttggatgctccagcaactgcagatgcgagagtagcaaaaatgcttttggcagaagagatggtgagcatttagcgtttcaaatttaggaacatgtacatttcgtgagtcccatcccgggacatcttttctgacttactatattatgatgctaat

SEQ ID NO: 41915 - DNA, 290 bp, Zea mays
  Clone ID: MRT4577_138226C.1
ccggccggggtcagccatatcctcttgctgcaaagcggtatctgaactgtgggacgccgacaagagtgcttcatcgctacctccaacaatgtctacatgcaggtcaacttcgcaaacttcttccgcgactacagcgggagctcgccacccttcatcgattacaagataagtgacccaatgtaggcagaactgcagcccgaaagccctgaaggccctccagaatcgcgcaagttctcgccagagctcgcgggagtgcccgaagcggggaggacctcagatgaggatctacc

SEQ ID NO: 41916 - DNA, 413 bp, Zea mays
  Clone ID: MRT4577_138227C.1
cgccctattccaatggcgcggggtttttttaagaagcccgccgtcttttcccctgcggaggaggagccggcggggataatgcccggcggggaagaagcccaaggctgagaagcggttcccgcgggcaagtccgcaagcacagaaggcggcgagaagaacgggatgaagaaggcaaagaagtcggtggagacgtacaagatctacatgttcaaggagctgaagcaggtgcacccggacattggcatctggtccaaggccatgtgcatcatgaactcctccatgaacgacatctttgagaagctggcggccgatgcggacaagctggcgcggtacatcaagaagcctaccattacgttccgcgagatccataccttcattggcctcgtcctccccggtgagctcgccaagcaccc

SEQ ID NO: 41917 - DNA, 453 bp, Zea mays
  Clone ID: MRT4577_138228C.1
agctattgcatttctccttttgaacactagtccaggtacaattatcagggtgactatgaatctcagaacctggagcgactgtcatcttgctgcgaagctgatttcaataatcacctgtagagagattgtcctcaaagacaccaataggatccatcatatagtacaaggagtttgctcatgtggggattattggtagaggatgtacaattatcatatactgcattgattgaagcgtctacttggagagaaaagatttttgctcttttaagcatgatgcttgaatccacttttcctcaacttctgtccttcgattgaatggatgttagttttctggataacatttgtaacagaaattcagcatccatactcagctgcagaataaagaagagaacaatacctatctacgcttgagcatttggtttctttgtctagtattcgggctcttttgttcca

SEQ ID NO: 41918 - DNA, 259 bp, Zea mays
  Clone ID: MRT4577_138229C.1
aaacaagctagctagagctagccaagccgcggcgtgcctccgctccggccggcccgcccctgtcagagcccccaccgccgctgccacctccgccagccgtcaccccagcgtggatcgggcccttcgaccggccgcaatcagacgccgatggggggccttacgctggggtgtgactagtggcggggacgcttccgatgttccggtagcgggggcagtgggaagcgcaacacgcacgatccgtgaagtaacgaaagtcacc

SEQ ID NO: 41919 - DNA, 342 bp, Zea mays
  Clone ID: MRT4577_13822C.1
ttaacgcgttcgtgctggactcgcacctcgttccttctgacgacacgggggtgtcgaaggtgtttaccttaagatgaagggcgattatcacaggtacctggctggattcaagacgggagctgacaggaaggaggcggctgataattcgcttttagcgtataaatcagctcaggatattgcgatggcagatctggctcctactcatacaatttggctgtgattagcgcttaacttctttgtgttctattataagatcctgaactcgcctgatcgtgcttgtaacctaataaaacaggcttttgatgaggctatctttaatctgttttcttttatgcgaggagt

SEQ ID NO: 41920 - DNA, 517 bp, Zea mays
  Clone ID: MRT4577_138230C.1
gacgataaacttcgttgactcgccccggcgccgacccgctccgcccgcgcgtcctacgtcgtcgagcccggtaagagtggatgcaaatggaggagggtgaacaagagggatgcttgtgttaaatccaattctctaatgacaatgagaatatgattattaaatgcatacacgggaaagctgtattagaaggcataaatgaatagatatacagactgcactacttgattctactgaattggatataatggtgtaaagtcaatcagtccattttctgtccctaagtggagttggtgcgcttactctgttaaccactttttcgtctcatggcatgtggatctgttagtttaccttctgcaagcaagtatagctacacggttgaccagcgtagaaggatgaatccttactttgttgtgattcttgtccaagacaaggtctacctggtgcttcgcaagaagagaaacgccgataaggatgaggcgagtgccaccagacgttgctggagatgctgaatatgcag

SEQ ID NO: 41921 - DNA, 260 bp, Zea mays
  Clone ID: MRT4577_138231C.1
gggggagcagtactggcataacaaaaattacccgctggcaaaacatgcatatggggaaaacaaaggaccgggctacacataccaactagttactcactactatatacggggggggagcgggcatatatcacacccttcctaacatcagttaaaataaacagcggccacccctgccttaccgggactacaatccacctactcgagggttttttttgtgaggacttgcttttattaaacatgcaaacgtttttcataacccc

SEQ ID NO: 41922 - DNA, 3083 bp, Zea mays
  unsure (1)..(3083): unsure at all n locations
  Clone ID: MRT4577_138232C.1
atgggcgaggcagtgcccgaccccgacgacctggccgcgttcccggcgtgggcgcggtcggtggcggactgcgaggcgcggctcggggtgagcgtcacgcgcggcctctcgtccgccgaggccgccgcgcggctgcgcgcccacggacccaacgagctggccgaccacccggccccgtcgctgctgcgcctgctgctggaccagttcgaggacacgctggtgcgcgtcctgctcgccgccgccgccgtctccttcctcctcgcgctctcctccagcgccggcgcgctcacgctcgccgccttcgtcgagccgctcgtcatcttcctcatcctcgtcgtcaacgccgccgtcggggtctggcaggaggccaacgcggagcgggcgctggacgcgctgcgggagatccagtcccaccacgccgccgtcctgcgcgacgccgcatggctccccgcgctcccggcccgggacctcgtcccgggcgacgtcgtccagctccgcgtcggggacaaggtgcccgccgacatgcgcgtcgccagcctcctcacctccacgctccgcctcgagcagggctcgctcacgggggagacggcctccgtcaacaagacctcccgcgcgctcccgctcgaggacgccgacatccaggccaaggactgcatggtcttcgccggcaccaccgtcgtcaacggcgccgcgctctgcatcgtcgcgcgcaccgggatggacacggagatcggcgccatccacgcccagatccaccaggcctcgcaggaggacgacgacacgccgctcaagaagaagctcaacgagttcggggaggcgctcaccaagatcatcggcctcatctgcgccctcgtctggctcatcaacgtcaagtacttcctcaccttcgacctccagggaggatgggtgcccaggaacatcaccttctccttcgagaagtgcacctactactttgagatcgccgtcgcgctcgccgtcgccgccatacccgagggcctgcccgccgtcatcaccacctgcctcgcgctcgggaccaggaagatggctgccaagaatgcgctcgtcaggaagctgcctagcgtcgagaccctcggctgcaccaccgtcatctgctccgacaagaccggcacgctcaccaccaacaagatgtccgtcgccaagctcgtggccgtcggcgattcctcgcaggaggttaggaccttcaaggtggacggtacgacttacgatccccgggacgggaaaattcacgactggcctgctgggagcattgacgccaaccttgagacgatcgccaaggtcgcagctgtgtgcaatgatgccaatgtggcacattcttcgcatcagtatgttgccactggaatgccgacagaggcagctcttaaggacccaccccgggaagaggtctatgatgctattgaagattgcagagctgctggcatccgagttatggtgataacaggggacaacaaagaaaccgctgaggcaatatgccgtgaaatcggcgtgttttcacctgacgaggatatcaccttcaagagccttacagggaaggagttcatggcgctggaggacaagaagacgctgctacgcaggaaaggtggcctcctgttctctagggcggaacctaggcacaaacaagagattgtgaggttgctgaaggaagatggggaagttgtcgccatgactggagatggagtcaatgatgcccctgctttgaagctggctgacatcggtgtagctatgggcattactggaactgaggttgccaaagaggcgtctgacatggtgttggctgacgacaattttagcaccatagtttctgcagtcggtgaaggaagatcgatctacaacaacatgaaagctttcataagatacatgatttcgtcaaacattggtgaagtcgcttctatattcctaacttccgccctgggcattcctgagggtttgattcccgtccaacttctatgggtcaatctcgtcaccgacgggccccccgcaactgctctaggtttcaatccgcctgacaaggacatcatgaagaagccacctaggaggagcgacgactcactgatcactccctggatcttgttccgctacctggtgattggcctttacgttgggatggcgaccgttggcatcttcgtcatatggtacacacatgggtctttcatgggcattgacctgaccggagacggccacactctggtcacctactcgcagctttcgaactggggccagtgctcttcctgggacaacttcacggcctcgcctttcaccgccggagccagaacgttcgcgttcgacgacgacccgtgcgactacttccacgcaggcaaggtgaaggcgacgacgctgtccctgtccgtgctggtggccatcgagatgttcaactcgctgaacgccctctccgaggacagcagcctgttggccatgccgccctgggtcaagccgtggctgctcgtcgccatgtcggtctcgttcggcctccacttcctcatcctctacgtgccgctgctcgccacggtgttcggcatcgtcccgctcagcctcaacgagtggctgctggtcctgctggtggctctcccggtggtgctcatcgacgaggctctcaagctcgcgggcaggtgtacgagcccttcttcgggccccaccaggcggtccaggaagaagaagcagaagggcgagtagcgagcgggcgctaacatttgactccgtgctcagttactaaaccattccattaatcatgtaaacaaaagatgaacctcagtcagtcaatcaatcaatacaggagataacccattttcactgtttctctttctaaaaaaaaaaaatatggttgggatcgtaatcgtttgacagagaaaatgacggcttgcatcatcatgcataacatgatcgttgaagacgaaggcccatttgctgcaaacattgatttcggagacaactcttcaaggattgattcatctcaaataatagcggaaggncgtgccgaatgggttattaaccacttcgatctacgtcgccaagatagatcgtgctcccttcaaaatgatcttgtcgagcacttatggagtcgccgtgga

SEQ ID NO: 41923 - DNA, 269 bp, Zea mays
  Clone ID: MRT4577_138233C.1
ggaaatgtgacttattatatactgttgccctcaaacctgatacatgaaactatattgtgcttatcttattgaaacagcaacgttgatgagtttctaccaatggtggggggggggggggaaaaccctgttacaagtacaacaatgtgtggccattggcacaacttgttttgacagaaccaggggtctggtactaacaacacaactgttggtggaaaggtattttatattgcttatttaataaggaacaataattaggtgttttggatgat

SEQ ID NO: 41924 - DNA, 3351 bp, Zea mays
  Clone ID: MRT4577_138234C.1
tccgcacccaaagctgacacaccaaaaggtgcgccgcgggtgatgccagctcaggctcacaacacgagcaatctcgcgttgatctccagtgatgaaaggggcacgaggctgctggaccagttcgaggacacgctggtgcgcgtcctcgtcgccgccgccgccgtctccttcctcctcgcgctctcctccagcgccggcacactcacgctcgccgccttcgtcgagccgctcgtcatcttcctcatcctcgtcgtcaacgccgccgtcggggtctggcaggaggccaacgcggagcggcgcgtggacgcgctgcgggagatccagtcccaccacgccgccgtcctgcgcgacgcccgatgcgtcccccgcgctccactggcccgggacctcgtcccgggcgacgtcgtccagctccgcgtcggggcaaaggtgcccgccgacatgcgcgtgccagcctcgcgtgcacctcctagctccgcctcgagcagggcttcgctcacgggggagacggcctccgtcaacaagacctcccgcgcgctcccgctcgaggacgccgacatccaggccaaggactgcatggtcttcgccggcaccaccgtcgtcaacggcgccgcgctctgcatcgtcgcgcgcaccgggatggacacggagatcggcgccatccacgcccagatccaccaggcctcgcaggaggacgacgacacgccgctcaagaagaagctcaacgagttcggggaggcgctcaccaagatcatcggcctcatctgcgccctcgtctggctcatcaactgcaagtacttcctcaccttcgacctccagggaggatgggtgcccaggaacatcaccttctccttcgagaagtgcacctactactttgagatcgccgtcgcgctcgccgtcgccgccatacccgagggcctgcccgccgtcatcaccacctgcctcgcgctcgggaccaggaagatggctgccaagaatgcgctcgtcaggaagctgcctagcgtcgagaccctcggctgcaccaccgtcatctgctccgacaagaccggcacgctcacctccaacaagatgtccgtcgccaagctcgtggccgtcggcgattcctcgcaggaggttaggaccttcaaggtggacggtacgacttacgatccccgggacgggaaaattcacgactggcctgctgggagcattgacgccaaccttgagacgatcgccaaggtcgcagctgtgtgcaatgatgccaatgtggcacattcttcgcatcagtatgttgccactggaatgccgacagaggcagctcttaaggttttggttgagaaaatgggtctgcctggaggaaagaatggtctgtccttggatccgtctgagatactaggctgctgcgcatggtggaacaatgttgccaaaaggattgctaccctcgagtttgatcgcacaaggaaatcaatgggcgtcattgtgaaaacaagttcaggaagcaatgccctgctcgtgaagggagctgttgaaactttgcttgagcgaagtagccacattcagctgaaggatggttccgtggtgccattagatgagaaagcaaagagaactatcctggcaagcctccatgagatgtcgaccaatgctctgcgctgcctcggttttgcatacaaggaggcgctagcagaatttgcaacatatgatggcgagaaccatcctgctcataagctcttgctggatccggccaattatgcagctattgagactgacctaatatttgcgggtcttgtaggcctaagggacccaccccgggaagaggtctatgatgctattgaagattgcagagctgctggcatccgagttatggtgataacaggggacaacaaagaaaccgctgaggcaatatgccgtgaaatcggcgtgttttcacctgacgaggatatcaccttcaagagccttacagggaaggagttcatggcgctggaggacaagaagacgctgctacgcaggaaaggtggcctcctgttctctagggcggaacctaggcacaaacaagagattgtgaggttgctgaaggaagatggggaagttgtcgccatgactggagatggagtcaatgatgcccctgctttgaagctggctgacatcggtgtagctatgggcattactggaactgaggttgccaaagaggcgtctgacatggtgttggctgacgacaattttagcaccatagtttctgcagtcggtgaaggaagatcgatctacaacaacatgaaagctttcataagatacatgatttcgtcaaacattggtgaagtcgcttctatattcctaacttccgccctgggcattcctgagggtttgattcccgtccaacttctatgggtcaatctcgtcaccgacgggccccccgcaactgctctaggtttcaatccgcctgacaaggacatcatgaagaagccacctaggaggagcgacgactcactgatcactccctggatcttgttccgctacctggtgattggcctttacgttgggatggcgaccgttggcatcttcgtcatatggtacacacatgggtctttcatgggcattgacctgaccggagacggccacactctggtcacctactcgcagctttcgaactggggccagtgctcttcctgggacaacttcacggcctcgcctttcaccgccggagccagaacgttcgcgttcgacgacgacccgtgcgactacttccacgcaggcaaggtgaaggcgacgacgctgtccctgtccgtgctggtggccatcgagatgttcaactcgctgaacgccctctccgaggacagcagcctgttggccatgccgccctgggtcaacccgtggctgctcgtcgccatgtcggtctcgttcggcctccacttcctcatcctctacgtgccgctgctcgccacggtgttcggcatcgtcccgctcagcctcaacgagtggctgctggtcctgctggtggctctcccggtggtgctcatcgacgaggctctcaagctcgcgggcaggtgtacgagcccttcttcgggccccaccaggcggtccaggaagaagaagcagaagggcgagtagcgagcgggcgctaacatttgactccgtgctcagttactaaaccattccattaatcatgtaaacaaaagatgaacctcagtcagtcaatcaatcaatacaggagataacccattttcactgtttctctttctactctctctccaccctaacgccaaaacaacagcagcacagtagcttctttgttctcagaacaagttgttaattagttggcaacatatgttatcctgtgaattatgtagcgttgagtcagatctttataaaaaaataata

SEQ ID NO: 41925 - DNA, 118 bp, Zea mays
  Clone ID: MRT4577_138235C.1
tatcgcgagcggccagcccttttttatttcaaggaagtgaggtacactgcacggtctattacaccttctgcttatatgaaaaggcactcaaaggtcgccaacttcaaagagactcatt

SEQ ID NO: 41926 - DNA, 292 bp, Zea mays
  Clone ID: MRT4577_138236C.1
aggaagcaaggcgttatagaagtttctaggctccgcgcctggggccgctgatctgagtggtccctgatctaatggcgccatcactcctcggagccatgtcaagatcaccattcgtagccaacaacgggaggagtcacaggacactaggtgctgctgatacccaagaggctggacggcgcgtagacgcgcttacgtgcgagcctgacagagttgcgccgcagaatgagcgtgttctcgtccgtcgtgagcatatcgctgaaaaatctgctggcggtgtgttacaacaaaaatc

SEQ ID NO: 41927 - DNA, 405 bp, Zea mays
  Clone ID: MRT4577_138237C.1
gagttcaaaatgttacgtagctttataactttgttaatcaatgttgttttgatatcatctatccaacgatggaatcgagctacttaactcttaaaaaacatacatgtttactattttacacaaacacactacagttaattcttctcgtgggtagactgatctgacgaacctgaaacaggtgttaccaagctgctatagctactacctcaaccgtcttctgatcccagtatcccaccacaccctttactacaagcctctaaagcctgaactgagaaaaagaaatcctacgaggctacgacgttagaagctcacggatcctcacaagcgctgatggttgcctaccgctcctacgacgccgacgacgaagctgttttttctggtgaccctgatttatcataagacgat

SEQ ID NO: 41928 - DNA, 377 bp, Zea mays
  Clone ID: MRT4577_138238C.1
cttcatattccaagtactcatgctgatcttggaacagatgaccggacaccgaaagattgagattgtcgagaggatcggcatggatggaaggcacgcaaaccaaatcgctggggctcttgaggaatcttagcaattcaagaaggaacaaagtaacaagtctattagtgaggtcaatcaaccatcaaatgaaagaagcaaagaagagtattccattggaaagtgcgtagctattttggagtcaatggaagatctaagtgaagaagaaatggctaaagcattaggagtgtgaaagtgtgaagaaaaccgggagatctttatgactaccacgagggcacgtgtaaggttgtagtgtctaagggatgagattaacaaacagg

SEQ ID NO: 41929 - DNA, 1192 bp, Zea mays
  Clone ID: MRT4577_138239C.1
attggattcggcgtctgcaggactttctcgtgtagcatcatttccgctacccaaatctctccatccacggcgacgcccgacgccatccgtcagccagccccatctccaccacccctccccgtccccgacgtagcagcactgcagcagagcggagaggcggccaagccaactcctcaccggtagctcctccgcgctcccgggctccgtctcgccgcactcggatgccccctgcgctggcgcctagagcggcggcggtctagcgggcgccgggagcggtgaaatccacccatggccgacgctctcctccttccgtgccgcttcctcgcgccgttgtcagtcgcatccggcgcctcttcatcagcctcttcgtccccgccgtgtcgttgggtgctctcgtcgcccggctcgccgtggcggccgcgcttggctgccgggcaacggcaaccccgacctcgccggttcactcggcacaagatttgtgcagcagagcgtggtgagcaaccgaaatggtgggagaaaaatgctgggccaaacatgattgacatccactccacagtggagttcttggatgcactaagagatgctggagacaggcttgttattgttgagttctacggaacctggtgtgggtcatgcagggctctctttccaggctctgccggacagctttggagacccctgatgtattgtttctaaaagtgaattttgatgaaaacaaacccatttgcaaacgactgaatgtcaaagtccttcctttcttcatttttatcgtggagctgatgggctactgcatttgcatttgcatttgcagtttcagaagctgaaggatgccgttgcaatgcacaacacggctcgttgcagcattggtccacctgttggagttggcgatgttgacttgctggatagcacgagccctcaagagaaacctgcagaagctagcccacattagattaatgagaaggagctcctccccatccacgtctacatcctgctcattgttttcttcactatagaccttaatgtaatcagttcaggagaactaaagtaccctcaattcatgaatcagatgtatggattatcgtacgcattcttgaaagggaaaaaagtgtataatagtgataactatacgttttttggccaaaaaaaaaaaaaaaaaaaagggcggcgctcgcgatctagacggacgcgtggg

SEQ ID NO: 41930 - DNA, 914 bp, Zea mays
  unsure (1)..(914): unsure at all n locations
  Clone ID: MRT4577_13823C.1
acccattgccatattacgtcggcccgctaggccgctactacccagaaggatggcggcggcggtggtggtgaggcgtgccgctggccttatccctctcctctcctcgcggttcggtgctcgcatgcccctccaccgggcgctatcccagatccctccgcctcgctcctgtcgcctactatcgcagcaaaccaagcccttctccgcctccgcgtcgaatggcgcggctacggactgaacccgcgagctgcgtctgtacaacaccaagtcgcggaagaaggagcagtttcggccgcgcattccaggcagggaggtcggcatgtacgtctgcggtgtcaccccctacgatgacagtcacatcggccatgcccgcgcatacgtagcctttgacgtcctctacaggtacttgcgctatttggactatgaagttcgctatgttcggaacttcaccgacattgatgacaagataattgcaagagcaaatcagctgggggaagatccttttatcttaagcaaaaggttctctgatgacttcttgtcagacatggccaatcttcaatgtctaccaccatccgtggagccccgtgtttcagatcatgttgatgagattataaatatgattaaacagatccttgataaccgttgcgcatatgtagtgggtggggatgtttatttctctgtagacaattttcctgactacggngaattatctggtagaaagttagatgataatagagctggtgagagggttgctgttgatgagaggaagagaaatccagctgattttgctctatggaaggctgcaaaagatggggagccatggtgggatagcccatggggcccaggaaggccaggatggcacataagatgcagtgccatgagtgcacattatttgggtcgttcttttgacatacatg

SEQ ID NO: 41931 - DNA, 276 bp, Zea mays
  Clone ID: MRT4577_138240C.1
ctagttctaggtcgcgagcagccgctccgatctagaacctgctcgaggctctgggcagggttcgcacgtagggtacctagctcgctctgctagcctaacatggctgatcacgaccggggtgcgacgggaggtagcgggggctacggcgacctctagcgcgggggcagcatgcagtgctaggcgcacagcatcataagcagggtgcgatgatgacggcgctcaaggccgcgacggccgcgaccttcggcgggtctatgctgggtgtgtccgcgctga

SEQ ID NO: 41932 - DNA, 552 bp, Zea mays
  Clone ID: MRT4577_138241C.1
ttgagcggccgcccgggcaggtacaagctttttttttttttttttttttttttttttattgtttttttttttttttttttaaaatttgtaattttttttttttttttttaggttggaaaaaagcttgttcctaggacgttttttttttattttcaattttttttcaatggaaaaaagggctactgcatttttttttttttggtgggaggcttttttttttgaaaaaattttttttttaaatggcaacaatttttttttttttaaaagggttcccccattagtttttttttttttgtagaaaggctgtgtctgttgatgggtcaagaaagaagcaccacttgtttttgtattttgataaatggcgggggtatttgctgcttctttttaaaaaaggggttcatttttgtttttttattaaaagaaaaaaatttttgttgcttagagtttgaaaaagcacctttttttttatcacaataaaggcgaattgtataaaactggccgattttactaaaggaaaaaagctttgtttcaaaattgggggaataatggttt

SEQ ID NO: 41933 - DNA, 373 bp, Zea mays
  Clone ID: MRT4577_138242C.1
cccttgcttcgttttctccctcgcgtactgcacggggtctgactaaaacgttacgctgaccataacacacagggcatccaaaaacaaactgcctaacatcacaaaataggcacaggactcctcccgtctgatcattcatgtactgtacacacacaaactaacatacatgacagcactcaaccttgacatgctgctttaagaccccaatctgtaagctagcatattgaccgcataggacattatccatatgctgagtacccagaatctacttacaatatacgatcctaacatttttctgagcacgcaatacttactggaagacaactggcggcgcctgcggcttgtgctcctgttgattcccatattaattggt

SEQ ID NO: 41934 - DNA, 376 bp, Zea mays
  Clone ID: MRT4577_138243C.1
ctatatctgtagccaacacacacataggtactcttcattccattccattccatctcaaaggatagaataatgtgcggcctctccaccaagctgttcgtggaccatcttctgctcgtttgttacaccgtgacgcacggtgggcccgagactattgtgtctgggaagaagtgcgagtagaacagcttgcacttcaagggaccttggtcgagggacgccaactgcgcagacccttgtctgaccgaaggtttcacccacggactgtgcaatggcctacgccaccgctgcttatgaaccaatgactggtaacactgcctcgcctcgcgttctgcgttggcatatatagcacccacggatcacctaaacatgcatgcctgcg

SEQ ID NO: 41935 - DNA, 319 bp, Zea mays
  Clone ID: MRT4577_138244C.1
ccggtcgcccaccgtcctactagttctgatcgcgagcggccgccgcgatctaaactatgtttagatcggagcggcgttgagatcagttttgtcgctgctcgccgttatttgtctgtttagcggcgtactgtgtcctttttcttctattctaattctttttgtgggggggacctctttacgaggtttatatttttcctttttgggagaatccatatttctatacttattttgtcacattctttcagttttcactgtctgagatttgtaacagtatactgttttttgctccacctgaagtgatgctgatttttgcttgttt

SEQ ID NO: 41936 - DNA, 251 bp, Zea mays
  Clone ID: MRT4577_138245C.1
ttatttttatctttttgggttttttttttacatgaataggaactaaccccccccaaggcttaattaacaacaattaatatgatctggtgttttgtacatagactatagtccaacccattttcatgcggaccaataccataggccaaaatttttttcacaaaaactacctactgaaagactttttgctttttcttacacatccatacaacggattgcatgtcctcccttttaccggtctgagtaaggatagg

SEQ ID NO: 41937 - DNA, 692 bp, Zea mays
  unsure (1)..(692): unsure at all n locations
  Clone ID: MRT4577_138246C.1
tacgcctgcaggtccggtccggaattcccgggtcgacccacgcgtccggcgaggaggaggcgagagtggccgccgctgctacttcattcttttttttttcagtgcagccggggagagcgagagagcgcgctgcgcgagagtgggaggcgaggggggcaggccggggagaggcgcaggagcccttgcagccacgcgcgcgccttgtctagggtgcctcgcgaggtagagcgggcatcgcgcggcggcggcggggattactttgctgctagtttcggttcgcggcggcggcggcgtcggcgggtgtcgtcttcggcggcggcagtagcactatgtcggaggagcagttcggaggggacggggcggcggcggcggcaacggcggcggtaggcggctcggcgggcgagcaggagggagccatggtggcggcggcggcgcaggggccggcggcggcggcgggaagcgggagcggcggcggcggctctgcggccggaggcaccgaaggaggcagcgccgaggcagagggagccaagatcgacgccagtaagaacgaggaggatgaagggaaaatgtttataggaggccttagctgggacaccacanagaaagatctgaaggactacttttccaaatttggtgaagttgtagactgcactctgaaggtagatcctatcacagggcgatcaaggggtttt

SEQ ID NO: 41938 - DNA, 405 bp, Zea mays
  Clone ID: MRT4577_138247C.1
ggaactataattgttatataattaaccttggtatactgttgttttaaataagtatgaaaaattttttataaaaagggggccaaggggggggggaaaacaaaaaaaacaaaaaacctgcgtcggtgttacacagttgacaaatgaagaagacccaataaacaaaaaggggggtcaaaaaaaaccattagaaatgggctaaaaaaaagcggggatatttttgcaaaatgtaaaacagaaaaagaaccgattaaacaaaaagggacccccaaaaaacctttaaaggttcttttaaaaaaggggcaaaacaatataataaatttatgccgaaaaggaggcaaatttcaaaaaaaaacaacacccggtaatttatggagggtggtttcaaccagaggggaaacaaggtgg

SEQ ID NO: 41939 - DNA, 577 bp, Zea mays
  Clone ID: MRT4577_138248C.1
atcccgtggttcggccaagtacaaaacttgcctacttccacgttgtggcgtcccaacggacgagagttgcactcaactcctctcaagtgatccaatgatcaacttgaataccacggtgttcttgcttttcttttctcaatcccgcttgcgaggaatctccacaatttggagcctctcgcccttacaaaagatgttcacagagaatcacggagcaggggagggaatgagcgacgcacacaagacttcaaaagatcagagcaacacgcacacaagcagcaataagagctcgcaacacaactcaaagagtacacaactccacaagagctctatatgctatcacaatgaatcgaatgcgctagatcaatgtcttggtgcttagaaaggttgtaggaatgcttggttgtactcctccatgcgccaaggggtcccttttatagccccaaggcacctaggagccgttgagagcacatctggaaggctattcttgccttctgtcgtcgggcgcaccggacagtccggtgcacacctccgaccgttggctcggccacgtgtcgcgcgccgatcacgcggccgaccg

SEQ ID NO: 41940 - DNA, 1929 bp, Zea mays
  unsure (1)..(1929): unsure at all n locations
  Clone ID: MRT4577_138249C.1
aacacaataaccacaagaaatcaatcacagagatgacacggtggtatcccgtggttcggccaagtacaaaaacttgcctactccacgttgtggcgtcccaatggacgagagttgcactcaactcctctcaagtgatccaatgatcaacttgaataccacggggttcttgcttttcttttctcaatcccgtttgcgaggaatctccacaacttggagcctctcgcccttacaaaagatgttcacagagaatcacggagcaagggagggattagcaactcacacacaacacaaagatcacagcaaatacgcacacacaagacccagacttgagctcaaaagactagcacactagaacggagctcaaatcactagaatgtcgaacaagtgcgcgagattgatgtgtgagtgatcaagagtgctcaaggaatgcttggtcttctcctccatgcgcctaggggtctcttttatagccccaaggcagctaggagccgttgagagcacatctggaaggctatccttgccttctgtcgtcgggcgcaccggatactgtccggtgcccgatctctttccttatttggcgaagccgaccgttgcagattcctagctgttggcgcaccggacactgtccggtgcacactggacagtccggtgccccttttgaccgttgactcttgccacgcatcgcgtgcggattacgcggccgaccgttggctgggccgactgttggctcactggacagtccggtgcacaccggacagtccggtgaattatagtcgtacgtcgccgatgatttcccgagagcagcaagttcgcctgagtcagcctggcgcaccggacactgtccggtgcaccaccggacagtccggtgtgccagacagagctcagtcttgcctgtacacagccaagcctttttcacctgttttcttttcttcttctttctgtttcaaacacttagacaattatattagtacacaaaaccaatgtactaaggcttagaaacatacctttactcttgatttgcactttgttcatccatgggcatagattcacatttaagcacttgtgttggcactcaatcaccaaaatacttagaaatggcccaagggcacatttccctttcaatctccccctttttggtgattaatgccaacacaacataaagcatctagaacaagtgcaatattacttcaaataaaaactcaaatttattttgattcaatttggcatatatggatcatcctttgccaccacttgggctgatttagcaaatgaaactcacaatactatctctaagccaaatccacttgtacagacataagagagggttcctcacgaaaattgattcaagaatttcaaaaaactcccctttttcccataatcaacacttcctccccacaagaggccaacttttgacacaagagacaataaaagagttttgacaaaccaaaagctctattctactattttcaaaatttctcaagtggtagctgatccatttattgctttggcctttattttctccccctttggcatcaatcaccaaaacgggagcaatcttggccctttaaccccattgccttaccaaaatcttcaaataagaatataaaggtaataggaggacatgagatgaacttggaataagttaccctctcatcggagtgcagtggaagtctttcatggtccaagtccaccttttccctttcaaacctccttttgagactaaaacaagcaaactcaagcatacggttagtctcaaagggtcaagttgtagcacatctcccccttaatatgtgcatcacgtgcaaaggacttgtgaggtctggggagtgcttgtacaacttgagcaccatacataagcaacaaaatgcataaggacatgatcaaaggcataaacacatgtatgctataaatcaaaccaagtnccgcgaa

SEQ ID NO: 41941 - DNA, 796 bp, Zea mays
  Clone ID: MRT4577_13824C.1
ggaccacacacagcccgcccgtcggcccgctaggccgctactacccagaaggatggcggcggcggtggtggtgaggcgtgccgctggccttatccctctcctctcctcgcggttcggtgctcgcatgcccctccaccgggcgctatcccagatccctccgcctcgcttctgtcgcctactatcgcagcaaaccaagcccttctccgcctccgcgtcgaatggcgcggctacggacagaacccgcgagctgcgtctgtacaacaccaagtcgcggaagaaggagcagtttcggccgcgcattccaggcagggaggtcggcatgtacgtctgcggtgtcaccccctacgatgacagtcacatcggccatgcccgcgcatacgtagcctttgacgtcctctacaggtacttgcgctatttggactatgaagttcgctatgttcggaacttcaccgacattgatgacaaggaaacctgagttgcacttctggaattatgtagataattgcaagagcaaatcagctgggggaagatccttttagcttaagcaaaaggttctctgatgacttcttgtcagacatggccaatcttcaatgtctaccaccatccgtggagccccgtgtttcagatcatgttgatgagattataaatatgattaaacagatccttgataaccgttgcgcatatgtagtgggggggggatgtttatttctctgtagacaattttcctgagtacggagaattatctggtagaaagttagatgataatagagctggcgagagggttgctgttgatgag

SEQ ID NO: 41942 - DNA, 691 bp, Zea mays
  Clone ID: MRT4577_138250C.1
ttttttttttttttttttttttttttttttttggagagcagaactcattgcattatctggtatgagccatcgttcaagagttccaatgaaaatatcaccacttggcatagcaattcaaagcagtagaatagcaataacctaactacctaaggatggtacattaggcacagcagacacaagggaagcaagaaaagtatttcaatcttccccgacaactttaaataaaggtaaccagccaacataaactacaactattgggtcccctctgtatctcggttcttctttttcttctcctttttcttctcacttctctcagcatgtgtgccatcatctccattctgagcactctctggatcagcatcacttccttccttgctcttcttcttcttcttcttttcactccccttctcatcagatgcatcaacctcctccttgacctccacagctttagctgatcttgattcccccttgcctttctttttcttcttctcactcttctccccttccactgcttcagcagcttcctcaaccttgatcttctttgcaggaatagaagcatcggcatcattgttctcatcatccttccgcctcttctttttattctccttgacttcttcagtcacagctgtgtcctgctccaccttcaccttctctggcctcaggagcagctgcaagctggcaagaaacatca

SEQ ID NO: 41943 - DNA, 1038 bp, Zea mays
  Clone ID: MRT4577_138251C.1
cgcgtgacagcatgtgggagcaaagttgggaaaatggatatcgtcggtggtccggaggttggtcctctaagatgttggccaggtggtttgtgtctatctagatccataggggatcttgatgttggtgaatgcatcattgctgttcctcatgttaagcaagtgaagctttctaatgctggaggcagaattatcattgcaagcgatggtgtgtgggatgatttgacttgtgaaatggctcttgattgttctcgtgggttctcatcagatgtagctgccaatcgaattgttaatgaagcaacccggcctcgtggaatcagggatgatactacttgcatcgtaattgacattctaccaccataaaatatagtcccgagtcctcgtaagagaccccgcaggattacattcaataatgtgtttcgcaaaagacatctagacgtcccccccgaaacaaatagatcagaatatgctgaaccggatgtggtggaagaaatatttgaagatggctctccgatgctttctaaaaggctaactaccggatatacacttgagaaaacttttgcaccctccagttgtgcagtttgtctggtacggttgaaatctggacagggaatttcagtgcatgataacccattgcaatatgagaaactacaaggttggcagggtcctttcctgtgcccgagctgtcatgaaaagaaagaagcaatggaagggaaacgccggccaaaaggatcttcatcaaacgtctttggtcacatgtgctaggcctgcctaccactaaagattcttttattgattgttagctggaaataatagtcagcccataacaattcattggctagaattgaccgtttcagttgagtaagacggaatattcttgacaaacagcctggagatttattcatcagtttgagtagagcataggaaaacccatcttttttttcgaaggactacggcggtgtccgcatctaggcatttcactgtacagactcttgcttgttagagatcttctaaaaaaaaagaaaaaaaaaaaaaaaaaaa

SEQ ID NO: 41944 - DNA, 189 bp, Zea mays
  Clone ID: MRT4577_138252C.1
ggcctgtggctgaacatccctgactatgatgctcccacacagctggtcaagcccaaggagaggaatgagaggtatgtcgatgctgacatgacaatcccaaagggaacctcggtccccacgtgagggaagaacctagccttctacagagaattcattggacctgatatgtacattggtctaatgggtgaa

SEQ ID NO: 41945 - DNA, 840 bp, Zea mays
  Clone ID: MRT4577_138253C.1
gaggtcggccgggatcccgcaggcagtcgcgcacctcctctcctctccactgtcgccccctcctcgccgccattactgctcgtcgcgtccttgctgtgcgagctcctcactcgctcgccggtgggttactcctcagcgaacagcttcgcctggccacaccagtcgcgcggcctccctgtgctacacatcccgcgaccttcttcctctgctgcctcctgcctgcatcccgccggtggacgcaccccgccccgcatcccgcgaccttcttcctctgctgcctccacgggagccttctcacctccacacgtcgttgcgtcagatccgtctgccgctagagaaaaccctacccaatgaccacatgcattcttactggggcgacgccactattggcgcagaggagccgatatggcgcatcgcatgtactccgtcgctgccctcctcgaatccgcctctttctccaacgccacaggcaaggagatgcctgcccaccgccccggcaccccccgccctcgccgcgcacaccccaagccccgcggatcacagtcgcctctaccctagcgggagccgcgcccgcacccacattacccgcacgatggcaagaggcagcggcacaaggccacggcgactcctcgagcagaggaacccgaccgagcgcagcaacgcaaatcttcaatctcaaatccgtgctgcgagaaagggagctcccacaagtggtatggctcgatagaggttatttggatctgtgatgcgatagaaattcatggtttaaagataggggtgacgagcagccgcgggtggctgagcacttgctgtcttgcatcaaggctgaaggcagctgca

SEQ ID NO: 41946 - DNA, 424 bp, Zea mays
  Clone ID: MRT4577_138254C.1
ttgagcttgcagcacccaagcctcggggacgactacgacaaagatcagctgaacaggatggtcgcggtcgcgtcccgctgcatcatgcgacggacgcgtgggtttttctttttcttcgaggttctgcatttcctgtctactactgatgagtgtctgaacgagcccgagaaatggaacattcccgacgacgaggtggacgacatggatgattgtacactgttctctgaatccttttccatgtgattgtagcctcatttttttcccatttccttttagtgtgtgctatgttggcatgccgttcttggcatgggatggaggcattgagctatgttttctggtttttttgtagtcttagatgactggtatttaatcatgcgatatatatatgacggggattttgggatgtaaaaaaaaaaaaaaaaaa

SEQ ID NO: 41947 - DNA, 879 bp, Zea mays
  unsure (1)..(879): unsure at all n locations
  Clone ID: MRT4577_138255C.1
cccacgcgtccgtattaggactagtttaggaacttcattttcttaaggaatttctatttttcaagaggacttggataaatgaggttcccaaactagtccttaacaaatttcactcgactagtaaaatagtactattattagctactagaaaaatattgctaacaatcagttaaactattagcaacatgtatttggattcaagaaaataattatgagtagctaattagtaattactatctttcttgaacctaagtaggatcataattaataaaaatcctatagtttttagagagccaagataggatcataattaacataaataatgtagtttaattttttgatagacagtactagggcatgtttagtttcattgtgctaaactttagcatcacttaaagagataaagtgctaatgtatgttaaactttagcattttacttttaatatcttctagtatattttagcactcatgtttggatttacaagagctaaagtttactaaagatgtagtgctaaactttagcattatggaatcaaacatgcccttagagtgtacataataagaactgcacattaggccttagactgccttcaacaactaccttattttattctatattttaaactttactctgcaatcagtataatccatagtataaataataaatctcttattttacatgatctagtgtacataataagaactgcatattaggccttagctatcttcaacaactatctcatttcattctatatgtcaaattttactctgcaatcagtataatccatagtataaatctcttattttacatgatttggtgtggacaatctttacatggatggcacatggacctgagacacattgnacgacatgtgaaac

SEQ ID NO: 41948 - DNA, 181 bp, Zea mays
  Clone ID: MRT4577_138256C.1
tcggacgactcaaggaggtttgcaagccgccaggcaatgaggctaatcttcgcaccaatgccattggtagccaatttagtccacggtttgtggccaaaattttggttggaaagaacgtcttttttaatcttcttaacaagttgactgttgatatttgacccttgaaattcctttgatttgg

SEQ ID NO: 41949 - DNA, 221 bp, Zea mays
  Clone ID: MRT4577_138257C.1
cggcggcggcaagaacaataataaccaaaagcctttcctggcattggacctaaggcatgcataacggattcctcccggttggcaaaccgtacaaaattacacagcgtgctaccatgaaacttgtacataaaacgccggttaattaattgtaaccttaccatggaaatgtgctttatacgtatccccgtatgcaatatatatgaattatcacttatcaataa

SEQ ID NO: 41950 - DNA, 243 bp, Zea mays
  Clone ID: MRT4577_138258C.1
tcgatttacgacaacccaaacaaacaacccccctacacacacacacaggggcccggtcccggtgggcgtttctattctatgcttttggccgcccatcaacgaacgagtcgcaaccggatccctacttacccgagggcgcttggccgtctcttaaacccgaaggagcgcgcgcgtttgacattggggagctcgcggggggttttttttccccgccgcccgccgtgctgtaagtggtttttttct

SEQ ID NO: 41951 - DNA, 346 bp, Zea mays
  Clone ID: MRT4577_138259C.1
agggggcacagcattttgctcatttttttcccaagacggcaaaaactgcagatagttccattacaacaagctgctttaccgacagaaccccggatcgagtcagtccaaaaacatgctgtacggtacaaagcctaccggttttttttgctcaaaagcaggcactgcctttgtcaaatgctgcggcagcacggcaagcgtgatggggccgtcatgcttttttttttttcttcttccagggtcagggttgccaatggcccatgggtgaacagaacagaacaggccggtcgtctatttccacccagattggaagatcaccgggggcgggaggcaacgggtccggggcatt

SEQ ID NO: 41952 - DNA, 255 bp, Zea mays
  Clone ID: MRT4577_13825C.1
tctaatacatccacgaaccaatttctcagtaaccagtacccactacctgtgaggggtctaaggaagtatcaatgttttttgttcctagagcactatataccgaaaccaaaggggccatccatcgccatcgacctgggaacagcctcctaaggtgagcatgtacgacattctcgatcgaggaccggtaagtgctaacgcccagccataccgtaccactcctaactaccctggcttcaccgacacctagcggttcat

SEQ ID NO: 41953 - DNA, 418 bp, Zea mays
  unsure (1)..(418): unsure at all n locations
  Clone ID: MRT4577_138260C.1
ctttanacggccggccttttgtgtttttttttttttgatnttgagggggggggtttanagntatacatggngttacttnngatttttttgagatgaattttagtgaccagttgtnagtatgtacaaagcatttagtttgatantgtattatactataaccaggttaccggtnngggtannnnanntttnatacatacgtggacgatgtacatgtgcgcttgcggacggnctatttgtgcctgggtatnaaggggataaaccagatgcttttgggctgggtgttgagntngtccatgctttggttgatagttgtgatgatgttgctttggaggtggaggatggaggaaagngggtttcgttgggtggtggttttgtttgggtttatttgggtaaggttttgaaantgtggttttgtaaa

SEQ ID NO: 41954 - DNA, 591 bp, Zea mays
  Clone ID: MRT4577_138261C.1
tttttttttttttttttttaacaatggggcttttttattcgaccagtgtatggtatgcagaacacaacaggaggggagcaagggcgaacgtgcactgggcgcgcatgcatgggtctgcatgcatgacacaacaatacaacatgcatctagtcggaaccagaggccttagtcctatgatcgtcgacgaacagcttaatgtgctcgattagtttgccggagtgggggagctccgggaacacgtagaagccatggaaggcgtccgggtagtcgaccaccctgaccagcttccccttcccacgcaacggctccacgtaccttgcgtgccagtccttgagtaggtggatcccaccggtcaccaccatcggcggcgggaacgtgtctgcgagcgtcaacaccttccccgcacacgcgcgccgccgggtggtctcggctgggtccctcgggcaagaactccctccagtagcgatccgcacgagccaccgacaatatgcggcacgccttgtgcagccttacctcgggctccgtgcgctcctccccgccgaagaacggttgtatgaggacggcaccggccaggcggaggcgggggatgcg

SEQ ID NO: 41955 - DNA, 340 bp, Zea mays
  Clone ID: MRT4577_138262C.1
gaggtataaaaaaaaaaaaaaaaaaaaaaaaaaaaaaaaaaaaaaaaaaaaaataaaaaaaaaaaaaaaaaaaaattaaaaaaaaaaaaaaaaaaaaaaaaaaaaaaaaaaaaccataaaaaaaaaaaaaaaaaaaaagttttttccttgggccggaacccttttaaggggaaattttaaaataatcattaaacttgggggggtttaaacattcatttaagggggccaatttccccttaaagggagtggtttaaaaattaatgggcctttttttaaaaactttttaattgaaaaaaccttggttttcccaaattaaacccttttgaaaaaaatccctttt

SEQ ID NO: 41956 - DNA, 302 bp, Zea mays
  Clone ID: MRT4577_138263C.1
gccacgctttcgactacgcgtcagtctgcatgccaaaggggacactctctaagcacgggggcggcaggacctaatagccttcacccgtgacaacgtacgaactacaggatacactccaccgcttcaagctggcatagagcagatattctgacgcaggagtcatcaccacctgaccgaccacctagagacaaactgcgaccgggggttccattaaacgagacgaagcacagactgggagtacccttatccgagctgtaacaggagggcgaatacaggaagccaatgcccggcgctacataaag

SEQ ID NO: 41957 - DNA, 329 bp, Zea mays
  Clone ID: MRT4577_138264C.1
ggggcgacccagggcattaaaaaactttaacccccacagtataaaaattcgggagtacaaacaaagggccaaaggccacccttttgaaaaaccaaacttttgcaaaaaccctccagggaaaaaaaaatagtcatgtgcattataaaaattttttttcacattttcctccttggggacaaaaaactccccttcaaagaactcccatggcttgatggccacatttaactgcttgggcattttttttacaacaaaaccctcgctttttttgcatattgggaccacaaacccttttcgcccaaaacgtccaattttttcagctttgtgaacat

SEQ ID NO: 41958 - DNA, 413 bp, Zea mays
  Clone ID: MRT4577_138265C.1
gccttaaaaacaggcgccgaaatcagcccctggcatggcgtaatttgcatcgaaggcaggccatcgtctgtgtatcgctccagaggaccggaagtgcccgcttggactacatatcagactggactttgcctgggcggggggcgggagactatcgttaagaacactgagactagacgaacggcatagtcattcccacggacgtgctcgcttgcctccactacagtcgcgcctcccccggttttgcacgaacctgtatgcttggcctgctcgtcggagctctgaacaaggtggcttctgacaccctctttgttctggcagtgtatgcgattgtaggggagcctggtgccttcggtgaggctaggtgcgcttggcggcctgccggttccttaacaagccttgctgactctgcggag

SEQ ID NO: 41959 - DNA, 520 bp, Zea mays
  Clone ID: MRT4577_138266C.1
tataattttcttggtttatcgctctttcttggggggttcttttaccgggaacggccgtgcccaccggcacaccacaaacccggaaatgaaacacgaccccacaatgcgtcgagctcgctgctctctccgacgataatagggaaaaaccaaactgtctgctaaggtcataatcccacattccgacgaagcaggtgttctaaatcaaccagaaattaccccgggtttatttaaagaacgcacaagactgtccatgggtaaagcactggtcagaaactttaatatgaaagcacccaccagctggagtcctgaaggacgtacttgggctatcgacagaggaatacatcactattggccatcggctcaagctgatggccatatgaccagcgcagggaacaccattggcctaaagagaatgttcccattcacaaccacaaaagcgttcacaatggaatgcgcccacagaattgaccactggggggggtctgtgacaagtgtgccaagaaggctccaccaacgcccc

SEQ ID NO: 41960 - DNA, 2218 bp, Zea mays
  Clone ID: MRT4577_138267C.1
cctcgaggccggccggggggggctcatttcaggcctaatcgctctagcctgcgcttgccgcttcgtctccgggcggccgggcgggggaagaagaccacctggatccatctccttctcggtcaactacaaggagatcttatttcggttacaatgaagcgcatgcacagaatgcaaacgagaaagtcccattcatggtggtgggacagccatattagcccaaagaactccaaatggctagctgagaatttggaagagatggacaagcaagtcaaagagatgctgaagctcatagaggatgaaggtgattcttttgccaagaaggctgagatgtattttcaaagaaggcctctgcttgtaaatcatgttgagaacttctatcgcatgtaccgtgctcttgctgagcgctatgacaacgtgactggggaattgcgcaagggtcttgcgctgcagtctcagggctctggtatatccgaaactgattccgagacacaatcaacttcatcgtgtccagagcctaacatggaacagaacacagcaaaaccgaagcgtaatgtgctccttggttctggtggaagctcagacatttccaagaaggagagtgatggatcatcttcttcttcttcagattctgattcagaggttgacgaggcaagtgaagaaaatggcaatgggatttcttatataagtgatgaacggattgctgagctggaagatgagcttcaggaagcaaggcaacaaattgaggcgcttgaggtaaagaacatgcactgccaatgtgagaaacttgaagagagtctcaaacaagttagcaatgaaaaggaagatctggtagctgcgattctggcaagcaagaatgaggtcgaggatctaaaaggagacatggtctcggcagctaaacattttgaagcccaactagtgcaccgtgaccatgagattgagaagtgcaagcaggaggctgagcaagtttctgaaaagtatttccatgagaaatccactctcgaatctgaaatcgaaaggctccaggaagttgttaggagttttgaagagaacctaacaaaagttgctggagagaaatttcagcttgaggcccaggtaaaggaacttgaacagacttctaatgatttagatgactcttctgcggagattataaagctacaagaaataatcaaggatctgcaaggaagattggaaaatgactcaaacgataagagtgtacttgaggaacgtgctatggagctggagcaagttcgtaggcagttagaggattcaagggctgaggctagtatgaagctacaaactacaattaagaacctgaatcaagttcttgaagagaaagcagaacttgagaatcgtatgaaggatgcggagcaggcaaccagcgacctaaactccctggtcggttccctcgacggcaagctgaaagccacagaggcgcagctcgaacagcttcacgcggagaaagcagaagcgatcctcgagagcgagaaacagatatccgagctgaaccaagccatcgcccgtctcaagacgcggctggagctgctgtcttcggagaaggccgcagtcgataccaaggcgtccgctctgctgaccgacgtcgccgtccgcgacgagaagctgaaggagacggaccgccacctgcagcagctgcacctggagcacgtcgagctgatcggagcggcggacgccgcgcggaaagacgcgtcggggctgcgctcacgcgtgcgcgagctcgaggtggaggtcgagaggcagaggctcatggtggcagacagcgcggaggggaagcgcgaggcgatcaggcagctgtgcttctcgctcgaccactaccgccacgggtaccagcagctccggctgctcctgcagggccacaggcggccccggcccatggtgatgacagcgtgatgagttgaagtggttattgtcctggatgttgggacttgggaagtatgtcgaaactcttgacttgaagctgctgcttctcggtgtgttgtcctgacgacatgagtgagtttctatctggatgagagcgggtgttaggaggatgtcgaaactctacatagttcgaggagagcttgtgctctgtagttactttgcactgcggagttactcgtcaatttgtgctgtgtgatgtagctatatggttctatggataatcacggtgttcccttctttattctctcagtaaaaaaaaaaaaaaactagttctagatcgcga

SEQ ID NO: 41961 - DNA, 363 bp, Zea mays
  Clone ID: MRT4577_138268C.1
tgtagatttagaaaataatctactcagggctttttagaaattatttggtttgtctcctcatcttggttgaggattggtcttttaatcttgcccacgcctagaaggcgcactatctcggttggaatgataatccatgggggggctctctcgatgccaaggaaataaccgcaaacttgctggccgcgcagaggcactcctgcggtggggtgtttgattttcgcacaccattttgctcgataagcgccggcctcagtgagatgatggcaacccttatccaaaactggcgttcgttgatgccgtgaagactgcaatggtgcaagaggctaggtggggcccatcacaggggtcggcattgacgattta

SEQ ID NO: 41962 - DNA, 227 bp, Zea mays
  Clone ID: MRT4577_138269C.1
aaaaattcccttgtcaagagaccactaattgtacaaatgtgttcattttgatgtatgcataatgatttcttacatttgacaatgtgtataagttataatgtttaacattaataacaaaggacgtatgtattaattataattttaacggggatggggatccccgttggggatttatccccgcggggaacggggatggggaaaaaatgctcctcgcgcgggttgttggg

SEQ ID NO: 41963 - DNA, 200 bp, Zea mays
  Clone ID: MRT4577_13826C.1
atagctcccaggcatccgcaccacaccttttctgcttcttcctcctcctcctagcacagctgacactgttcaattttaaacctgtgatcacctctcccagcatctgcaagtgcaactgttactccatctgctcctacaccagctcattcatcttcatgttttttaacttttataccttctataccatcatttttaatacc

SEQ ID NO: 41964 - DNA, 522 bp, Zea mays
  Clone ID: MRT4577_138270C.1
tacgtaagctcggacttcggctcgtgtggcggtggaaaagttctgcgtgatggcatgggacaagcttcagggtacccagaatctttctgcctagatacagttataacaaatgctgttgtgattgattataccggaatatacaaggctgatatcggtataaaaggtggacttatagttgctattggaaaggctggaaaccctgatgtcatggatggtgtccataacaacatgattgttggggtcaatactgaagttattgcatctgaaggcatgattgtcactgctggtggcatagattgccatgtccactttatatgtcctcagttggcagaagaggcaattgcaagcggcatcacgacattggtgggtggtggaaccggaccagcacatggaacttgtgccacaacttgcactccaggaccatcttaattgaaatgaatgttgcagtccactgatcaatcgccgattaacatgggatgtacaggcaagggacatactgaaaacctgaggattggctgaaat

SEQ ID NO: 41965 - DNA, 272 bp, Zea mays
  unsure (1)..(272): unsure at all n locations
  Clone ID: MRT4577_138271C.1
ttccagaaccgcaagactctaaaagcggcactttacaaggcttcctgccctcttcaatcncctgatatcacataaacaatgcttaatgctgttgctctgcttagtagcaccgatcgagtaaaggacaccatttttttcacccaatatgaacatatccctaccgctgtcaccggaagtgtctctctcctcaagcctgacctccatgagttccatgtacatgcacttcgttacaccaccaatttattcatgtcaactgcaccacactacaatcc

SEQ ID NO: 41966 - DNA, 306 bp, Zea mays
  Clone ID: MRT4577_138272C.1
ggggggaagaaaaaaaatggtgggattaatcatccccattctgtttaagtttccccatgcttaaatgtctcgctggggctgttgacttaggaagatggcctcagttgctcaaaggggggaaaaaaatttttgggatcaaaacatggtcgggccttggaactaaaaactcccccccagaaaacgggaacccaattccccgcggggtttatgaactgggcgagcaaaaacccctgcccaagatggtggttttttgacatactggttttatccccttggaaaaattccggcttttttcggggggttttg

SEQ ID NO: 41967 - DNA, 106 bp, Zea mays
  Clone ID: MRT4577_138273C.1
ttaacaagtcgaagaaacagaagtcgtgctatacgaccttcccaaagccccaaaagaagtggagggccctgaggtgtctgagttaaacgctaggccagaaactgaa

SEQ ID NO: 41968 - DNA, 425 bp, Zea mays
  unsure (1)..(425): unsure at all n locations
  Clone ID: MRT4577_138274C.1
cctcgaggccggccgggatccagctaccagtcgttcctatctccaattcccagtcatcatcttcctaaaaccgccatctccccaagcccttctccccgtgctcgtggtgcctaggttccatggtcgccgctgccgccaggctaggggccttgccgagcttcctcagccctagctcgtctctcccgttgccgcctccagccatctcccatggcgctctgggtgccagccgcctctctactagtggtcgtccccagtccctccatgacgagatcgccccctatagccatgaacaccaacactcctctgctcctccatccccatctcgccctttagccatgaacgccgccaaccctggtgctcgccctggaactgccctttcctgtgctcggcgcctagnccttagctcgcccccatctcctcccctc

SEQ ID NO: 41969 - DNA, 677 bp, Zea mays
  unsure (1)..(677): unsure at all n locations
  Clone ID: MRT4577_138275C.1
gttgagtcaagggcccttgaaagctcagatcaacccgacatgaaaaaacaaattgggatgatcgctggtggttctggtataacaccaatgctgcaggttgtcagggctatcctcaaaaaccctaatgacaacactcaggtaagctatcacaacaaactccaaagtttttttcgaaattggctctttttatgcatttcagccgcgctccagcgtctttctgagaaagcatagttttaccggcctgtttgggattgctccactccacgtttttttggctccatggagtggactccctcccaagcaccctagcttcacgattttctggagtagctaactccatggagctggggaggccagtgctccaaaattccaaaaattggtggagcagctcgagtggagtttttggagtagagctgaaaaacataaattgaagcagtcccaaacactagtaagggcctgtttggtgtggcgcccacactggctctgcgtgcggctccggcactgggcactggagcaggcgaagctgcatcaaacaagatcgcatggtggaacacttctacatcccatgtgtggagctggagccatttttgtgcccggagatggagtgccaaaaactgctctgcatatagnggctcctggtggcagagtgcctcgcatggaactgcaccaaacgggcc

SEQ ID NO: 41970 - DNA, 450 bp, Zea mays
  Clone ID: MRT4577_138276C.1
ataattcttcatatctttttcacttttttttttgtggtttttttttttttatttttaagggacaaaaattccctttaggggggccaaaaggagaaatccaagtcttaggaccttacctggttgtaagacctccgacaacatacccctgaaggggccgcccctgggcttcccaaacaaacaggggacacccgagcaaacagtccacccaattacagaatcaacccgatacacaactttagggggaagttttccaggccctggaaaaacaaacacgggacccgataattttttcttgggggcccccttggacaccttgggcccggggggggccctttttttcacatttttgaagactccaacaagaacccttttgcctataagtcggggcgggaaatctccccagggaggggattcccccgatatatttttccccccccatggctcgggggg

SEQ ID NO: 41971 - DNA, 232 bp, Zea mays
  unsure (1)..(232): unsure at all n locations
  Clone ID: MRT4577_138277C.1
ttttcctaanatttttctggctcgggtcatttttgacgtgttcagtgaacacacacccccttttaccaaaccttacaataaacctttgaaaaaccaaaatcgagacgaaaaaaaaactctatcccaggaaaacaaacaaaatcacacttctttcatgaatcatcagatgaagctgtactatcggcttcaacttactcccaaatacaaattcaacggtctaaaacccctattg

SEQ ID NO: 41972 - DNA, 269 bp, Zea mays
  unsure (1)..(269): unsure at all n locations
  Clone ID: MRT4577_138278C.1
ggtgnggggggggggggggggntngnttgtggttgggtactttttggttggncgggttgggatttttattgttggttttgttttagttttagttatttagttatgggggggaaaatggctccgcttctcgctgctgccatgaatcacgctgcagctcatttctgtccttaggagccacctattaggaccctacaatgagagtttcttacgggaccacctgtcgtcttcttcgccagagagcagcaagcgaacgtgtaaccctagcttta

SEQ ID NO: 41973 - DNA, 458 bp, Zea mays
  Clone ID: MRT4577_138279C.1
tttgggagaacgcccgcgtgcgggagccgggactgagtatacgtgctggatcgacttttttctactcggtggccgacataacccagttgaggtattgacagtaacgatcgggggatattccgacgcatacagaaacgtgctatacacacttgtgatcggagtcatcgggaacgcggacagctaatgtttctacgcctccaaccagacccgccatgtgggcgaccgcgcggtcttcgccttcaagatcacggatttacaaacactgggccggacccgcatcacgcatcgctaagcacgcttcgaccatgggtactggatgagatacaagagatcggacaatgtgcatgggccttatacgatattatggtagggcgtacaggtggtacgatccaccaagcgcaatggccatgtcctactggatgggactcaaacggttccaggacatgagctatgaggag

SEQ ID NO: 41974 - DNA, 272 bp, Zea mays
  Clone ID: MRT4577_13827C.1
gtggcttcgggggtcgtggtggaggcagaggcggctttggaggacgaggtggtggtagaggaggccgaggatgatttggtggcagatgccggggaggctttggagggcgaagaggcttccgaggaggcagaggaggaggaggtgaccacaagccacaaggaaagaagacgagtttgaatagcttctgtccctactgctttcccttttagatttgaaagaaaggactctggggtttttactgttacctgatcaatgacagagccttctgagga

SEQ ID NO: 41975 - DNA, 478 bp, Zea mays
  Clone ID: MRT4577_138280C.1
cgcggcgtaagctcggaattcggctcgagaagataaagaaatgaaatggcgcaacggccccggcaacgcggccagccagcgtcacgtttaccctcctcccctccggtcgtcacgcgcccgtccctctcctctcctctcctgctccgatccgtacgcaaacgcaacgccgcccgccatgccgcccgcttcgccttgcatgcaatgcaccgccgttaacgcaggaacacattttttttttttgcatcgacgacgacttgctgtcagcatcgccatgggctcgctcgatcatgcgtagtatgcatgcataaacacatgtgccctgtgccgcctcctgctttgagatgcatggacgatgatttggcatgtatttgttagccgtcgtttctagggcaccgtctatattattatgtgcctgccaaagaggaagatctgagagtggcagctgctagaaaggaggggggctgacgggacgagtctg

SEQ ID NO: 41976 - DNA, 119 bp, Zea mays
  Clone ID: MRT4577_138281C.1
acggctgtgacccgcagctaccgttagcggatgctctggcattgcggcgcaacgccgcctcatcactaggctatgagtcgccaatgagcgcacgtggtggttgctgtacggactgttgc

SEQ ID NO: 41977 - DNA, 494 bp, Zea mays
  Clone ID: MRT4577_138282C.1
cttggttattcctttttttttttttttttttttggggatataaaaccatagcgatgtacgcaaatataattccacactttgaaggaaacggggaaatatgtcttttgccatgctctaaaatttaccagaacggcacatctccattctcctttctggggggggcggaacgctagtttccgttttcgcgcgttaaagctgtgcgatgcatggatgcattatgcaaatgcaatccagtgaaagcaggcattcagagttcaggctaaaacagtttgctacactactttactgatcctgcgtcgttcctgcatgctaaaaaatctctcgctagcctgtagcatttcctgctatagactcctcctgatccgttccattcctccctgttgtttgttcgtctgagcgacggactgccatcaccaacagctaaaaccgcagtcttgatcatcgtcacccactcagctgtcagcagccaccgtccctgcttagctccgaccgat

SEQ ID NO: 41978 - DNA, 464 bp, Zea mays
  Clone ID: MRT4577_138283C.1
gactgttatacaatatgtcctcacacaatatctaattcgacgttgaaaaagacgtcggggagtaatacttattcaaaagagcaatgtatcttgaacaagaacgagttcaaaatgaaaaactcgttgttgaggttaggcaacaagacgtccaactgcataagcaaaggcatgaggataggattatgaccatggatctgactgtactgccagaagaacaaaagaaatactacttatctttactgtctaagatcatgagccaactacctagtgtttgacatatgtgtgccattttcaaagcacttcaatatgtttctcgtgttcatgtcagtgtttcacatcatgttttgtccaaacaggcgtaagtggttttatctcaaatagtttgtgtcattgcttccatggtatctattgttttaatatctgttaggcgtccatgtttgtcaaatcataggtgtcattgatac

SEQ ID NO: 41979 - DNA, 328 bp, Zea mays
  Clone ID: MRT4577_138284C.1
aatttccattcgacccacgcctacgcatgagactcgatctaactatctactccatatcactttcacttactttgctaatagcaaccgtcctagttattcttcctattactttacctccacaaatgcttatcttctaaaactctcaactcattaattttactcatatacaactatatacttatgtacctctaacttaactcttatcatatcttaccactctctcttaattaatacctttaatccttctcaaattaaattcctaatatatatcctcagaaacataaatatacctttttcttaaatcgcatttctagataaaccttttata

SEQ ID NO: 41980 - DNA, 153 bp, Zea mays
  Clone ID: MRT4577_138285C.1
cttcgcgtggagcataccatcctttttgggagatagtgaacacttgcaatcacgaaactcctttgatgtccactaatttgttcctgtcttgacaaaggaaattcgccactgggtcattttgcggatcttacatcctttccacaattccgtttt

SEQ ID NO: 41981 - DNA, 184 bp, Zea mays
  Clone ID: MRT4577_138286C.1
ttttaactttcatgtttttggggttcacacacctaggtagctggggtattggtgcattaccccggaagctgaaaaacagcttcacccctggactggtgggcatgacaagcgaaccgactcctaggacacaagatatatgttcgacacaaccagggggtacatcctgcctggcacaacaaacccg

SEQ ID NO: 41982 - DNA, 384 bp, Zea mays
  Clone ID: MRT4577_138287C.1
gacaagaaaaacatgttagaccaaaaagattggcctcccatacattatagccagctgtctttgattccacaggtgggagccggtcggtacctcatgaatagcgtacctgtgtccatcaaaagctacggatagttgcactaacacacacgctaaactgccttccaaaaagttttcaaaagcggagccttaaccaagcaagctgatggctctatgggtggacggaatttggtcctaacttccaagacctggatttacaaaagaagggccctccaaactttagtatttccactttttgagctccataccataaagggggagtggcttttaccttctttgctccaacatgtttccaaattggctgaaataacaaggcgcatttgattc

SEQ ID NO: 41983 - DNA, 143 bp, Zea mays
  Clone ID: MRT4577_138288C.1
aaccccgggtttgtaattgtatcggattccaaaccaatcagaacaccaacggcttggagccttggatacataccgttggtgttctgattggtttgtaattgtatcggattccattatctttgtgctcagtccctgatttgctc

SEQ ID NO: 41984 - DNA, 379 bp, Zea mays
  Clone ID: MRT4577_138289C.1
gggagcaattgattagctaccttggcagtatataaacatatatgatgaacagatacaaagaactagctataactcaacataggctgatggccactagggaaaaaaaaaggatactggccttacacaccatacgaagagatcacaagttacctggctggcacaaacaataagggttattggcactcattgctggaatccaaaacaatgtaacaaattctcgtgacaaacactgggaaaaaggccaaaaatgcgcaccaacatttgaagggcgtactatgcaccagattgacttccatttgatgaaagacaacttttgtcgattctgcttaaaggctgcctaacagatctgtttgaaccgtttgcaactttttttgacgct

SEQ ID NO: 41985 - DNA, 373 bp, Zea mays
  unsure (1)..(373): unsure at all n locations
  Clone ID: MRT4577_13828C.1
gccctttttaatantttttttaagaaaaacccattggtttttttttttttttttattttctaacaacaccagggtaagaatcctttttttccaatttatgagagatacacattggtgaaatgcttttagctggagcccgacatgcatgcgaaacaaaacaaacgcttggttgctagcctcgagccttttcgttttggccattagcgccaggttccagcgttatgttttgcgtcgactcatggaagacgttagcgcaaaccacgaggtaaacgaggtcgacggcgccaagaaccgcgagcagcgcgtagtaggagtcgtaccggccctggtccaggtcgttcgagatccacggggcgccacccccgccgccctt

SEQ ID NO: 41986 - DNA, 225 bp, Zea mays
  unsure (1)..(225): unsure at all n locations
  Clone ID: MRT4577_138290C.1
cgtacggacctcaattcccgagcggagcgactcgtccgcccaccctttctctntttttatctcanttccacctttatgacctggggtttttctagagagagagacttaaggtggtgggactgtgtgatggcaacgacctttttctgccgaaagttatattttgaaattcatgctaccttttaaattacggattaccttgggctatgttcattaaaaaaaaaaata

SEQ ID NO: 41987 - DNA, 339 bp, Zea mays
  Clone ID: MRT4577_138291C.1
agaaaagtcaagaaaaggcagttccttgattttttcaaaaagaaaggtcattcttggtttcctacctattatagtttcttggttgttctatgagaacatagttgaagtagaattggttgttgacagctatgaagttactctgatgtcatgtcagaatttcttcaaccgctatttttacctagggacaatcttgtatatcctgtgaagccatctcacatcttattgtggaaaaaagagttaattgattcagcatagtaaagcataagaatatttggttgttcattttttaataatgtatatgtttctgattcattattgtgtcgctgtttcttcatcatg

SEQ ID NO: 41988 - DNA, 535 bp, Zea mays
  Clone ID: MRT4577_138292C.1
gaggcagaggcagaggcagaggcaggcggcgatgctctccctacccgcctgctcaccattccgcttaccccctacccgttgtggcgctcgccggaagagcgcggccgccgcgaccatcacgatgcgggaccgcagcaagaaccggaagccgacgcagcgagggcggtacctcagcaccgtggccatccaggctgtccagtccctcaagcgcgctgtgctccgcggcgcccccgccgcgtccgccgctgccgtggtggagcccaagctgcgacgcctcctcaaggcagacatggtcgccgtcttccgcgagctcgccgcgcagggcgaggccctcctggccctccaggtgtttgaggagatccggaaggagcattggtacaagccgaggttgctttggtacgtagatcttgttacagcgcttgcaagcaaaggtctccggactgaggtcgacagagcctgttcatatctgaagagggaacagttggagcctgacactgaaggtttcaatttgcttctgaaggcactcctagacgct

SEQ ID NO: 41989 - DNA, 251 bp, Zea mays
  Clone ID: MRT4577_138293C.1
ggggccataaattaaaaatttttttaatttttttgttggcttgtaaaaaacctttgtgaatttgtgatgtaaaggtgggcatgtaaaaaaaaaaaaggggtgttttccttcaaaatttaaccccaaattcccagattctacgaagtaaagtacaaaattttgattaagccgtatttagggtgagggtggtaaaaaaaaggaccttggccaaatttttgaatttttataagtaacgttaaattttggaaaaa

SEQ ID NO: 41990 - DNA, 245 bp, Zea mays
  unsure (1)..(245): unsure at all n locations
  Clone ID: MRT4577_138294C.1
atngnctctattaacttaacatttgtggggtcaattccctttggggaagggggaaagaaccaccctgtttatgacaactgggaattcataaaggtgatggtgaataaataacactttctttcaaaaaagagctttttttttggggccaagcaggacccaatcatacttgcttttacacttcagtgcccaagagaaggcacaattagttggccttgtcatttcccgaggcaggggttgaaggggtc

SEQ ID NO: 41991 - DNA, 485 bp, Zea mays
  Clone ID: MRT4577_138295C.1
gggaaaaacaggggaaatttttttggcggccggccaaaaccaaaaaagggggggccagaaaaaattaaacggggggggggggataaaaaaaaaagggggcgaggaaggggaaaataaaataaaaaacccccggtttgtttgaacccccaaaagaactagttttgcggctccggggaaattctccccaaaaaagtttttcctgccatgggccccccgctgggagggaaaaaaacagccccacccctgggggggggtttaaaggccctcttttcccccgggggggcggggggagcccaatttcacgggcccctggggggacaccaccttggacaacccctaccccgggatgtcaacccccgggggtttttccttttaaaactggtttttgacccaaaagggggggaaccccaccccatccttgggcttaattgggggggcccaaccaaatttttttttaaaaagggggtttgtaaaaattgcccccg

SEQ ID NO: 41992 - DNA, 197 bp, Zea mays
  Clone ID: MRT4577_138296C.1
gccgggatacgccgccatctttcgcaagccaccgtaaccgaagcccgccttcgccgccgccgcctctgcgatccccgcaaggtcgcaaacatgtctaccgtgttccagcgtccgatccccggcacggtccattgtttcccacaaaagaagatggctgctcccactctctacggcaagatctctcatctagtcctgag

SEQ ID NO: 41993 - DNA, 277 bp, Zea mays
  unsure (1)..(277): unsure at all n locations
  Clone ID: MRT4577_138297C.1
gaacaaggccgaggcgagacacaagaccagggagcgaaccaaagggaaaacacaagagggaaccggacaggaaccaacaggcaaaagcagcaagcagagcaccagcangacccggggagcgccaacaaccggcaggcccaggacagaagngaccgggggggcaagagcngccgcaaaagaggaagggacaacaacgacaacacccggagcgaggaaaacgggcaggcnacccacagcaacagnagggcaccccaaccaaccaacggggggcacagaa

SEQ ID NO: 41994 - DNA, 580 bp, Zea mays
  unsure (1)..(580): unsure at all n locations
  Clone ID: MRT4577_138298C.1
gntatgcacctgactttgccaattgtttatgacgtctattctgttatgctaaactggaaacctacactctagcatcacattaaatgacagtatagcacacagctagcattaaagccaaataaataaactccattaccttatccctgttttgctgttattcttacaaagcaaaacagaataggcggtgacatccaaattaatctgtaatcgaagaggttctgcgacagtaactatcaatcttttcatataaacatggaggatgttagaaataaagcgttttactgacttgcgagagctaactgtaaagaaataagaccttatactacattagcgagagttaactgtaaagaaataaatccttttattgccttagcgattgctactttaaatttcttttacaatacttacaataaggtgttttgtgaaaataaaactaggcagaagcaactattaaggatggaaagcgcatacttttccgttttgaccgagcagcatttgccttcaagtttctgccatttaaagttccatacccagtgccatttagacttcttggagatgaagctaatggttggcttgacac

SEQ ID NO: 41995 - DNA, 558 bp, Zea mays
  Clone ID: MRT4577_138299C.1
ctctcgaatcgaaggccgcgaaaagaccagagtgccccgcccctcatccccgaagtctccaaacccctcgtcggaagaggtgagcttagcagccttcacgatggcggtggcggagctctgggagacgctgaagcaggcgatcttagcgtacacggggctgtccccgacggccttcttcaccgccgtggcggtcgccgccgcgctgtaccacgtcgtgtcggggatcttcgcgccgccgccgcctccccggcagcggccgcgcgaggagccagaggcggagccgctcccgccgcccgtgcagctgggcgaggtcgacgaggaggagctccggcagtacgacggttccgaccccaagaagcctctcctgatggccatcaagggtcagatctatgacgtcacgcagagcagaatgttctacggacctggtggaccttatgccctattcgctggcaaagacgccagcagagctctagccaagatgtctttcgagccccaggacctgaacggggatacctctggcctcgggccgtttgagctcgacgccctgcaagactggga

SEQ ID NO: 41996 - DNA, 819 bp, Zea mays
  Clone ID: MRT4577_13829C.1
gccgggagaggccttgcactgcaaatcctcggtggttttgcagcttccagagcttgagattgagaccagcgcggtagttctttcttggtcgatggcgctgaggaggatcatcaaggagctcaaggacctgcagagggatccacccacgtcctgcagcgcagggcctgtgtccgacgacatgttccactggcaagcgacgatcatggggcccagcgacagcccctactcggggggcgtgttcctggtcgccatccacttccctccggactacccgttcaagcctcccaaggtggcgttcaagacgaaggtgttccaccccaacatcaacagcaacggcagcatctgcctggacatcctcaaggagcagtggagccccgcgctgacggtctccaaggtgctgctctccgtctgctccctgctcaccgaccccaacccggacgacccgctcgtcccggagatcgcccacatgtgcaagaccgaccgcctcaggtacgagtccaccgccaggggatggacgcacaagtacgccatgggataacctgatgtgagccgtaacaacaacgacgctttggccgagtggttaaggcgtgtgcctgctaagtacatggggtttccccgcgagagttcgaatctctcaggcgtcgtttatttttttttcttttttttttcttttttgcctacccacatggacacatggttccctccttcacaagctcctggtactgtaacattcagaaatgcaaatggttatcatatcgtgagaattctccggttacaacgtgagtgcaagctgtaacccaagggaatcgctgctgtatt

SEQ ID NO: 41997 - DNA, 2171 bp, Zea mays
  unsure (1)..(2171): unsure at all n locations
  Clone ID: MRT4577_1382C.1
ggaatctgcaaaggccttatcaggcgtgatagaagctgtcagaccagaagggcctctagcgcttgttgtcggaatggctagtgacaaggagcatcttgcgtttgctgagcagcttctctccattgaaaccctcgaggccgggcgggcagccgacgcgagcaccgtcgaagcctgcacccccgggttatctgtatcccgtggcaaggagcatctgcgcgtcacatccgcgatcgcgcgctctacgtcgcctcccgccgccgccgcacggccgcgacggatgctcggccaccgcttccctaccgccctccgcctcccacatggtctgctgctgaggaggagcatcatggcccgccgcggcctgaccatcatggccggtggcgaggcggagggtccgctcgcgggtttcttcgactacatggagcggctacgcaactacgagcgctcgggcgtgccgcgcggcgccggcaccgactccgacgacgggttcgacctcggacgcatgcgccggctcctccgccggctcggcgacccccacacccacttcccggctgtgcatatcgccggcaccaaggggaaaggttctactgctgcattcctgtccaatatcatgagggcccaaggctacaatgtaggctgttattctagtccacatcttctaacaatacgtgaacggatttctgttggaaatgatggaggccctgttccagtacgactgttgagtgatctttttgacgaggctaagaaagccattgatgaagcaatagaatcggaaaatggatccctgacacattttggaaggttttactgctctctcatttcttctattctcccaacagaatgttgacattgccatcattgaagcaggtcttggtggagctagggatgcaacaaatgttattcgaagtactgaattagcagcatctgtcataacaacagtagggagggaacatctggttgcattgggtggctccctgcaaagcatagcaatagcaaagtctggaatcatcaaacaaggacgaccagttgtgattggtggaccattttcagaagatattgagcaaattattcgtgacagggcattcttgacacaatctcccgtgatatctgcttgtggtcatggcatcaagagctttacaaaatgcatagattgggataatggtaagccgtatcaacgctgttacatcagcattaagatttcaagggatgtacccttgtcgattgaaatgcatgacataaacctccagctgctgggagatcatcaacgtcagaatgctgtcacagctgcttgtgcagctctctgtctctgtagtcaaggatgggatatctctgacgcttctatccaagccggcttagaggagacccaacttcctggcaggagccagtttctcacagcagaggaagcctcggcacttgggttcgatggcgcatccactgtactaattgatggagctcatactgaggaatctgcaaaggcattatcaggcgtgatcaaaactgtcagaccagaagggcctctagcgcttgttgtcggaatggctagtgacaaggagcatcttgcgtttgccgagcagcttctctcaggtcaaacgccagatgtcgtgctactgacagaggcgagcatcgccggaggaagctcccgtgcaatgccagcctcatccctgaaagaagtatggattgccgcggtacgccatcgtggcatcgagtacgtggacatcggtggcatcagtggcactgaaaccccggagcacatcgccgatctgttgggcagtccatcgctgagttccagaaggaagcccatggtgatcgggtgccaagacatggggccgttctcctggaacctgatcattgctgcctcccagctccttgagagcagaggcagggccccaggcctcatctgcgtgtccggctccctgcatctcgtcggggccatactgcaaaagctgggacggcattagaggcgccaaccatctcatctttcatagtaccatatactatactggaagagagtggaagctacactggactcgtagtggtgggtcttgtcttactgaggttgtaccggcgagatggatcatntcgtgtggtgtancattgcgggactgtttggatggaatctacgaaaatgcctgggccaggtatccatcccaggcgcccgattttggacatttggt

SEQ ID NO: 41998 - DNA, 359 bp, Zea mays
  Clone ID: MRT4577_138300C.1
cccatgcagccttctcctaccactgaacatcataatctctttcgagagcatctaccaagagcgcggtcttcctagtgcaagctccatatagtattgacaactgtcgaccaccgatgattatgtcctcagactgcacacatccaactcaaccacttcatcgaccactacttcgacaaccaaccataagtccttcattgcaaaatcatcctgtatcctgacacgcaaatgatccgcatcttaggctttactaccatctgcacatatgatgtgattcaggacgctatccaggtcattaaccccactgaactgaacagtctcatcatcaacgttgacatggcccacatccgcctttatcatct

SEQ ID NO: 41999 - DNA, 1257 bp, Zea mays
  unsure (1)..(1257): unsure at all n locations
  Clone ID: MRT4577_138301C.1
gccaccacacactagagagagagaaggagaacgcgcgtcgtatatgggtcaagaagaggccgtggcagcgaacggcaccggcaccggcgtcggccgcggcaggccgcacgccgtggtgatgccgtacccgctgcagggccacgtgatcccggcggtgcacctggcgctgcggctggccgagcgcgggttcgcggtcaccttcatcaacacggagtccgtgcaccaccagatcggcgccggcggcgacatcttcgccggcgtgcgcgcgcgggggggagggacgacgacggaggagctggacgtgcggtacgagctggtgagcgacggcttcccgctgggcttcgaccggtcgctgaaccacgaccagttcatggagggcgtcctgcacgtgctcccggcccacgtcgaggacctcctccgccgccgcgtcgtcgtggacccggccaccacgtgcctcgtcgtcgacaccttcttcgtgtggccggccacgctggcccggaagctgggcgtcccgtacgtgtccttctggacggagcccgcgctcatcttcaacctctactaccacatggacctgctcaccaagcacggccacttcaaatgcaaagagcctcgcaaggacgcgatcacctacatcccgggcgtggcgtccatcgagccgagcgagctcatgtcgtatctgcaggacacggacaccacatccgtcgtccaccgcatcatcttcagggcgttcgacgaggcccgccgcgccgactacgtcctgtgcaacaccgtggaggagctggagccgtcgaccatcgccgcgctgcgcgccgacaggcccttctacgccgtgggccccatcttcccggcgggcttcgcgcgcagcgccgtggccacgtccatgtggcccgagtccgacgactgctcgcggtggctgggcgcgcagccgcccggctccgtgctctacatctccttcggcagctacgcgcacgtgaccaagcaggagctgcgcgagatcgcgggcggcgtgctggccagcggcgcccggttcctgtgggtcatgcgcccggacatcgtcagctccgacgacccgcgcccgctgcccgagggcttcgccgtccagtggtgctgcccaggtggaggtgctctcccaccccgccgtcgccgccttcctcacgcactgcggntggaactccgtcctggagagcgtcctgggcgggggtgcccatgctctgcttcccgctgctcacggaccagctcaccaaccgccgcctcgtc

SEQ ID NO: 42000 - DNA, 326 bp, Zea mays
  Clone ID: MRT4577_138302C.1
aatttttggacccacgagttcactaaccggtgggcgcccttttttgtgtttttttttaaaaggatggcaggcactctcactctaaattctgaagaaaagatttctcctagatttaagggaaaccccacccaaatccaatacaggtggcacagacaacccagactacaagaacccacacacacagtacccatcactgagtcatcttagccaagctcaacacaagtgacgagctgaaactcccaagacgggcagcccatggccaatggaaacacgagatcgattacatacaccggttcaggagaaggtatactgaaacgcaggatctt

SEQ ID NO: 42001 - DNA, 1437 bp, Zea mays
  Clone ID: MRT4577_138303C.1
gacacttgacagccaccacacactagagagagagaaggagatcgcgcgtcgtatacgacgacgaggaaatggcgcaaggggccgccggcgtagtagagacgaggaggcatggtggcaagccgcacgcggtggtggtggcgtacccgctgcagggccacgtcatccccgtggtgcacctggcgctgcggctcgcggcgcggggcttcgccgtcaccttcgttagcacggaggccgtgcacgacaccttcttcgtgtggcccgccactctggccaggcgcctcggcatcgcgtatgtgtcgttctggaccgagccggcgctcatcttcaacctctactaccacatcgacttgctcacccagaacggacactttaaatgcaaagagcctcgcaaggacacgatcacctacatcccgggcgtggcgtccatcgagccgagcgagctcatgtcgtacctgcaggagacggacaccacctccgtcgtccaccgcatcatcttcagggcgttcgacgaggcccgccgcgccgactacgtcctgtgcaacaccgtggaggagctggagccgtcgaccatcgccgcgctgcgcgccgacaggcccttctacgccgtgggccccatcttcccggcgggcttcgcgcgcagcgccgtggccacgtccatgtggcccgagtccgacgactgctcccggtggctgggcgcgcagccgcccggctccgtgctctacatctccttcggcagctacgcgcacgtgaccaagcaggagctgcgcgagatcgcgggcggcgtgctggccagcggcgcccggttcctgtgggtcatgcgcccggacatcgtcagctccgacgacccggacccgctgcccgaggggttcgccgaggccgcggcggggcgcggcctggtggtccagtggtgctgccaggtggaggtgctctcccacgccgccgtcggcgccttcctcacgcactgcggctggaactccgtcctcgagagcgtgtgggcgggcgtgcccatgctgtgcttcccgctgctcacggaccagctcaccaaccgccgcctcgtcgcgcgggagtggcgtgccggcgtgtccgtcggagaccgcggcgcggtgcgcgccgacgaggtgagggcgcggattgaagcggtcatgggcggggaagacggcctcaagctcagggagcaggtgaagaagctcaggggcacactcgaggctgccgtggcgtccggtggttcgtcgcggcgcaacttcgacgagttcgtcgaggagctgaagcgccggtgcggaggccgctgatccgaaagctcgaggacggcagctgaggtagccccagaatacgtgtgcgatgtacgccttgtatcgtgtgcgtcacataaaaaactgtcttcaatcttgatcgaagcgtgtatgccgtgtacggtgggcattattgttgtgcagggtt

SEQ ID NO: 42002 - DNA, 745 bp, Zea mays
  Clone ID: MRT4577_138304C.1
ggtgccacaggcgctgtcacctagccacagcgtggcctgtcactccgaggaaagacctgccggcgtcggtccacctgccacctccgggccctgtaccgccgccgagtcctacgccgccgtcaccatgccaaaaccctacttaaacggcccggcctaaggctcattcaaaaccacacccatgcccgtgtgaacggccgcatgccaaggcgacctagctggactaaccggcggggtgggcagcaccacaatgctgggcatgcgctgagagatactgagggagtggtgcagtacgacggcaccgccctactgctcgactcagtgatagtcgtcgcggcagcaaggttgccagcacctcaggcctgtggagacgcagtaacgggaccaggctagcttgggcttgtgccttcagtccatactgcagcagcaggcggaaagcggccagggcgcggggctgctggcggcgcagatagcgcagcaactgacggcaatgtgcggactgcagaagtcgactgcatgcccctacgctgctgccggcctgtgtcccccacttgaagaaactatgtgctggagcatagccggtggctagctagctagttgagttatttatcggtcgataatggagtaataatgggggcacgcatcaccatggggtggcagtgtcacctgcgagcaatgaccctgtatgaactattgaaaggaaagggaaaaagttttggttctaaaaaaaaaaaaaaaaaaaggcccc

SEQ ID NO: 42003 - DNA, 2254 bp, Zea mays
  Clone ID: MRT4577_138305C.1
gtacctcgaggccggccgggcaggaattttaatgcaggtgtttatttgttagcatggagtcagaaaagggaggatgttgtaggtctgaaagctcccaaaaaggagaagcgagtgaagaaagaaaatagaacacaacctcctgtagaagcaccatatgttgcaccaaaaacgaagatatctatcaaacctgtaccagataaaactgttgagatttttgacgggatgactttgcttgacctttctaaacgaactggtgcgtatattagtacacttcaaggcatacttgcagatcttggtgaaaaggttgaatctgagtttgactctatcagcattgatcttgctgagttggttactatggaacttggcgttaatagcagaagaatgcacactggtgaaggcaagaatgagccacgccctgctgttgtgacggtaatgggacatgttgaccatggtaaaacatcacttttggatgctctccgtcaaacatctgttgctgccaaggaagctggtggtatcactcagcatataggtgccttcgttgttgaaatgtcgtcaggagcatctataacattccttgatactccaggacatgctgcatttagtgccatgcgggctaggggcgctgctgttacggatattgtagtccttgtggttgcagcagatgatggtattatgcctcagacactagaagctatgtctcatgcaaaagcagcaaatgttcctattgtagttgcaataaacaaatgtgacaaatctggagctgatcctgagagggtcagaattcaacttggttcagaaggtttacttttggaggatatgggtggggatgtgcaggttgttgaaatctctgcagttacaaaaactggtttggataaattggaagaggctttgctccttcaagctgagatgatggacctgaaagccagaatagatggccctgctcaggcttttgtggtggaggcaagggtggacaggggcaggggtccactcgcaacagctatagtcaagtatggcacattagttagtgggcaacacattgttgtgggagcagagtggggaaggattaggtctcttagagacacagcagggaatataacgcagtctgcaaaacctgcaatgcctattgagattgaggggttaaagggccttccaatggctggggatgatgttgtagttgttgattcagaggagagggcaagaatgctaagtcatgggaggaagaagaagcaggagaaagacaggcttcgaaaaattgatgaggggatggcagaggagctagaaattaaagaaagagactcctgaaagagttgaaatgaccattattgtcaaagccgatgtacaaggcagtgttcaagctgtcacagatgctttaagaagtcttaatagcgcacaggtgttcgtgaatgttgttcatgtaggtgttggcccaatcagtcagcatgacattgatctggcacaagcatgtggagcatatatagttggtttcaacattcgcagtccacctattcctatcactcaagcagcagcaagagccaacataaaggttttgcttcacaaggtcatctatcaccttcttgaggagatgggaaaggccattgtggagaaggcaccgggaactgctgaaacccaggtttcaggagaggctgaggttctgaacatatttgagctgaaagggcgcagcaagtcaaaaggaccggatgtcaaaattgctggctgccgtataactgatggccacttcagcaaatccggaaccatgagactgttgaggagcggagatgttgtctttgagggtccatgcgagtctctgaagcgggagaagaaggacgcagaaacagtcgaaaagggtaacgactgtgggctggtgattcaggattgcgatgatttccaggtaggggatatcatacagtgcgtggagcaggtgattaggaagcccaagttcatctcgacgcagagtggttcggttcggattgaatgctgaaatgtagtaatggttgtggctgacactactgttccatttccctattaattcagctagttgtgctttactgaccaaaggtttcgagtgtaacaagattttgttggctagcaacttgttgcaactgcaaccaaacccctttctgatatgagataattaggacaaaacaacagagttaagttgcttttttttggggtcatgttaaacaatgtatgcagtattgctcgtgcccctcttgaaaacagttactgacaaccatatgctgtgaaaaataaattc

SEQ ID NO: 42004 - DNA, 321 bp, Zea mays
  Clone ID: MRT4577_138306C.1
cctcaaggggtttttttttttaggttggtgccctgattgaaagtattaaacatgcaaggaaagcaatccgcacccccgggtggccgtccaaaacccctgagacccaaaaaaaaaaccggaacccagggaagacccgggaaccccggcccggccccggaaaacccaccccctccccctaaagggagccagattacaccaagggggacccaaggacaccccgggcccccccgggaaaaggttatccccctggcaaaaaccggcaacaaacgagccggacgcaaaaaaaacaaaccccggggggccaaaagaaagagccaaccc

SEQ ID NO: 42005 - DNA, 378 bp, Zea mays
  Clone ID: MRT4577_138307C.1
tgattactctgcgcacactatttttggcggcgtctgtcgcaccagtcgtattgtttgctcaggccatgttactgcgagaaaagaggtgaatgtgaaatcatcgatatcgcctctcgagaaaagaggtgaatgggaaatcatcgatatcggtccgctcacccagaacctgcgtaaatttgcggtcgacgaagaaaacaaaattggccagttcggacgtctgacctttaacaaggttattcgtccatgcatgaaaaagactatctacgacaacgaacgcgatatcaaaggttatgagtaccatctgtacgtttacgcgtctgaaaaactgttccgtgcggacattttcatgtgactataaaacccgtggtcgtaagctta

SEQ ID NO: 42006 - DNA, 165 bp, Zea mays
  Clone ID: MRT4577_138308C.1
taaatttcataacagtctgatttactgagtcgtgctttagtttgtttcctttcattttcaggaattgaaatcttacttatggaatagactatttttttggacaaaaatatgttaaaaaaaatatattgataactttttatacgtatgcttgaacaaggtttttgt

SEQ ID NO: 42007 - DNA, 428 bp, Zea mays
  Clone ID: MRT4577_138309C.1
atgcccttctgaagcctgaaggaattattaacggctaaaggcggggaaataactgccataggaaagagcattatgttagagtcggatcaccgctcagccgacctcaaagcttacatacacgtgccggccacgccctagggatgctatagcgccacctaaatgcacccactggccacccctgacaacggggtgactgggttaaccctggggtcaccctacttattcgcctggcagcaaatttacctttcagcagccggtagaaaaccggagaggccccaactaatcgcccttggaacagttgcccatcctgaggggatggacgcaagtgacggccataccgcggaggggggaggcacgtgcaggataaccccccccttgcggtggcctataacccaggaagtccgctttgtttcctccctttaacagca

SEQ ID NO: 42008 - DNA, 213 bp, Zea mays
  Clone ID: MRT4577_13830C.1
tcggttcacaaaagcagtacccaattatttggtcttcgtctaagacgggaaaaagacccactcgatgcaggggcaatatatcggcgccagaaatggctggcaaggtctataaaaaggttgaggcaacccccaacgggagggtcttcttgattaaatccaaagcatttcccaaaccgggatacggaggcttgcttataaaggcggcgttaaacc

SEQ ID NO: 42009 - DNA, 170 bp, Zea mays
  Clone ID: MRT4577_138310C.1
attcccattcgccgacgcctccctcacacgatacttataataatacattcaattcttacttccactactgtcttcagttatatagtgcccgtaccttaattcagtgaaccatagttttcaacctacatattacatcggaaatgtgaccatcactcccaaatcttccttat

SEQ ID NO: 42010 - DNA, 310 bp, Zea mays
  Clone ID: MRT4577_138311C.1
caggagagaagagagtgtgagtacgaccagaaaatatccattgatttctacaaggtatgaacagttagctttgaactgccttttctttcagaactctcatgtttccttgatgcatgttcaggaaggagatcccttgaaaccagctgtgacgggcgtcttagtgtaaggatctgaagttccaaaaccaaaaataccaattccatgctatccgctgatgttgctctgtggaactcataacttggtgttcatgcaggttcgtttccactccagatcaaattggcaacaagtactatcttggcctgctcctctg

SEQ ID NO: 42011 - DNA, 322 bp, Zea mays
  unsure (1)..(322): unsure at all n locations
  Clone ID: MRT4577_138312C.1
tagcgaggtgggggagtcactaccatacatccaaagaaagaaagggtatatcaaaaatgttccgtggcaaccctagggcgagcgcaagcaacgagctgccgatcgagagtgtggtgagggtgaattttttttttttgancgaggcgaacaacctcgtcgggggggggtggcaaatggcgacagccaaggtgaccaggagcctgacgcgggggattgtccgtgtcggggacgtggatgaaatgcctgacagntttgtntgggtgcctattgcgcgcacttaatgagtgaccggtactggggtgcatttaagtgttgagttgtg

SEQ ID NO: 42012 - DNA, 761 bp, Zea mays
  unsure (1)..(761): unsure at all n locations
  Clone ID: MRT4577_138313C.1
ccggccgggaataaaagtgaaattccataccttgctgtctcggtctgtcggccatcgccggttgcgcagcgggcagcggctcacgtcgacggggaagactccggaggccacgggcgttacattctcctgccgtatttttgcggtatgggaagtttagccttaacacaagtctaattctcccacaaaagatggtgatgcaactacgtaagacatatatgatcaaattgatcatgccatcaagctcatctccttcgtcaatcatgagcatccagcaaagatcaaggccttcggcaacgaagccgtcagcttcgtcccatgcctttgcagcatcaatgtttacgcggagctccgcagcttttcttcttcagtatgcaagttgcacctgccgaagggattgaagtgacagccagggatccactcatcccctgggtggaaaaattcaggttgtggattggattgctagctaccgaacaagccctcagcgtgctaatttcagtggaatcttggtagacaccactgaacttcttggtttccaattaagttcgagcatagagatcgtcttctctcacactgagttgccagtttattccgaaggtccttcaagctaagttctgatgatggctaaggccaagggagcagtccatgcatccacgaaggaacccttgntttcttttggtgtcatagctgatgttcagtatgctgatatcccagatggtcgctcattccttcggtgtcccaagatctaccgccatagcatcact

SEQ ID NO: 42013 - DNA, 1639 bp, Zea mays
  Clone ID: MRT4577_138314C.1
gggcattggctccctcgctggggtgagagaaaagtgaaattccattaccttgctgtctcggtctgtcggccatcgccggttgcgcagcgggcagcggctcacgtcgacggggaagactccggaggccacgggcgttacattctcctgccgtatttttgcgatccctggctaaccaaacaaatggtggagacatggattagtgcttatgggaaaatcatccccaacagggattgaagtgacagccagggatccactcatcccctgggtggaaaaattcaggttgtggattggattgctagctaccgaacaagccctcagcgtgctaatttcagtggaatcttggtagacaccactgaacttcttggtttccaattaagttcgagcatagagatcgtcttctctcacactgagttgccagtttattccgaaggtccttcaagctaagttctgatgatggctaaggccaatggagcagtccatgcatccacgaaggaacccttgttttcttttggtgtcatagctgatgttcagtatgctgatatcccagatggtcgctcattcctcggtgtcccaagatactaccgccatagcatcactgtcctccaaagggccgtcaacaggtggaacgaacaaggcaacatcaagttctcaatcaattttggtgacattattgatggctactgcccaaaggacaaatcattgtgggcggtgcagaaggtccttgatgaatttgacaagtttgatggcccgacatatcacatgattggcaaccactgcctgtataaccttccgcgcagccagctggtgtctctgcttaagattgcaacagattctgatcgtgcctattatgacttctcgccatgccctgggttcagaatcgttgttctggatgcttatgacttcagttgccttggctggccccatgatcaccctgtgactatagcagcaatgaagctcctggatgagaagaatccaaacactgataagaacagccctgatggtctggttggtgttgataggcggttcgtgaagttcaatggtgcagttggcaaggagcaggtgtcctggctcaatgatgtcctccaggacgcatcgacgcaacatcaaaatgtcatcatatgcagccatctcccaatggatcccggggcgtcttccccagcagctctgatgtggaactacgatgaggtgatggctattgttcaccagtacaactgtgtcaaggcctgctttgccggtcatgaccacaagggtggccactctgtggactcacacggtgtgcaccaccgcacccttgaggctgccttggagtgtcctcctggtaccagcgcttttggtcacgtcgaagtgtatcctaacaggctgctgcttgtaggttttgacagaatggctgatacagaggtccgtttttgagccattaaacggctttaattcgtaccgacttctactacttctataatgtttttgtctatatagattacagctgcagcagtccaaacgctggctttaatccgatgcttacacaaattcatgtgacttcattgcctgccgcataattccattgaaactggattattgcaataatgaaatgaattccttacggtaaaaaaaaaaaaaaaaaagcggccgtttttcgggtttt

SEQ ID NO: 42014 - DNA, 433 bp, Zea mays
  Clone ID: MRT4577_138315C.1
aggggttcaaagggggggggtcccggccggggataaaaaaaatataaaatcaaacccggccccccgaaacaaaaaatggggggggaagaaaaaaaaacgggatttccggcgcatttcaccttttatggttttaaaacggggcccctacaaagaaaaaaatggaggaaatttggggagaaaaggtttggaaccgacatgacagtaattttaaaaaacaaacccctgaaattaacccaggaacaggactaggcctttccagggggaagcccaggccattgacgaagggggaaaatccaactgaccccgggggaaacggatccgggaccaagaaccgggggacccaaccggttaggctaacccaaggggggggggacagcttttgaaagattttgcccctaaaaaggggtgtgagccccctcacacgcgcccaaaa

SEQ ID NO: 42015 - DNA, 2807 bp, Zea mays
  unsure (1)..(2807): unsure at all n locations
  Clone ID: MRT4577_138316C.1
gtaccctccgggtcctgccggggnacgcttcaccccgtgtgcgttctgtgcctcccccccaggactgggtgggctgccgctgccgacgcaacctacgccgcagccctagccagagccgaggccttcatcggtatcttctccggcgacgagcacccacagtgctatgtaaaggtggatgtctcctacaaagagaagaggacttggtcgccgtggtcatggtcgtggaaggggtgccgcggcagaaaaggatatggatcatctcgatatctctgtaccttcttcaccaagtactacctctgacagagaagatcagcctctgttgattccaagacaatccccagcttgctatgtaggaccgtcagaagtatccaccatgttactgaaccctaagatcaaccatcgttccgatgcgatttttggtgatcaggctgtggagcagctgaagttacgtcatcacaagcctctgaaatttcatgagagatatcgtccttacctgagagatgcaggtttgcttgggctctcacaaatttgccagaagatgcctcagttggacaaagcattgataactgcccttgttgagcgttggaggccagagacccatagcttccatttggcatctggggagataactgttacacttcaagatgttgcaatgttgtttgctcttcctattgatggtcgtccggtttgttctaccactgatcatgattatgcgcaagtggtccttgattgtttaggcctggatgcaaggggtccagcaatgcctggaaagtctttcctgcattacaaatggcttaagaaacacttttatgaattaccagaggaggtggatgatatgacagttgaaaggcatgttcgggcatatatactgagccttttatgtggggtgctctttccagatgggacaggaaggatgagtctgatatatcttcctctgatcgctgatctttcacgtgttagcacatacagctgggcttctgcagttctggcattcctgtaccgatctctttgctcggttgcctcctcccacaatatcaagaatattggtggttcattgcttctcttgcagctttggagttgggagcgctttcatgttggcagaccattggttcggtcacctttatgcacagagatgggcattgaacatgacttacctccaatcggcttccgttgggtggggtcacgcacacaaagtgagagtgctaatcgctgccttaagcagtacagagatgaactgaacgttcagcgagttgatcaggtgaagtgggaaccctacctgcaggtagagtcctcaaccttacccccactttgtacaagagacgcagacctgtggcttacacaagctccattaataaacttccctatagttgaaatgtatttgcccgagcgagtgatgcggcaatttgggcttcggcagtgcattccaccacctttccggcctacactacagtcgttacatcgtatcagtagacgtggcaaagaacgagagaactgggaagaaacacaccatgagtatatccaggaatgggaagcacgacgacagcgcatatttcgagatacagagcaatatgatccatcttcttatgaggagtatctgcgctggtactcaggagcaacacggcggtaccttgtcccagcaaccagtgacgacggtgaagcgggaccttcagctccaactgacgatttctcagatcttcagtaccaagccaaatctccaataatccgcaaagcagttgataaactggaaagcatggttaagaaagccaagagagccatgacaaccacagctgatacaaccactcaagccttggttgctgagtttctgcttggctttgaggatgtgttacaagatcttggcgagatccagaataatagtggttcaactgttccaccttttcacttggatagtccacattttgatgcagccgcaagtcaacagacacctcaacttttgcttgaagctgaggaaaatttagataccaaccaagaagcacaactagaggaagatgaagaacttaacacagtggagcgtgcttcattggcactggagactgtggaagaggaaaacgacttctccaacgacgtgctccctggaaatctttcactgggcgtggaggaagactgtgattcagccacaccagccaatgggatttgtgatgcagccactcccatgaccgatttggttgttcctcggtcagatgagggtctccatcaagatcaacatctagaagaccacaccgaaattgagccggctacattgatggtggagcctaagtgtgaggagggcgatggttccagcttcgtgctcccaccaagccctccagaactgatgctcgaggaacaggacgattcagggttaatagctctaggtactggatcatgtaccgaacagcagagccttggagtaggagaggctgaggatcaggaaaaccctagcacaggcacagctcagcatggcatcatgatagtggagcgtacgggtgaggaaaacagcagttgcaatggcgtttattcttcctgcccaccgtcatctgtcattgttgaatcgagcagtgattatctgtgttagttatgtagggagtagaagctttttttatatttaaagatctgacatgagattgttagttcctttgttgctggtggcatggggtttgattctgtaacttgtttcgtcgtgattgtcttgataatatgagggtcaagcaaaccgggggccgttatacgccgacccagttggagtgtaatcctcagcgttccgttatacagcctcgtttgtctcctgccaaaaaaaaaaaaaaaaagcggcc

SEQ ID NO: 42016 - DNA, 783 bp, Zea mays
  unsure (1)..(783): unsure at all n locations
  Clone ID: MRT4577_138317C.1
ccggccgggaataaaagtgaaattccattaccttgctgtctcggtctgtcggccatcgccggttgcgcagcgggcagcggctcacggcgacggtggggactccggaggccacgggcgttacattctcctgccgtatttttgcgggattgaagtgacagccagggatccactcatcccctgggtggaaaaattcaggttgtggattggattgctagctaccgaacaagccctcagcgtgctaatttcaatggaatcttggtagacaccactgaacttcttggtttccaattaagttcgagcatagagatcgtcttctctcacactgagttgccagtttattccgaaggtccttcaagctaagttctgatgatggctaaggccaatggagcagtccatgcatccacgaaggaacccttgttttcttttggtgtcatagctgatgttcagtatgctgatatcccagatggtcgctcattcctcggtgtcccaagatactaccgccatagcatcactgtcctccaaagggccgtcaacaggtggaacgaacaaggcaacatcaagttctcaatcaattttggtgacattattgatggctactgcccaaaggacaaatcattgtgnggcggtgcagaaggtccttgatgaatttgacaagtttgatggcccgacatatcacatgattggcaaccactgcctgtataaccttccgcgcagccagctggtgtctctgcttagattgcaacagattctgatcgtgcctattatgacttctcgccatgccct

SEQ ID NO: 42017 - DNA, 309 bp, Zea mays
  Clone ID: MRT4577_138318C.1
cggacgcgtgggcgacgctcgcatacactccaattccccacctcacctttgacatcagggtaggctgcagcggcagtggcctagcgccttcaatgccggcacctgcgagaaactactactcgtacccacctaccgttacaccgactatcgacgttcaccatgactagctagacctcacgcacgcactacccatgcaagactgctacaccgacacctactgtcaatggacactcgattactcgacgtttattcctgacatatccagactcatcatcatcactgcgccgttcgtcgacgctaccctcatct

SEQ ID NO: 42018 - DNA, 1613 bp, Zea mays
  Clone ID: MRT4577_138319C.1
ccggccgggaataaaagtgaaattccattaccttgctgtctcggtctgtcggccatcgccggttggcggttgcgcagcgggcagcggctcacgtcgacggggaagactccggaggccacgggcgttacattctcctgccgtatttttgcgatcaaggccttcggcaacgaagccgtcagcttcgtcccatgcctttgcagcatcaatgtttacgcggagctccgcagcttttcttcttcagtatgcaagttgcacctgccgaagatccctggctaaccaaacaaatggtggagacatggattagtgcttatgggaaaatcatccccaacagggattgaagtgacagccagggatccactcatcccctgggtggaaaaattcaggttgtggattggattgctagctaccgaacaagccctcagcgtgctaatttcagtggaatcttggtagacaccactgaacttcttggtttccaattaagttcgagcatagagatcgtcttctctcacactgagttgccagtttattccgaaggtccttcaagctaagttctgatgatggctaaggccaatggagcagtccatgcatccacgaaggaacccttgttttcttttggtgtcatagctgatgttcagtatgctgatatcccagatggtcgctcattcctcggtgtcccaagatactaccgccatagcatcactgtcctccaaagggccgtcaacaggtggaacgaacaaggcaacatcaagttctcaatcaattttggtgacattattgatggctactgcccaaaggacaaatcattgtgggcggtgcagaaggtccttgatgaatttgacaagtttgatggcccgacatatcacatgattggcaaccactgcctgtataaccttccgcgcagccagctggtgtctctgcttaagattgcaacagattctgatcgtgcctattatgacttctcgccatgccctgggttcagaatcgttgttctggatgcttatgacttcagttgccttggctggccccatgatcaccctgtgactatagcagcaatgaagctcctggatgagaagaatccaaacactgataagaacagccctgatggtctggttggtgttgataggcggttcgtgaagttcaatggtgcagttggcaaggagcaggtgtcctggctcaatgatgtcctccaggacgcatcgacgcaacatcaaaatgtcatcatatgcagccatctcccaatggatcccggggcgtcttccccagcagctctgatgtggaactacgatgaggtgatggctattgttcaccagtacaactgtgtcaaggcctgctttgccggtcatgaccacaagggtggccactctgtggactcacacgtgtgcaccaccgcacccttgaggctgccttggagtgtcctcctggtaccagcgcttttggtcacgtcgaagtgtatcctaacaggctgctgcttgtaggttttgacagaatggctgatacagaggtccgtttttgagccattaaacggctttaattcgtgccgacttctactacttctataatgtttttgtctatatagattacagctgcagcagtccaaacgctggctttaatct

SEQ ID NO: 42019 - DNA, 442 bp, Zea mays
  Clone ID: MRT4577_13831C.1
aaaacggggggaaaaaaaacccccccttttgggccaaacaggggtcattttaggggccaacccccactcataatttcgacttgcctttgcaaggcaccgggaaaaaaaaaacccccttgcttttggcagaataaataaatccaggtgcgtcccccctttccgatccaaaaaaaaaagaagttgcataaaaaacccggggagcttatttgccggggacaaaattgggggcctagccccatcccttgttgttgactgggccaacaatggggccagggaggtttttgagcgggcccttgccggggacaatggcctggacaaaaaaccccaacatggaaaacatggggggggggccgtttttgagctccttcaccttgagcccggaaaaggccttggggtccccggccagcccgggggggtcaaatttccccccagggtacaaggg

SEQ ID NO: 42020 - DNA, 1148 bp, Zea mays
  Clone ID: MRT4577_138320C.1
cccacgcgtccgccgaggccaccgccgacggcctgctcatcaacacgttccgcggcctcgagggcgtcttcgtcgacggctacgcggcggcgctcggaaggaagacgacggcgacgtgttgggccgtcggcccgacgtgcgcctcctcctccggtggcctggacgcgggcgcgacggccgcccgcggcaaccgcgccgacgtcgacgtcggcctcctcctgtcgtggctcgacgcccgcccggcggcgtccgtgctgtacgtcagcttcggcagcctcgcgcagctgtcgctgaagcagaccgtcgagctcgcccggggcctcgaggcgtccgggcggccgttcgtctgggccatcaaggaggccaagtccagcgccgacgtgcgggcgtggctgctggccgagcggttcgaggagcgcgtccgggacaggggcctcctcgtccgcgggtgggcgccgcaggtgaccatcctctcgcaccccgcggtgggcggcttcttgtcgcactgcgggtggaacgcctcgctggaggccatcacccacggcgtgccggtgctgacgtggcccaacttcgccgaccagttctgcagcgagcggctgctcgtcgacgtcctcggcgtcggcgtcaggtccggcgtcaagctgccgcccatgagccttcccgacgaggccgagggggtgcaggtgacgagcgccgacgtggagaaggcggtggccgagctgatgggcgtgggcgccgacgggacggcgaggagggcgagggccaaggagctcgccgcaaaggccaaggcagccatggaggaaggcgggtcgtcgtatgccgacttggacgacatgttgcgccacgttgcggagctaaacatgaagaagagccacgaagagggcacgggcttcagcactctgccggagcttggaactggaagcaagaacaatgacaacataggtgccggggctgccttgtcagtacagtcctaagttgcattgcaccatgcgcttgccttcttggacgatgtttaacacaagtagaccagtgtactttctctatgtttttgtacacataatacatgtagttagtattcataacaacaacaacaacaacaataatgataatatattataaaaaaaacaggtgaattgatgtgttgctgt

SEQ ID NO: 42021 - DNA, 251 bp, Zea mays
  Clone ID: MRT4577_138321C.1
agacgaggcgacctacactgtgttgaaacatgaggtcatgacggtccttgctagatgcgacagacactacctaagagaggatgacagacgactgggatacacttggacgttatgactgatcatgctacacgcagctgtccttcttgacgagaggaaacttagggaacgtggcactgaaggggttcgcccttaatgaaggacaccatgttcttcaacttgtcaggaggcaactcggggaactggggaaagaa

SEQ ID NO: 42022 - DNA, 1731 bp, Zea mays
  Clone ID: MRT4577_138322C.1
tgggacctcaggcggcgggcgggataaaggaattccttaccttgctgtctcggtctgtcggccatcgccggttgcgcagcgggcagcggctcacgtcgacggggaagactccggaggccacgggcgttacattctcctgccgtatttttgcggtatgggaagtttagccttaacacaagtctaattctcccacaaaagatggtgatgcaactacgtaagacatatatgatcaaattgatcatgccatcaagctcatctccttcgtcaatcatgagcatccagcaaagatccctggctaaccaaacaaatggtggagacatggattagtgcttatgggaaaatcatccccaacagggattgaagtgacagccagggatccactcatcccctgggtggaaaaattcaggttgtggattggattgctagctaccggacaagccctcagcatgctaatttcagtggaatcttggtagacaccactgaactccttggtttccaattaagttcgagcatagagatcgtcttctctcacactgagttgccagtttattccgaaggtccttcaagctaagttctgatgatggctaaggccaatggagcagtccatgcatccacgaaggaacccttgttttcttttggtgtcatagctgatgttcagtatgctgatatcccagatggtcgctcattcctcggtgtcccaagatactaccgccatagcatcactgtcctccaaagggccgtcaacaggtggaacgaacaaggcaacatcaagttctcaatcaattttggtgacattattgatggctactgcccaaaggacaaatcattgtgggcggtgcagaaggtccttgatgaatttgacaagtttgatggcccgacatatcacatgattggcaaccactgcctgtataaccttccgcgcagccagctggtgtctctgcttaagattgcaacagattctgatcgtgcctattatgacttctcgccatgccctgggttcagaatcgttgttctggatgcttatgacttcagttgccttggctggccccatgatcaccctgtgactatagcagcaatgaagctcctggatgagaagaatccaaacactgataagaacagccctgatggtctggttggtgttgataggcggttcgtgaagttcaatggtgcagttggcaaggagcaggtgtcctggctcaatgatgtcctccaggacgcatcgacgcaacatcaaaatgtcatcatatgcagccatctcccaatggatcccggggcgtcttccccagcagctctgatgtggaactacgatgaggtgatggctattgttcaccagtacaactgtgtcaaggcctgctttgccggtcatgaccacaagggtggccactctgtggactcacacggtgtgcaccaccgcacccttgaggctgccttggagtgtcctcctggtaccagcgcttttggtcacgtcgaagtgtatcctaacaggctgctgcttgtaggttttgacagaatggctgatacagaggtccgtttttgagccattaagcggctttaattcgtaccgacttctactacttctataatgtttttgtctatatagattacagctgcagcagtccaaacgctggctttaatccgatgcttacacaaattcatgtgacttcattgcctgccgcataattccattgaaactggattattgcaataatgaaatgaattccttacggtaag

SEQ ID NO: 42023 - DNA, 381 bp, Zea mays
  Clone ID: MRT4577_138323C.1
acatctctggatgttacagcgatggatcgcatcatgctacttatccttgtgtgcatcggcctggactgattcggcgtcctggacgccgtcgatgtgagaacgggctctggccttggttccatcctcctaaagctcctgtctgttgtgtacggcaacaaggccacgcttgaggtcaatgagtacccgtcccgccaagtttcgacttctgtagttgaaccatacaagactgtagtgtccactgactccctcttcgagcagactgatgttgctaaacagcttgatcataatgccatctacgacattagcctgcgatcccttgacattggaaccgcaacctacaccaggctcaacacgcttgtgtcccaggttatcgcatccctt

SEQ ID NO: 42024 - DNA, 511 bp, Zea mays
  Clone ID: MRT4577_138324C.1
acatgaggggggtggggaattgccggtcaaaatcaggcgtccatttatgacagtcaccttgagcatccatgccatcccaggtgaacaacatttatctttttttatctcaaaaatttcatcttctttggggggggggggccattttcttcacataacctaacgcacagccacaggggggggataaatcagcctagacctaaaccgtggttctcacaatattctctactgtttgcatcttactacgtgttgattctcaactttcctgtattagctgttcgtgaaactgttggtgagtatctcccagctctacgtttttgtagcagatactatcctcactgttcttcatagagctgtcgatcgcttacatccactacttaccgcgctttcggcattctttggggccggtaatttgtggacatcacgtgagtgatctgaacctgctttctttcctcgagataagccctgagccttttgatttttgctatggttgcttccaccatttatactagtc

SEQ ID NO: 42025 - DNA, 273 bp, Zea mays
  Clone ID: MRT4577_138325C.1
acgggcgcagccgcaggcatggacacaggccagtttggctactgcggtcgccgcggcacgctgtgcattaggaacgtgctgaccctccgcgggatccctgaaggtgccgttgtctgcaacgtccatcaccacctgagtgaccgccgtgtattcggcaagggctctggggactacgcgaatgtgatcagcccctaccctgacaacgggacatggaggattaagctggcctctggcgcccagaacagtgtccccaggagctggcctgctatgatt

SEQ ID NO: 42026 - DNA, 259 bp, Zea mays
  Clone ID: MRT4577_138326C.1
tcgtgactggagaggaccagacgatatttaagttcttacactccattgatgtgcatgatggggatgcacaagctgggtattcaattcatttaaaccactctcagaacacgcgcttggtgtacacaaaccgcgcacagacccatatctttggtaatgatggaacaatcacaatagaagcttccgaaattaactggactgaaggaacgtgacactgcgatctttaatagtcttaacaagaggcgcagtaagcagcccttag

SEQ ID NO: 42027 - DNA, 552 bp, Zea mays
  unsure (1)..(552): unsure at all n locations
  Clone ID: MRT4577_138327C.1
cgnaaacgtggncaccatcggcgcgccgtccgaagagtaaaaactcgggtggccacggacaaacttgaaattggaataactccgcgtccatttgtgatctgcgctgaaggatgcaaaacctttgcgcgaactagcgagagtcgatgacagttgacaggacaaataaaattgtttgcagcattgcaattgcaacgagcgccatgccagatgcgcttgggaaaaaaaaaaaaaaaaaaaaaaaaaaaaaaaaaaaaaaaaaaaaaaaaaaaaaaaaaaaaaaaaaaaaaaaaaaaaaaaaaaaaaaaaaaaaaaaaaaaaaaaaaaaaaaaaaaaaaaaaaaaaaaaaaaaaaaaaaaaaaaaaaaaaaaaaaaaaaaaaaaaaaaannnnnnnnnnnnnnnnnnnnnnnnnnnnnatatataaaaaaaaaaaantttttttaaaagaaaaaatattttttttttttnnntttttaaaaaaaaaatttttttttttnttaaaaannnttttaaaaaaaaaaaaaaaaattttttttaaaaaaaaannttttttt

SEQ ID NO: 42028 - DNA, 571 bp, Zea mays
  Clone ID: MRT4577_138328C.1
tcgagcggccgcccgggcaggtataaaaaaaaaaaaaaaaaaaaaaaaaaaaaaaaaaaaaaaaaaaaaaaaaaaaaaaaaaaaaaaaaaaaaaaaaaaaaaaaaaaaaaaaaaaagttttttacttgggccgggaaccaccttaagggcaatttttgaaaatttccttaaggggggggggggtttaacctttcttttaaagggcccatttcgccttttggggggtggttttaaatttaattggccgtgtttttaaaacgttggaattggaaaaaccttgggtttaccaaatttaatcgctttgaagaaaatcccctttttgccagttgggttattagcaaaaaggccccaaccaatcccctttccaaaaatttgccaacctttattggcaattggaccccccttttagcggccctttaaccgcggggggtgggggggttacccccagggtgaccgttacatttgcaagggccttagcccccgtttttttggtttttttcctttcttttttggccactttcccgggtttttcccttaaatttttaattcgggggctccttttagggttccg

SEQ ID NO: 42029 - DNA, 453 bp, Zea mays
  Clone ID: MRT4577_138329C.1
atggcgccccctgctcaatctcctcgagcctggcttcttaagtatggagatttactccctgctgggtatctagccgaaaaatcccagctctctgttcctatttctcctctcgattctagtcacggtttggatcgattccttcgattcttggtgttctggtgtaaatcttgctggtggaaggtggagggagcactgcttgtgcgcagtgaggttctcctgctctctgttgttccatctgtgcacctgtgtggtgcgcagtctgtactgattattgtccaccgtggcctggtgcctgggctccctgctgcgcggtgttcgtcttctcgggctggtgccgtggacgtctccttcggctccggcagcggctctagtatctccgtcaacctcccgccatgcaggcccggacgtgggcggcggaattggttttctgggacagaaccttgtgttcgctga

SEQ ID NO: 42030 - DNA, 235 bp, Zea mays
  Clone ID: MRT4577_13832C.1
gccacgcgtccgcccatgcgttctcccactctttcggatcgaaacctttgattagaatggtattcacttcgccgccaatgtactaaataagcttcatggtaaatacatgtatgtctacctttacatttcggatgccaacactggctctcgagagaacattgatatagatcttgtctactaaaacagaacacgcatttatttgtgtacagaatctatctactttcatttctataag

SEQ ID NO: 42031 - DNA, 436 bp, Zea mays
  Clone ID: MRT4577_138330C.1
tcttctctacacattctgatgtctccacctgccgcctaccctgacacgttaacggcgctccttctgtccatgctccgcgtcgcgaccataacctggatgacctctatggccaactctgatcgctccacagcgcgcacaagtggctcgcctaaatccacgacgactactatacctactagcttaagaacctgaagcgagaagtccttagtgcacaggaggatgttaggggaatccagtgtgcacatctcgttattgggcaacttatggagatgtcccagggaaactatggattcgtggatactactactgaaaacaacgactacaggaagatccgcagaaacatcaaccgtaaggtgatccatccgtcagcgccagactggcagaaatatcactcgcaacgtgctagtaaacaagcttccttcgaatgtcaacaaca

SEQ ID NO: 42032 - DNA, 768 bp, Zea mays
  unsure (1)..(768): unsure at all n locations
  Clone ID: MRT4577_138331C.1
aatattcgctcaaaaaaaatcctttgatgaatatacacaaatctactgagccagaagaagatctctggttcacaaagaaggttgtccccgagtttacagaagagcatagaacagaagctatcactgtcttttacgtcatggctaagatattagcctcaaaagataatgatctagctcaagaatatactgtcatcgccagcaaattgaaaactatggaaccttcttgtgcgcatgaactattatgtaactacctaaaccctgctacgatccagacaatcacaaacatcaagagctttatcttcctaaagaagcttgataatcagatggacgagtcgacaagagttctcgagaaaaagctttctaagaagactgtcctacaaatgattcatataatcttctacaaaactctcccatgtccagaagggaaccactgccaacattatcctcggaagattgttcacaagaatgatttcttggatatggagcttgactgctacttctatcatcatgaaaaagaccgaagaagattcgtgcttaataacgatgagaaggagttcaagtatgcaggaaactttgctgatgaaaagagaggaaaaagcagtggatctggatttgctagaaatttctttgagagtctctatcatcctctntactacaagaattntagatgtgttcgctcaaaatgcgataaaagcgtcttgtgtccctataatcatagtctccaagaaaaaactgtttggatgacagttttcaaaaatttctttggaa

SEQ ID NO: 42033 - DNA, 1156 bp, Zea mays
  Clone ID: MRT4577_138332C.1
accaaatcgccgtcgccgtcgccgtcgcatcgcagcagcgggagtcccagggtcccggaccgaatccatttccagacacccaaggccaagatccatcgctcgttccaccggcagctacaaggactggccggaggacatgggcttcttccggcgcgagggcgggtggagcacggagtacggggagttcttcatgagctggtactcgcagatgctcctggagcacggcgagcgcatcctgtcggcggcgacgggcgtgttcacgggttcccccggcgtgaagatctcggtgaaggtggccgggatccactggcactacggcacccggtcccacgcggcggagctgacggcggggtactacaacacccggtcgcacgacgggtacgcgcccatcgcgcgcatgctggcgcgccacggcgccgtgctcaacttcacgtgcgtggagatgcgcgaccacgagcagccgcaggacgcgcagtgccgccccgaggcgctggtgcagcaggtggccgccgcggcgcgggaggccggcgtgggcctggccggcgagaacgcgctgccgcgctacgacgacacggcgcacgaccaggtggtggccacggccgccgacagggccggccgggccggatggtggccttcacgtacctgcgcatggggcccgacctcttccacccggacaactggcggcgcttcgccgccttcgtgcgccgcatgaacggcgccgggtcgtgccgggaggccgcggagcgggaggcgcacggcgtcgcgcaggccaccgggtcgctggtgcacgaggccgccgtcgcgctgcggagctgaccgcccgggacgggacggaacggaagcctacgatcgactgtacatacaggggttgggacttgggagggagctcaggttcttgttgggttttcctttgggtggagagcgagggagcgcagtcgacagccagcgagcagtctctcgtgcagtgcagtgcagtgcactgcagctccggcgtaaacgagattgtattgtgaccaagccgggagggaaagcagggaggggaggacaaagatgttttgtcacgtttcaggctccggccatcgccggagtttgtccggggaatatatcgatttcctacagaaatccgcacaaaaaaaaaaaaaaaaaaggggcggcc

SEQ ID NO: 42034 - DNA, 2209 bp, Zea mays
  Clone ID: MRT4577_138333C.1
cactcctatgggcgattgggatcatagagacccggccgggatcgacctcgatccattgaataattttactaatcaaattcttgttgggatatattcctccaattcccctcctcctcccaacaaggcaacaacaatctgttcaggccgccaaacaaaacccaaaaaaaaaacacaccgaacccaataatccgatcccacagaaacttttctctcggtccgttcgatcgatcgctgccgtgtcgtttgccagacaccatcagcacccaaaaccatggcctgcaacctggctcagtgcgccaccgccgccgcggcgaccgtcgcgccccgcacccctcgccctgctgcgtccgcgtccgtctccttctccgcgaggaagccggcgggcggcagcctgcggctgcagcggcaggcgtgctgcgagccgtcggtggcgccgtcgcgggcggtgttcgcctgccgggccgcggcgtcggggagcgcggccgacctggcctccgggggcaggaggtcgtccggcgtgccggtgttcgtcatgatgccgctggacaccgtcaaggagtgcggcaccgcgctgcaccgccgcaaggcggtgcaggccagcctctccgcgctcaagagcgcgggcgtcgagggcgtcatggtggacgtgtggtggggcatcgccgagcgcgacggcccgggccggtacaacttcgcgggctacgcggagctcatggagatggcgcgcaaggccgggctcaaggtccaggccgtcatgtccttccaccagtgcggcggcaacgtcggcgactccgtcagcatcccgctgccgcggtgggccgcggaggagatggagagggaccaggacctctgctacaccgaccagtggggccgccgcaactacgagtacgtctcgctcggctgcgacgccatgcccgtcctcaagggacgcacgcccgtcgagtgctacaccgacttcatgcgcgcgttccgcgaccacttcgccgactacctcggcaacaccatcgtggaaatccaagtcggcatgggccccgccggcgagctgcgctacccgtcctacccggagagcaacggcacctggaagttcccaggcatcggcgccttccagtgcaacgacaggtacatgcgtagccgcctgaaggcggcagcggaggcggccggcaagcctgagtggggccacggtgggccgaccgacgctggcggctacaacaactggccggaggacaccgtcttcttccgcggcgacaacggtgggtggagcaccgagtacggcgacttcttcctgtcgtggtactcgcagatgctgctggagcacggcgaccgcatcctgtcgggcgccacgtccgtgttcggcgcggcgcccgtggaggtctccgtgaaggtggccggcatccactggcactacggcagccggtccacgcccccgagctcaccgcgggctactacaacacgcggcgccacgacgggtacctcaccatcgcgcgcctcctggcgcgccacggcgccgtgctcaacttcacctgcgtggagatgcgggaccacgagcagccgcaggaggcgcggtgcatgccggaggcgctggtccggcaggtgggcgccgcggcgcgcgccgccggggtgggcctcgcgggcgagaacgcgctgccgcggtacgacggcacggcgcacgaccaggtggtcaccacggccgccgagcgcgccgccgaggaccggatggtggccttcacgtacctgcgcatggggcccgacctcttccacccggacaactggcggcgcttcgccgccttcgtgcgccgcatgaacggcgccgggtcgtgccgggaggccgcggagcgggaggcgcacggcgtcgcgcaggccaccgggtcgctggtgcacgaggccgccgtcgcgctgcggagctgaccggccgggacgggacgggacggaacggaagcctacgatcgactgtacatacaggggttgggacttgttgggttttcctttgggtggagagcgagggagcgcagtcgagagccagcgagcagtctctcgtgcagtgcagtgcagctccggcgtagatgagattgtattgtgaccaagccgggagggaaagcagggaggggaggacaaagaagttttgtcacgtttcaggctccggccatcgccggagtttgtccggggaatatatcgatttcctattagaaatccgcagaaattgatgggttcc

SEQ ID NO: 42035 - DNA, 155 bp, Zea mays
  Clone ID: MRT4577_138334C.1
cttagaaaaatttatttgtcaaatatatttaagggttagggtagtgtagtttccaatattcatcaccaaggatgggtttagcgaaccgcatttttcgaatgggacaaagggggatccataagggcgggagatattacgtagcacaggttttcaac

SEQ ID NO: 42036 - DNA, 2263 bp, Zea mays
  Clone ID: MRT4577_138335C.1
actccttagggcgattgggttcctcgaggccggccgggatcgacctcgatccattgaataattttactaatcaaattcttgttgggatatattcctccaattcccctcctcctcccaacaaggcaacaacaatctgttccggccgccaaacaaaacccaaaaaaaaaacacactgaacccaataatccgatcccacagaaacttttctctcggtccgttcgatcgatcgctgccgtgtcgtttgccagacaccatcagcacccaaaaccatggcctgcaacctggctcagtgcgccaccgccgccgcggcgaccgtcgcgccccgcacccctcgccctgctgcgtccgcgtccgtctccttctccgcgaggaagccggcgggcggcagcctgcggctgcagcggcaggcgtgctgcgagccgtcggtggcgccgtcgcgggcggtgttcgcctgccgggccgcggcgtcggggagcgcggccgacctggcctccgggggcaggaggtcgtccggcgtgccggtgttcgtcatgatgccgctggacaccgtcaaggagtgcggcaccgcgctgcaccgccgcaaggcggtgcaggccagcctctccgcgctcaagagcgcgggcgtcgagggcgtcatggtggacgtgtggtggggcatcgccgagcgcgacggcccgggccggtacaacttcgcgggctacgcggagctcatggagatggcgcgcaaggccgggctcaaggtccaggccgtcatgtccttccaccagtgcggcggcaacgtcggcgactccgtcagcatcccgctgccgcggtgggccgcggaggagatggagaaggaccaggacctctgctacaccgaccagtggggccgacgcaactacgagtacgtctcgctcggctgcgacgccctgcccgtcctcaagggacgcacgcccgtcgagtgctacaccgacttcatgcgcgcgttccgcgaccacttcgccgactacctcggcaacaccatcgtggaaatccaagtcggcatgggccccgccggcgagctgcgctacccgtcctacccggagagcaacggcacctggaagttcccaggcatcggcgccttccagtgcaacgacaggtacatgcgtagccgcctgaaggcggcagcggaggcggccggcaagcctgagtggggccacggtgggccgaccgacgctggcggctacaacaactggccggaggacaccgtcttcttccgcggcgacaacggtgggtggagcaccgagtacggcgacttcttcctgtcgtggtactcgcagatgctgctggagcacggcgaccgcatcctgtcgggcgccacgtccgtgttcggcgcggcgcccgtggaggtctccgtgaaggtggccggcatccactggcactacggcagccggtcccacgcccccgagctcaccgcgggctactacaacacgcggcgccacgacgggtacctcaccatcgcgcgcctcctggcgcgccacggcgccgtgctcaacttcacctgcgtggagatgcgggaccacgagcagccgcaggaggcgcggtgcatgccggaggcgctggtccggcaggtgggcgccgcggcgcgcgccgccggggtgggcctcgcgggcgagaacgcgctgccgcggtacgacggcacggcgcacgaccaggtggtcaccacggccgccgagcgcgccgccgaggaccggatggtggccttcacgtacctgcgcatgggccccgacctcttccacccggacaactggcggcgcttcgccgccttcgtgcgccgcatgaacggcgccgggtcgtgccgggaggccgcggagcgggaggcgcacggcgtcgcgcaggccaccgggtcgctggtgcacgaggccgccgtcgcgctgcggagctgaccggccgggacgggacgggacggaacggaagcctacgatcgactgtacatacaggggttgggacttgggagggagctcgggttcttgttgggttttcctttgggtggagagcgagggagcgcagtcgagagccagcgagcagtctctcgtgcagtgcagtgcagtgcagtgcagtgcagctccggcgtagatgagattgtattgtgaccaagccgggagggaaagcagggaggggaggacaaagatgttttgtcacgtttcaggctccggccatcgccggagtttgtccggggaatatatcgatttcctacagaaaaaagcggaaaataataagagcccggccctctcaggatccagct

SEQ ID NO: 42037 - DNA, 246 bp, Zea mays
  Clone ID: MRT4577_138336C.1
gagcgggttgagaacccctgaacacattccaatcgaaccaattaatttatttattatttctaccctattagtagatgtagcgtagttctagttatatctttccgcatatcaatcttcaccgcctattcgactctatgtcgtctagatctatcttaggtggcctgccgaccctaatacgaccgtaggatattactcctcccggagggcaagatctaattatctgttccagatactctaccttgattg

SEQ ID NO: 42038 - DNA, 434 bp, Zea mays
  unsure (1)..(434): unsure at all n locations
  Clone ID: MRT4577_138337C.1
gggggggggggggtttttaaaccaatttttttttgccatccaaccgctctacgatcagcctttcattccatttttaggggtaaacccaaaccctccaatctagagaggctcactcactccatttttcataaaaccacaactaaaatttggggggtggagggggggaactacctcaataccacactcatatcaaatttacacataaaaacccanncctaaaccctanaaaaaaccaaaaccccaccncataaaaccacacacatnccccccaaaacccactaaccaaaaccatcaacctcaccccaatattaacttacattaaacactccttttgtgggggttaacaacataactttttttttttttttttcatggtgtcatttttcttattaatatgagaagcgcggggcccatattttttttttttttttttt

SEQ ID NO: 42039 - DNA, 1036 bp, Zea mays
  Clone ID: MRT4577_138338C.1
gatccccaagaaggggtcgacctcctcctcctcctcctcccgccgcggtcgcgccgcgcccaacgagtgctgcgtcgtcgtggtcgagttccagcacggcggcacgctgaagacgctgctgtacaaccaccgcgacaagaagctttcctacaggaaggtcgtccggctcgcgctggacctcgccagagggctgagctacctgcactcgaagaaggtgatgcaccgcgacgtgaaggcggagaacatgctgctggaccggaagcggacgctgaagatcgccgacttcggcgtggcgcgcgtggaggcgcagagctgcgaggtgacggggcagacgggcacgctgggctacatggcgccggaggtgctgcaggggaagccgtacgaccacaagtgcgacgtgtacagcttcggcatcctgctctgggagacctactgctgcgccatggcctaccccaactacagcctcgccgacatctcctaccacgtcgtcaagctgggcatccggccggacatcccgaggtgctgcccgcgggcgctggtggagatcatgacgcggtgttgggacggcaacccggacaaccggccggagatgtcggaggtggtggcgctgctggagaagatcgacaccagcagcggcaagggcggcatgacgcccgtcgacgacgtcgcgcaggggtgctcctgcttcggcttcaaccaccgcagcgtcgcctaggctagctcccgtcagctgacaccgcagttattaagttattattaataataattaagctacatacacacgtactacctaagtatggccggccatgcccatgccccctcatctcgtcggtccgccggcgagcatcgatcgatctttttctttgcatgctgtcggtcgtccccatcattgtgcggatgtgtttaaagcgccgtggacttgcgtgtaacctgtaactcgtcttttgttctgtggtctgacgtataatctgtgtcggcatcccattctgataactccaagaccgcaacgagagggcgaccttggcaattctgaccg

SEQ ID NO: 42040 - DNA, 261 bp, Zea mays
  Clone ID: MRT4577_138339C.1
tggtcttgatccgttgcgactgcagcgtggacgtctgtaactagagtacgactcaggcgcgctcacggacgtcctaataacactgatctgatgcacgcctgtctgcgatggagctcatcaagtcccaggcgaccgtgtgcgcgctcctcctggcgctgctgctgctctcacactacgacggcgggacgacgacgacgatggggcggaggccgggtgtgcatggcagaccagcaccactcgttcccctgatctccgacgctc

SEQ ID NO: 42041 - DNA, 161 bp, Zea mays
  Clone ID: MRT4577_13833C.1
caaaggaagaattctggaggacctgatggagcactcgaccgcgcgcttcaactgagcacaccacagttggtgactaggatcttggtgtacgggcggttgaagcctcgttccgcaaccaccgctctcttgtcgccgatcagcttggccactctgaagtacgg

SEQ ID NO: 42042 - DNA, 372 bp, Zea mays
  Clone ID: MRT4577_138340C.1
ctgcattactgggtcttgcctctatacgctgggtggcgatgatcaaaattcagtggggcatactcagaaaataaatgctatggcagtgaataaatggcaatcctgtatgtcttgttgtcaccagtggagcaaaaggtgatgggaagcttctactatggaatgctttaagaggtgaacttgcttctgatctaaattcgaacttgaggtctcaggatatgatctatccctcagttgatacaatggagttctatagtgagaatcatctggcatgtggaagtgattgtgactatggtggctcagctgtggtacaattatgggatattgattctccagagtcttatttatctttctctgcaagtgactcttacatta

SEQ ID NO: 42043 - DNA, 367 bp, Zea mays
  Clone ID: MRT4577_138341C.1
gaaagggggaaagaaccgtccaagctgggctgattacacgtaggtctgcacctaagtaaccaagatccacatgacaacccgatgagaaggggtgaggcaccggggaaagccaaataggatacctacgttgtgggtaaagcttggccaaaacgtgcacaggggccagccttccctccaaacgcggtcaaggaagagaacgagcattaaaggcaactccctcatcgcaaggaacattagggcccaaccatcccttgatatcgataacgatgtacatggcagtacaggacagagccaacgacctccaaaaactaggacagcacttttaccattccagaccagcgggcgtgggccacccggaattaccgac

SEQ ID NO: 42044 - DNA, 386 bp, Zea mays
  Clone ID: MRT4577_138342C.1
ccttttcttatacagcttcagcgggcaagaggtgcaggtgctcattcactacaggctcctgctcgggtcgagaaccgtgctcctctgcctgcccagaatgatggcaatgagcagcccaatgtgaccgacaaaagaattaaagctcaaggatatggagaaggacaaggatcaagttgctagggcatataagaagaaagttaaaagcaacccatgccctgctaaccctgaccaatctgcggataaccacgaacaagatgctgcatctggtaacgagaattcccaagaagcagatgtagaaagcattctgcgcaactggcttggatgtgttttgaaaaaagtccaactagttgttggaaggttttgtgcatcttttcttccttgttttt

SEQ ID NO: 42045 - DNA, 255 bp, Zea mays
  Clone ID: MRT4577_138343C.1
cccaataaaaagacaacattttggtttttccgggggtttttttccaccatggaaggattttccaaggggggggctgcccccaatccaatattcaaaacaaaagggttaaaaatttgggcagccccaaaaactaaaaaactttccggtaatattataccccaaaagcttccaggataattccggaaaaaagggccacctttgggtccctttttttgaaaaccccttatccttaaccccctatttctgggggggggg

SEQ ID NO: 42046 - DNA, 779 bp, Zea mays
  Clone ID: MRT4577_138344C.1
cttcggcgggccgggggtcctcgtgcacgtaacgtctccgcgcctgcagcccgaactgagtcactgctcagagtcatattcaagacagagacccgagctccagtcacacctgctcccgtcacagctccctattagtaccttccaggcataccaactacttccactcgctacccgccctctcacttgctctctaatctaccctgccacctaccatacacacaccacagtcaaccgtgcccgttcccctctcgtatatatcccgcaactcccatagtctcagaaccacaaccaacactgtccacccagccagcttccaacagcgtcatggcgtcagagcaggccttcaacagcgacctccgtagcgaggctcaggatttcaagcgcgagaagaccgcccgcgtcaagtgggcttatggcaaggcgtttgggcccggccgtcgagaagaggacggacgcccgcgacctgccaaacttgcacccctgcccaaatcggcctggggcccccctggcatgcataagaaccgcaccgccatcaagaacgacatcgcgtacgccagcggcgattcatcggccgacgaagaggtcgagcacccgtctgttgcccctgtgcctgatgctggagtgacgtactcgttcgacgccgtgcagggaccgaaccacggcagccaggtccttggtcaggcgctcgacaaggccatcgagacctttgaggttcgccagacggacaagctgatcaaggaggagtacgaggtgcttcgcctggacgaaaagccatttct

SEQ ID NO: 42047 - DNA, 869 bp, Zea mays
  Clone ID: MRT4577_138345C.1
cctcgaggccggccggtcacagctacaccgcccaggcgtcagctgctccattgcgtggccgtggccgtggccgtcgacgcctcgcgggaaacatggccagttcctgcctctccaccgccgcggcgcagctccagctgcagctgcagctccatctcgcgtcgtcaccagtgttcccgcgcccggcgcgcgcgcaccaccaccggctcgtcgccgcgcacgccgttgcggtgcccgtacatcggaggcgcgcgctcgcggtcaccgcgagcgcgtcgcaggaggaggccggagccacggtcgttgtcgaggaggaattggaggaggtcgcggagcaaggcagagaggtacagttgcaagaacaagacgaagttcaggaggaaggtgcagccgtcggggctagctcggacgacagcggcccgtcggtggccgcgaccaccaccaccaccaccaccaagctctacttcgggaacctgccgtacaactgcgacagcgcgcagcttgccggcattgtgcaggagtacgccagcccggagatggtcgaggtgctgtacgatcgtacgacgggcagaagccgagggttcgccttcgtgacgatgaccacggttcaggactgcgagttggtcatcaagaacctcgacggcagcctgtacggtggccggacgatgaaggtgaacttcgccgaccggcccaagcccaagcaggcgctgtacccggagacggagcacaagctgttcgtcggcaacctgtcgtggacggtcacgtcggagatgctcacggaggcgttcggccgctgcggcaccgtggtcggcgcgagggtgctctacgacggcgagaccggtcgctccaggggctacggcttcgtctgctac

SEQ ID NO: 42048 - DNA, 743 bp, Zea mays
  Clone ID: MRT4577_138346C.1
ggccggccgggacccattgctgagccctgtcagcctccagcgtatttcttccactggcgcggtggagatgagggcgaatctggaggacctgccgtcctgtgatctgatgtacgagctgctccgccgcatgaagtgcagctcccagccccacaagcggctcatcctcatctggcccctcggctctggaaaggtaactccccctcctattatccagggtgactattgcttgtgacatttatccactggagatatgctgatggctgctgtggcgaccaagacacctctatgcatctaagctacagaagctatgaatacgggagagcttgtttcacgatgattaggatgtgggcattattgatgaagctatgaagaaaccctcatgccacataggcttcattcttgatggatttcctaaaactgtcactcaagcacagaagcttggtgagatgttgacaaagcaaggtgcccatggtgacaaaggcctgaactttgcgagtgatgatgctgcattgcaaccaaccattactggtcgctgtatccactcagccagaggaaggacttaccactcataatttgcacctccagagtctccacgagttgatgatgtcactggagagccattgattcactggatacatgacaccgctgatgtcttgaagacatggcttgaagctttccacagacatgccgaacctgtggttgactattactccgagacaggcttagtggtgaatctgtctgca

SEQ ID NO: 42049 - DNA, 290 bp, Zea mays
  Clone ID: MRT4577_138347C.1
ccggccgggagaaacatgatcccatgcaagcgatgccacagtttgagggcgcgctatgatactccagtcagcatgctacgtgcagaaccatacgtcgtcgccggtgactgccaatgaatgggcacccgcgggcgtcgtcgccgccgatgtcctcctcctcctcttcctcttggcgcagttccaagacctcctgaggagagccgacgccgcccggctgccgttcgccgcgcacgccacgaagaaatccgataccgctatctaggttccccggtaacacccagcgggcgggg

SEQ ID NO: 42050 - DNA, 329 bp, Zea mays
  Clone ID: MRT4577_138348C.1
ttccacgcgttttttattcccgcccccacacggacgtgagggggggtactttgaggtcgggggggcgggtaccggttgcgatggctgcggggtcggtgtcccttggcgagaggcgcctggtgcggttcttccaaagtcctccgaggcaagaacatcacggccaccgatggcaaggactgggtggacgctaaagcgtcatggtttggtaagccgccgggtgccggtcccgacgataacggcggcgggtgcgggtacaaggacgtgaacaagcccccctacaatagcatgggcgcatgcggtaacatccccattctccaggtcggcctggg

SEQ ID NO: 42051 - DNA, 113 bp, Zea mays
  Clone ID: MRT4577_138349C.1
aggttaaattcaaacaacattttttcatgattaagccctttgcgggcgcacgattgttttgggttacgggaacacaggggggccatgaaaccaggttagtcacgacttaagac

SEQ ID NO: 42052 - DNA, 409 bp, Zea mays
  Clone ID: MRT4577_13834C.1
aaagcttgttactcccaatcttaggaaaagtaattttcgaacacccttggggaccaatttcacattaaaatctggaaatgtaacttcttatttttggttggccacatacatcatgcgagagactttatttttgaattacaactaataagcaatctaaaagagggcaccaccaatgatgtgttgttggttggaggccgctcggtctgtcaaagcaagttggccaaagggcaacatttgttgttgttgttagagggttgcggggtttgctcgtttctgttggttgtagggccgctactgttgctgtgtcttgttgggagctccgtttgctgccccttgctggctttctgggtgtggtctttgctgttgcgttttcgctttgtgggttttgtgccgcctcttgcgtttttgg

SEQ ID NO: 42053 - DNA, 299 bp, Zea mays
  Clone ID: MRT4577_138350C.1
cgcgtccggcgcagcggatacacattactcgacaccactctcaggaacggatatttacgatttctgatcgatgaaaaacgcagcataatgcgactcctgctgtgaatggcagaatcccgcgaaccatccagtttttgaacgcaagttgcgccccaagtcttctggcggcagggccgtctgcccgggctgctcgccctaagacactcctaacacccccccgccaggcgagggacgtgccgtgtcgccctttgttaagagtaccttttgatgagcaaggccaacaaggatcttatgggccg

SEQ ID NO: 42054 - DNA, 406 bp, Zea mays
  unsure (1)..(406): unsure at all n locations
  Clone ID: MRT4577_138351C.1
ctaaaaacaacttttatttattttttannacaaacaaatttattggggattttgggatactttttttggttaaaaaaacatccgaaagaacaacacatacaccggtgagcggaacaacaggaaacggggcggctccctttattgtatccacccaaacgggggggcaattcccctgggacctgtggccaataacaaacggggcgagcataaaagtgcccccccacccgacaaaataccaaatgcaggacccatcccaatactgcaggaaagggactagagaaaccctaggggacccggcccacccccccggtgtgccgatggaccaccaccaatattgcccctgcagcggacccgaaagtatttaccacattccgagacaaggtaaccattgtttccatggacgggg

SEQ ID NO: 42055 - DNA, 439 bp, Zea mays
  Clone ID: MRT4577_138352C.1
cctaccccggggggcgccgcgccgctcgcgctcgcgctcgcggtcgccgcgttggccttcttgtgatctctgcatgtgaccactggacggcgaccttcctcggtagtaagtagcgcgcgcgacggccggagggagtctcagtcgacacatcgtgccgccggcgttccacgggttcattcatttcccagtgtacttatgcatatgctccttctgtgataataattttcacgtactggccatcatatatatgggctacacactagttctttcttggaatgtatggaagttctcttttgttgctttagtctttattttctcaaatctggtaattttagaacaatccttgtaagaaatgggaacgcagattcaagaagaatttgtaagtgtaatcagctgcaggtcattccagatttcgttgctttggtctttattttttcaa

SEQ ID NO: 42056 - DNA, 282 bp, Zea mays
  Clone ID: MRT4577_138353C.1
ttggcttggaccttggctgattagtgctgttagtgctgtcaccgactgggtcgttggctcggtcaggacctttctgttttcggcagaaactcgttggatccttcggttaccatgagtcgtatattgcgagtgtcgagacccggagagcgttattgagtaaaccttcgggggtgctaataaactggagtctggacgggacgtttgcggtattggcgtgttttacctgcatacgcggttcggtcgcgataacatgataactcgggtggtgaaccgtcggctagc

SEQ ID NO: 42057 - DNA, 231 bp, Zea mays
  Clone ID: MRT4577_138354C.1
gggacccgtcctcttctgcgacataggcaacaacgccaacgatctactcatgaaggactacacggacgaccagcagctgaccatttctaccgacagtgcctgtggactgggactgacttgcacagctgttaataaaggagggctttattatctcaatggcacttcaggtgacacgtacaagaacaccactgcttgtgcttaagagctcactgaatcaaagatctctactac

SEQ ID NO: 42058 - DNA, 432 bp, Zea mays
  Clone ID: MRT4577_138355C.1
cggacgcgtggggaaaatgacagtcatcatggccaaataaccaccaagaactacttcttggcgcgactggtcgacgtggcacgctctggagagtcttcctcggctgaggtcatttggcttctgaacattaacagtgactgaaagcctttggtggatgatgtggatgaaagttccaaggaagaacattcatatactgataacctgataggcaataagaggaggtcttgattctcagataaacctgactatactgaatatggctccaaaaaatgttctgccctggcaagctacatggctgctccacaatcttcataggccatactgcagtggaatagttgacacatgacttagctcttgattagtatataaaaacggtttcactcggcttcactccgttaagccctctatcaatggtgagataatttcacatta

SEQ ID NO: 42059 - DNA, 240 bp, Zea mays
  Clone ID: MRT4577_138356C.1
ttcacgcgccaagccgtgacccagtcggcaagttagagcgagggaagcttgggattctccccacccggcctggatgctggtcctcaccaaaacctgccccacgacggaccccctgcttataccccatcactcggccgacggctctgcctcaaggctccaccttggcgcttcccgccaaggtgtcgccgaggaatgcgacgtgcgtcgagagtgtatatttgggggaagggtggaggagga

SEQ ID NO: 42060 - DNA, 396 bp, Zea mays
  Clone ID: MRT4577_138357C.1
gctatgggaagaaccgagggtgacgcatagctgttgcacaattactaccaacaatggctcataagagcttaaagatatcgggagggaagctaatatcatgacactatgaaaccatcaccataagacactccacgaaacactgttgacttatcaaacataccattgtgaagataataccaccacctcctaatgataccgcttgcttgatactggatggtggtaccactgactaccacattggctatcaaaatcacgtacagaactccttctgaatgaacgcaagtgtgcaccagacatgaagaggtcctcactaacatgctccaaaccatggaattgaactaaaaatttgtataaacggatcctaggtgagctaccaataacccctgctgccagggc

SEQ ID NO: 42061 - DNA, 333 bp, Zea mays
  Clone ID: MRT4577_138358C.1
cttgtatgcatgctcggagtggtcgagaccgccgtgataccccgctgcagccttgatcctaaaaaactcactggggctaccacatctgtacaccttctatctggtatgccgctcacctggcctgcttttgtccttgtacccttctgtgggcggtcctgactacatgtgctgccatgggctcacgctgcataccctggttgccagggtcgacgctcacgccgtcagcgcacggtctaaaatgaccatcaaggctttgtgaaccgagccttcctaaaatgacatactgctctggtgcatatctaaaagggaccgctcatgagatgagactgcata

SEQ ID NO: 42062 - DNA, 363 bp, Zea mays
  unsure (1)..(363): unsure at all n locations
  Clone ID: MRT4577_138359C.1
gctagaccgagctgaatatgacagaaagtccaaggaaaagagccgggaacgtgccaaggattcgaacaaggatcgctacataaaacgcaacagcagccgtgacagggagtatgaccgcagaagaagccatgatcgcttacatgacagggaaagagagagagattccaggcagtctcgtagttatgattccagaagccaccgcaagtcatattccacaaggggaaattctanggattatgatcgatctgggtatgtttacttatacttcagttagcatgtattaatggaactccaaagagctgctttgttatctcttgctattgtggtaacactgattgttgtctttaaacaatgatagaatgt

SEQ ID NO: 42063 - DNA, 246 bp, Zea mays
  Clone ID: MRT4577_13835C.1
aagaggatgggcgagagaagagacaaggctctcaaggagctcatggaccaggtggccacgaagcagccaaacagcatgtgccatggcaacaaggagaatttctgggagggccagggcttcaagttcatcgcgtctatgtcgatgctggctctagtgagcctaggacagcgatgaatcagtatcgcatacccaatctggtggaaattaatcgttaggtgtgcaactagctgataggttaagcagatg

SEQ ID NO: 42064 - DNA, 443 bp, Zea mays
  Clone ID: MRT4577_138360C.1
ctcttcttggcctcctcgccctccgctccggagggcaagttaattgttgccagcgtcctctgttgctcgacctcgcctgagaatgggaaggaaaacaagcccgagaagggtatggaaaattcgaagcccgaaaacatggtttcaaacgggataaccatggcctcacctagatctcacaacagcacaacacgttccccataggaatcgaaattggaattgtaggccaggatgagccatgtcgcgggtacagatccacgtcgacgcggccatggcggcgagcagggagatgggcctcgacagtagtggtggcatggggagggaagaccacatggcacatgtcgtgtgtggacacgtaggggccgtggagccagcggcggcgcgaccaggcagagcgcgtgtcagagtgtctgcacctgcaggagatggagaggaggagcacgaga

SEQ ID NO: 42065 - DNA, 442 bp, Zea mays
  Clone ID: MRT4577_138361C.1
gcctgcagggagctgggacggacagttatattgccgggacgagcagtttattagtcggcggtcgaccttcgtttacttactttgaatagcagcaatgtgctgggtcacatgatcgaagagaaactgcatgcatgccggaaatacaatgtgcaaggtcggtgcacaagatttgcggagattgaccaacggtgtgcacagctcgagaacagctaaaatgagaatgcctatcgtcaactcacttaccatagactgctacttgagtgttgtacaagaaataggaggctgtgtcaggagccatgatacatatactggcaagacagaaatcgaacgtggctacgactgattgaccctacgtgggctttggcatagggcatggatcggtttagaccaagacgcgcataccacacattgtaagagacgagggcatcctctccatgatgca

SEQ ID NO: 42066 - DNA, 182 bp, Zea mays
  Clone ID: MRT4577_138362C.1
aaggacgccttgtggaaacagaaccgtcctctagtactcctaacctaattcaactcaatccgtacccaaaaccatatgtctaacaccaatcaatgctgcagttttgagaaccgcaatcagtactcacaatcaagttggtcagctctcatcaatggccactgattactatccatgatttaggt

SEQ ID NO: 42067 - DNA, 186 bp, Zea mays
  unsure (1)..(186): unsure at all n locations
  Clone ID: MRT4577_138363C.1
tgctgtcccccacctcccgtggcccggcagagagcggggggggggagagagccagatcccngaggcccgagtgggagccccaccaccagcgactgcgggaatggggggcaccgggaccgggcccgggtcctgcagcccctccacccgcctgctcaaggggcagctccacatcctgagcccgaccat

SEQ ID NO: 42068 - DNA, 363 bp, Zea mays
  Clone ID: MRT4577_138364C.1
ttcaccatcgacacgagcactgagctgaggtagaacccgaacgagaaggaacgatagatcattgacatgtatactgtctgcatgtgcaccggcttcccagcggaggacaacacctgctcgtgacagaactccgtgaggactctgttggtgaacagctccagcaggtcaaagacgaagaactgcgcctctagccagaacacagacagctgctgctgctggcgtcgaccgtcggccggatgtctgctctacgccgccgttggggacgccatggtcagtgcgaccaggttgagccctgcaccgctgcgctgtagcggggcgatcccggccagcgcgcctgtgagccttcctctagccgactagcct

SEQ ID NO: 42069 - DNA, 889 bp, Zea mays
  Clone ID: MRT4577_138365C.1
gtgatcctacaaacactacgatatttattgggaatttggacccaaatgtgatagaagatgagctgaggcagggcatcagctgaagaggcagtacaacgtcttcatggcacaatgattggccaacaagctgttcggctttcatggggccgaagtcctgcgagtaaacaggattcatcagctgtgtggagtcagcaagcagatccaaatcagtgggcaaacgcttactatggctatgggtatgatgcatatggatatgctcaggatccgtcatacgcttatggtgcttatgcaggatatagccaatatccccaacaggttgagggaactgttgacgccacttctgttgctggtagccatccaggcatggagcaaaaagaagagccatatgatccaatgaacattcctgatgtggacaagttgaatgcttcatacatggctgttcatggtagagccatgctagggcggtccttgtggttgaagaccaacccgctgccccaaccgacataagcatgtttcctcccccgaagactacagccagtgctggtgggcgcagctgggtttcatcgcagatgattttgcccttcccagtagtcacgttacaacgatggcgatggatcattaaactctgaaattgttgtaggctggccagcagcttcgtctatattgagaacattcgatgtatgataggcgtgactcttttgtactgtatttcttaggctgttggttaatattattaggacaatattgagggagcggtgaaagtcaactgtctgtatttccaactgattattttgctgttcgatactcaactcccgttcacttggcagcacaatggcatatctgatatttctaaaaaaaaaaaaaaagggcggcgctcgcgttctagaac

SEQ ID NO: 42070 - DNA, 445 bp, Zea mays
  Clone ID: MRT4577_138366C.1
cacatttgattgatatgttgctgccctcaaaggggagacactgattaggaagcggtatgaacggattcagcctgtcaacaaggaaggtacaccggagagtccgcctgtcaaggagcaagctacaacggagagtgtcaaggctaaatgattcatggttattgctccgagaaagatattatccactcaaaacactgaacataaatgtgctgtacctttggaaggttgaattcaaagttcgtcagcatcattatgcatctagtttttgtttaactacaagatggggtcacagtacactgatattttagttgcaggtgatgtcctgtaaattttggtctgctgggccatgatcaaatctttagatgatggcctttttttaggttatttggccaccccctccattttaggtcattaattcactttgggaattgtctttttttttataaaa

SEQ ID NO: 42071 - DNA, 223 bp, Zea mays
  unsure (1)..(223): unsure at all n locations
  Clone ID: MRT4577_138367C.1
ggctctttccaccgccatctagaggaatcattacaaacttctacctgcacacgcgcgctgcgacaaacacaccaagcgtcggcatctatgccttactaccagaacgcgtactactgactctcaacagacgctgcagngattccttgggatgatattanccnccntccccacatccaaaaaatataataaaaaaaaaaanatataataataaataacccccccc

SEQ ID NO: 42072 - DNA, 2148 bp, Zea mays
  Clone ID: MRT4577_138368C.1
cctcgaggccggccgggccgggaacatgatgaaacgctctgtgacaacattgggtcgtcgcaacctgtcatcttcccagatgatacgagcacctctgagcttcgatcttttaaaaaaaaaaaaaaaaaaaaaaaaaaaaaaaaaaagattgcatcagcgagcacaaatcgaaccgtggtcgcacaagggcctgtttgcagcagcaagcattcaagaaatcaatcggccgcctcgtcccctccgcgcccggcgcctccgacgcccaagcagcgtgaccgtggaagggacgaagaagcaccctcaagcggccgcactaatcccaaaccggcctccgacccccaagcagcctcacgctgctcgatggcggcgccgtatcaccagcctacgagcctggaggaggtccgcactctgtggatcggcgacctccagtactggaccgacgagaactacctctacagctgcttcgctcacaccggggaggtacaatctgttaaaataatacgcaacaaagtaacaagccttcctgagggttatgggtttatagagtttgtttcacatgaagctgctgagaaaattctccagacttacaatggcacacagatgcctggaactgaacacacattcagattgaattgggcctctttcagctctggtgagaggcgccctgatccaggatctgatcattcgattttcgtaggggacctggcacctgatgtcacagattacttactacaggaaacattccgagtgaactattcatctgttagaggtgctaaggttgtcacggatccaaataccgggagatctaaaggatatggatttgtaaagttcgcagatgaaaatgaaaagaaccgtgcaatgacagaaatgaatggtgtgtactgttcaacgagacctatgcggataagtgctgcaatacctaagaaatccactggctctcagcttcagtattcagctgctaaagcggtgtatccagcaacagcgtatgcaatgcctcagctccaggcagttctccctgacagtgatcctacaaacactacgatatttattgggaatttggacccaaatgtgatagaagatgagctgaggcagatatgtgtacagtttggagaacttatatatgtgaaaattcctgttggtaaaggatgtggttttgtacagtatgcatctagggcatcagctgaagaggcagtacaacgtcttcatggcacaatgattggccaacaagctgttcggctttcatggggccgaagtcctgcgagtaaacaggattcatcagctgtgtggagtcagcaagcagatccaaatcagtgggcaaacgcttactatggctatgggtatgatgcatatggatatgctcaggatccgtcatacgcttatggtgcttatgcaggatatagccaatatccccaacaggttgagggaactgttgacgccacttctgttgctggtagccatccaggcatggagcaaaaggaggagccatatgatccaatgaacatacctgatgttgacaagttgaatgcttcatacatggctgttcatggtagagccatgctagggcggtccttgtggttgaagaccaacccgctgccccaaccgacataagcatgtttcctcccccgaagactacagccagtgctggtgggcgcagctgggtttcatcgcgcagatgattttgcccttcccagtagtcacgttaaactctgaaattgttgtaggctggccagcagcttcgtctatattgagaacattcgatgtatgataggcgtgactcttttgtactgtatttcttaggctgttggttaatattattaggacaatattgagggagcggtgaaagtcaactgtctgtatttccaactgattattctgctgttcgatactcaactcccgactcccgttcacttggcaggacaatggcatatctgatatttctatcgttgaattacctttaaaaaaaaaaaaaataaattaaaaaaaaataattaaaaaaataaaaataaaaaaattaaaaaaaattaaataatattaaaataatatatataaatataaaaattaattataaataaataaaataaatatggggggggccttttaagaggttcaaatttttttcccccgtttttgcaagtttatatttttttt

SEQ ID NO: 42073 - DNA, 299 bp, Zea mays
  Clone ID: MRT4577_138369C.1
tttatatttttttttttttggaaaataaaactggggacttttaaaaataaaggggtaataaactcctcaaaacaccttacagacctatattactgtacactccccaatttctttacatccaactgaccatcaattctcttaatttcgacaacacaaatgtcacaaatgttttcataaacctgctccaacgcccacatacaaacccaataatggaacctcttcccttatctatcccaacgagcattaaacggaagcttgattcagcttggggtcatcaaccttaaaaccaaaaactgtgc

SEQ ID NO: 42074 - DNA, 2839 bp, Zea mays
  Clone ID: MRT4577_13836C.1
gcacgagccccagcactttgcagcagcagtcctctctcctctcactctactcctccagctcccccacccctctcccaaaacctcagttcaatcccaggtttcaaatccgccaccttttggacacacaccacatttgcctacccccagagctgagctagctagctgctctctctctctcttttcacctaagcgagaacagagcccaagaggcctcaaaagaaccactgcacttcctccgcatagctcgtcgccctctctctcctatcagtcctcccagctccagctaccacagcagccctctcgcttaaaggaggagggagaagagggcggggcgagcaatgtcggagcagcagcagccattgccgcagcctcggagcagcatgcgggaggctctggagaaggaggacaaggagaaggcggcggctgctgcggcggccaaggagaaggcggccgtccccaagaacggcaacggcaacggcggcaagaatggcggcggcgccggcagcggcaacggcggagcgcccccgcagtccggggaggagacggcccgcgagatccaggtggtcagggaggcgtaccgccgcgagacggccgcgccggcctacgtcatacccgaggagccgccggccgtggtcgagctcgtcggctggtacatctacggcttctgctcctacttcatcacccacctgctgctgccggtcctcttcccggccatcatcacgcaggtcgccttccccaactccgacttcacgcccgaccccaagtacaccctcaagggcgtcacctgctccgtccacgagatgtccatgtaccagaggcttaccaagcactccattgtgatcgatggatcccggatgtcaccattgggctggagtggactgtcgtgggcaatcggcatcctcatcgtggcgccgctcctcacccagaccgctcaccatctcgaccgtggccagtaccagtcgctgatcctcattgccgccacgtccttcgggtccttcttctgcctgctaacaggcttcttcaagacggtctgggtgttcctgttctacatcctcttcatcgctggctcgatcatcgtcgctgaggcggtgcacacccgcaaccttgggctgatgatccgtggcctggctgcgcatgactcgggcaagcaccttgtccttcgccgccgcgctgctgccagccagctcagcctgtactgcactgccataggaggcattggagctgccctcatggcagctttcatgtaccacatgctgcggcgcactgaccagctcactggcctctgggtcgtgtccatcttctgtggccttatctggttcatcggcatctgccatggcctcttcacaaacaggcccagcagctcgtcacccaccaccgcattcgagcccaacttcttcaccaagctcagctacagcatgaccctcctccgttacccgcaggccattggcagcctggttgcggtgttcctgtcctctttcgccacaatgtgcatcttcaccagcggcacgctctatgctatcggtggtgtctgcatcaagccggtgctcgtgcttgcgctatggatcctctactttctgttccccttgatctcgctcccgctcctccacccgatccagatcataatccgcgcggacgccgtgcgcatgcagctgctcgggttcataatctgcctgttcgtgtccggtgccgggttctacttcaagagccacaggtggagggctgcccacatcatcgtcatcgccctggtccagagcaccgccaatggcatactgtacgcgttcggccgcatcctgctcctcgatgcctcgccgccggggaaggagggtgcgttctcggtctggtacgcgtttgttcgtgtcaccggtgccatgatcggcttcgctgcctcctccgctggccctgggcgcgcgggagggtcctttgctgctgcgttcctcgggagcttcctgggcatcatcgtgctgatcttcggcaacgtcagcaacatcggggcgctgaaggcggccgggcacctcaaggggatggacgacgagaagaggatgggcggtctcgggatggagaagggcgagggcatgggtagcgccgtcgctgattctggcgagagcagggggagggtatgatgatgactattcgtgacagtgaattcctgggaggtgggggagaaaaggattgcgttctgtggaggttgtgcttgtgagaaggatttgttctctcttttttttcttgtttctttggccgtgtttcagtgacactgttgatggatcccagtgctttgcccgtttgatgcatcatggtggtggtggtgatgatggatgacatagtggtaggggagtgtgtgctagttgttaatgtgttatttattcttttgcttgcaagacaattgtaactgatgatcgttagatcatatggttcttccttcgttcttcacttgccttgcaagacaattgtaactgatgatcgttagatcatatggttcttccttcgttctaaaaaaatgtgaaaatggcattgtgtagacagaagtaaaacatctgtaaactcacttgtagcgatcaaaaagttaactctgataccagatgctcgtatgcatttgaatcaccgccgtcgtcgccgtcggtgcctacctcaaagcaagcgacaaacaacagcgtctccccctgggtcatcgtgtgcgctgctgtcccgatgaacggagccagcctgctatcgttactttgaaacccagcgctgtggctagctcaacaccctgttagccaaaaaatggccgtcagatcgaagaaccgctggatgcagcacatacattacatgtacagtggaccgaaccgcactgctggtgcta

SEQ ID NO: 42075 - DNA, 770 bp, Zea mays
  unsure (1)..(770): unsure at all n locations
  Clone ID: MRT4577_138370C.1
agnagagctgaggcagatatgtgtacaatttggagagcttatatatgtgaaaattcctgttggcaaaggatgtggatttgtacagtatgcatctagggcctcagctgaagaggcagtacaacgtcttcatggcacaatgattggccaacaagctgttcggctttcatggggccgaagtcctgcgagtaaacaggacccatcagctgtgtggagtcagcaagcagatccaaatcagtgggcaaacacttactatggctatggatatgatgcatatggatatgctcaggatccgtcatacgcgtatggtgcctatgcaggatatagccaatatccccaacagattgagggaggtgttgatgccacttctgttgctggtagccatccgggcatggaacaaaaagaggagccatatgatccaatgaacatacctgatgtcgacaagctgaatgcttcatacatggctgttcatggtagagccatgctagggcggtcattgtggttgaagaccaacccgctgccccaaccaacataagcacacagccaacattgcctaatttccccccaaagactgcggtgctggtgggtgcagctgggtttcgttgcagatgattttgcccttcccactgggcacattatggcaattgatcatcaaactctgaaattgctgtaggctgaccaacagcttcgtctatgttgacaacatcccatgtatgataggcatgacccttttatgtttcttaggctgctgcttaatattatcgtatctggac

SEQ ID NO: 42076 - DNA, 622 bp, Zea mays
  Clone ID: MRT4577_138371C.1
attgggaccctcgaggccggccgtgatttcttcaggtgtgctggtttctcctccccctccgagtcgggttcgcgatcgtcgaagttctccggcgatcggatacgtggatgagcggatcgagatgcagtggacagatgatgagcaccgatgcttcgtcggcggactcgactgagacacggacgaccactacctccacaacggcttcaatacctacggcaaggtcctcgagtccaatatcatgcctcgataggtcagacgcagagggcccgctgtgcttcggattccataccttctccaaggaggaggcgatgtggaacgccatccagggcatgaacggaaaggagctggacgaccgtaacatcaccgactatgacgcccaatcccgaggcgtccgagaacgtggagaaggtggagtaccgagatgaccgagaaggcggcatctactccgatgacgagcgcctcgatgttggtggcgagtacgtcgatgacggcggctacctgggcgactacgactatcatgatgatagcaccctccacttggtggtgaatcgcgggggcggcttgcagaacttcgaggagaacttgactgactgaactatggcccccgagggggaaacttatg

SEQ ID NO: 42077 - DNA, 1907 bp, Zea mays
  Clone ID: MRT4577_138372C.1
cccactcgtccgcccacgcgtccgcccacgcgtccgactagttctagatcgcgatctagaactggttagccaaacaatagcaatatccccaaggcatttccacacctctattgggataccatccgggcctatcgccttgcccctttcatcctctttaaagcttctttgacctctgattcttggatcctgcgtacaaagcatctatttaaatcatcaaaggagtcatccaattgggtgtccatagtctcattctcaccattgaaaagattgtcaaaatacctctgccacctctctttgatgtcttgtcctttcaccaagagttgatccatctcatccttaatgcatttaacttggttgagctccctcgtcttcctttctcgaatcctagctatcttatagacatctttctccctttcttttgtacttagtcttcggtaaagatcatcataggctcgaccctttgcctcagtcacagctcgctttgcagtcttctttgccaccttatacctctctatgttgaccacgctccaccaagtatccttagattcaccaatgctccctttggtcactccaaacacctctgacgccaccttcctaatacaagttgccatcttcacccacatgttgtttgcatcttcttcttcggaccaagcgccctgcacaaaaactctttccctaaaaacttcgaatatctcccctttgagtttccaccacttcgtcctcgcagttttggcttgtttaaccctacgggtactgatctttctggatactgaacggattgctctcaaagtcactttagaaaatacagcgtttcgcagttctgtacaggctgatactcctgatcgtgcgattccatatcctatcagaacagctgctgggcttgcaaatagagccaatagggtggcattagtttcagtgaatgatgccagggaagcttcagcaccaccaagggctgcaagccagtcgatagctagcttaaacaagaaaggcacttgaacatttataacctttgcaccaactaacaggaccaacgacaaggcaaccctaaagcggaagtcagggctgtcattcaacaataagtacttcccaaggtttttcaatatctgagaatcagcaatctcctcatcaatatccttttttgatgcatctttctggaccttgtcaccaactggcttcttaactgtcacagcattggcggatgtggagaatgcattacctctcggggatgtctcgtagagaataggggtgagatgatggagtgggctggagatcccggcgtcgggacaccgtgaatggggcgttcctggtgcagaacagagaggaggcaggggctgctgggcgcaggtactgctgggtgatgttgcagcagagatgttggtcgggatatcgttgtcaatgaagtcggccgactccaagtagaagaggcattgacaggcgtggtcgtggacgtatggctcgtcgcagttgtagcagagtccttgacgcctacgttcttgttgttcagtcggagagagacgacggaactggcgagcacgatcaccggttcctatcggggcttgcgtgctgcccaggtgccggggcggcgtttgctgcagcagcgcgcccagcggggctcgatttggagcaggctggccctggcgcggcaggggttcaacgccccgtgatgtcggggccggcggcgacgctgctgcgcgggtctcgaaggcccgagccaagtacatggccgactggaggtcccgcggctcgcgaagctcgacgtcgatgcggatgtggtccgggagcccacccacgaacaactcaggcttctgggatgccgagaggttgcgggagtggcacaacactatgttgaagcggtcggcgtagtccacatctagactgcgcctgtgaggtggtaggaagccagccat

SEQ ID NO: 42078 - DNA, 204 bp, Zea mays
  Clone ID: MRT4577_138373C.1
ctcaagcaacacatccggcgacgcgcactcaccacgacctgacatctacggctaccacgatattaccccgacgggcgctaatagacctttcatcgatctcatcataggcgtttatgattccacagttctcactagcatctagtgccattactccacagctcctatcactagccactttaatgggctcctaacatccatgagcgc

SEQ ID NO: 42079 - DNA, 617 bp, Zea mays
  unsure (1)..(617): unsure at all n locations
  Clone ID: MRT4577_138374C.1
cccggggtccaccacagagtgttctttccgcaccatgtgttttccacccgggcgagggagagcggcaacggcntgcactttgcccttgacacttcttaagggaacagtggcatgtcctgctcttaactactctcaaaggtctctctctgtcatatctgtctcacttgctcacggcacccacaaccctctttgatccctcttcgttcctccttcatcgcccacattctacaggggccggctggctttcattctccattttctccttctctctcctttccctctttctttcttccttcttcctctccctcccccttcttccccccccccttcccccccccttttttccccttttcccctctttcctctttctttccctttcctccctcttccctctccccttttcccttttttccctttctccctctttcccttccccctttcccccccccttttccctctttccccttttcccctttcttttcccccctttttttccccttttccccccctcccccttttttttccccccttttccccccccctcctcccccccttttcttcccccctttttgtcccccgctttccactttttcccccccccttttttttcccccccc

SEQ ID NO: 42080 - DNA, 226 bp, Zea mays
  Clone ID: MRT4577_138375C.1
acgattgcttcctgcctcatgacactcctgcttgtcttgctactgatagtcttcgcttctgcgcacatctttaacgacctctagaacgatctactataactgaggccactttgtgtacaaaaacatactgggagccaaccagcatctgtttctgaacagcttaccatatccatgtacctctcattctacttggacttatctctctgtatctagcttaacatgccac

SEQ ID NO: 42081 - DNA, 202 bp, Zea mays
  Clone ID: MRT4577_138376C.1
cggacacatgggccaacggtttaacccgatcgagcgcggcaacgcaaacctgcgatgcctgctgagagcaagggatggcagcctcatggtcagtgctgtcggcagtcctcgtcgatgcacaagtggcttctgccgcgccggtcacagagccaacgttcactctgggcgcctatgaactacagattccgctctgatgatgcta

SEQ ID NO: 42082 - DNA, 476 bp, Zea mays
  Clone ID: MRT4577_138377C.1
cgggcccaaccccaggcgggcagccgcgcgcgcacacacaggaccggctaaacccaagggggggcggagagagcaccgcgcagaagcagcaacaaggagcgaaaaccaggcccgacacgcacagcaccggccacggggcagcacagcagaccactgacaacgcaaagcaagaccaggccgggagggcagcaccgcagaccagcagacagggaggggggctggcaaccagcgcgacgacggccccacgcgcgcggacgacaacatccagaaggagagcaccctgcaccccgcgccccgcctcaggggaggcaggcagacgtttgcgaacaccccgaccggcaagacgatcaccctcgccgtggaggcctctggccccacgggacacggcaagggcaacagccaggacaaggagggcaagcctccagaccagcagcgggatcacatccgcggcgaagcaactggaggacaggcgcacg

SEQ ID NO: 42083 - DNA, 306 bp, Zea mays
  Clone ID: MRT4577_138378C.1
cgtccgccacttccttctcctcgcgagctcagctcgcgcaccggtgcgtgcgggcaatgatcacacggaggaggagctgtgccaagccacaatgggtatctcgcgtgactcgatgcacaagcgccgggccaccggtggaaagcaaaatgcctggatgaagaaacgaaagtatgagcttggtcggcagccagtcaacaccaagttgtcaaacactatgacagcgacgagggtacctgttcgtggaggtaatgtgaaatggagggctcttttccttggtactggtaactactcattgggaagtgaacc

SEQ ID NO: 42084 - DNA, 379 bp, Zea mays
  Clone ID: MRT4577_138379C.1
acaatgtcaaacaaagacgaggtatgctttgataagggtgagacaaatgtacaaaaagaagtcccatgacgcttagtctcgatgggataaacttgctcatcgtagaaaggtttatacacagattctaacggtagatacattcggtttttctagaagtgaacgcatccaaagacagttcttgcaggtggccaccaacacggtaagatatgattcctacatgcacgcagaccacaggaggagtgccccggggtggcgcttctgctgagtaggtgcgaacatagagcttcagggtcgcgctaaattggggctgactagatggacggtgctttgaaacaccgatatgctatatggatgtttactcttcgtggaacgctgggtt

SEQ ID NO: 42085 - DNA, 394 bp, Zea mays
  Clone ID: MRT4577_13837C.1
gtgcacaatttacaggatttggaaggtacctgcggcccattataccattatcatccagtaacactataccaccctactaccctacctcaactgttgaaaccacctttacctgctttattgtaacgggatcacaacagaaccaaaaactctactgacatcaggattcacgaccgaagcttgcaatgactggctgggaatggcaaagatgggattacatatcattacaaagtctgaaccacaggcggagcgctgctgttattaaccctagggcatatcccaagaaaggtcctccggataccaaaacctatcccatgtccaagacaagagtctacaatagatttcaaaactccctcagcgccactggaaccacagagagaatctccccccttgaaca

SEQ ID NO: 42086 - DNA, 545 bp, Zea mays
  Clone ID: MRT4577_138380C.1
gggtaacccatgccccagagcttactatcgctgcacaatggccacaggatgccctgtcagaaaacaggtatatatatatatatatatgtacttaatgtgattaataattgattaaattaatattccatgtgtatatttatttaatagattgaacatatgaaaatggtttttatttatttttttaagctagaacatgatgtgcatgccaagtgctaagtaaaacaccagccttaaataaataatccagaattgttattagagtatctattcaagtacgactgacgatggtactaatagctggtccatcgtcaaggaataatgctacatgctgtatgtactttagtatagctaaataagcaaatgatcgcatggcgtatatatgttatatatatgccatgggcgtcgtttgataaaccctctggacgcaagtacatttgaatatacttttgcaagcaactatgacgacattaattatcctatgatagagatcacatttgagttcatgtgaacatatgtgggggctagctagcattgcaggctgcacg

SEQ ID NO: 42087 - DNA, 763 bp, Zea mays
  Clone ID: MRT4577_138381C.1
ccggccgtgcggcccatgacgtgccagcgtcggcgggtggcctgcaaccaccgccggcgtcgagtggtgcgcgcgcgcggcgcgtcacacacacggcctgctctgctgctataaaccgccgtacacggcgccccctccggttcgggcatcgccgttgttgtttgttatcacagcagccagtagcagctcaattagcaccaccgaccccggcggcaatcctggccggcatggcttccacgtcgaacttcctggccgtggcgctggtcatggccgccgtgctcctcggcggcgccggcacgtgccacgcggcccgccgcctcgacgaactgccgccgctgcctcaagtcccagcaggtattccgagtctgccggcgccccaagtgcccgagctgccagtgccgccggtgcccgagctgccgatgcctcaagtgccgccggtgcctcaactgccgggcgtgccgctgccgcccgccacggtgccgtagcccgtatgtgccccttgcgttgatgctgtaccgttccccgtgccgtcctctcttgtaccaccaccgccgtcgcgtcttcaccgaccaccgacgagcctagagacgtgcaaatgctgcctggtacacaggtgctgccgccgacgccctgtcgtgtacctgtgtttatgtacgagttttttgttgttgtaccattgtattttctcctgcgatgaaattaattaaatatgctcattactacagcttacacaaaaaaaaaaaaaaaaaagcggcctagggcc

SEQ ID NO: 42088 - DNA, 794 bp, Zea mays
  Clone ID: MRT4577_138382C.1
gtgcggcgctcgagccggccagccggcaaatcaagttttttcttgattgccgttgttgtttgttatcacagcagccagtagcagctcaattagcaccaccgacaccggcggcaatcctggccggcatggcttccacgtcgaacttcctggccgtggcgctggtcatgggcgccgtgcttctcggcggcgccggcacgtgccacgcggcccgccggctcgacgaattgccgccgctgcctcaagtcccagcaggtattccgagtctgccggcgccccaagtgcccgagctgccgatgcctcaagtgccgacggtgcctcaactgccgggcgtgccgctgccgcccgccgcggtgccgtaggtgcgctgatttggtcgcgggtggatcggagggaattgatggagaaattagttcatttctctctcaatttccttcaatgcttccgtgattctcttgtcatcaaattaactctgatggtgtatcgttcccccgtgccgccctctctttgtaccgccgccgccgcgtcttcaccgaccaccgacgagcctagagacgtgcaaatgctgcctggcacacgggtgctgccgccaacgccctgtcatgtacctgtgtttatgtacgagtatttttgtctgttgtaccattgtattttctcctgcgacgaaattaattaaatatgctcattactacagcttacgcaaaaaaactagtaaaaattgtacctacgtacaatcaggttcaccagactaaacccagtttggttctcggctgaaaaaaaaaaaaaaaaagccccta

SEQ ID NO: 42089 - DNA, 1585 bp, Zea mays
  Clone ID: MRT4577_138383C.1
aattcggcacgaggcttcgcgtgaaccgaggagagaaggtggccgtatgcggcccagttggctcagggaaatcttcactcctgtatgcattacttggggagataccaagattatcaggatcagttgaagtttttggttcagtagcatacgtttcacagagctcgtggatacagagtgggactgttcgtgacaacatactctttgggaagcctttcaacaaggaactgtatgataaggcgatcaaatcttgtgctctggacaaggatatcgaaaattttgaccatggagacctcacagagatcggtcagagaggactgaacatgagtggaggccagaagcaaaggattcagctggctcgagccgtctacagtgatgcagatgtttatctactggatgacccattcagtgcagttgatgcgcataccgctgcagtccttttctatgaatgtgtgatgacagcacttgcagagaagactgtcgtccttgtgacccaccaggttgaatttctgactgaaaccgataggattctggtaatggaaggtggtcaagttagtcaacaagggaaatattcagaactcctgggatctgggacagcatttgagaaactggtgtctgctcaccagtcttcgatcacagcattggataccagtgctagccaacagaaccaagttcaagggcaacaagagtctgatgaatacatagtgccaagtgcgcttcaggttataaggcaggccagcgacatcgacgtgaccgcaaagggcccttcagcagcaatacagcttacagaagaggaagagaagggcattggcgacctgggatggaagccatacaaagaatacataaatgtatccaagggggctttccaattctctggcatgtgtattgctcaagtgctcttcacgtgcttccagatcgcatccacatattggttggcagtggctgttcagatgggtaacgtcagtgctgcacttcttgttggggcatattctggactctctatcttcagctgcttctttgcctactttagaagctgttttgcggctattctgggtctcaaggcctccaaagcattctttggcgggctaatggactccgtattcaaggctcccatgtcattttttgactcaacaccagtgggaagaattttaacgagggcatcttcagatttgagcattctagacttcgacataccttactccatggcttttgtggcgacgggcggcattgaggttgttaccacagtactggtcatgggtactgtaacttggcaagtcctggttgtagcgatcccagttgctgtcaccatgatatatgttcagaggcactacgtttcctcagctagggagctagtaagactcaacggaacaacaaaggcacctgtaatgaactatgcatcagaatcaattctcggtgtggtgacgatcagggcatttgcagcaactgagaggtttatctacagcaacatgcagctcatcgacactgatgccacactgttcttccataccattgccgcacaagagtgggtactcataagagtagaggcactgcagtccttgacaataatcacagcagcattgttccttgt

SEQ ID NO: 42090 - DNA, 315 bp, Zea mays
  Clone ID: MRT4577_138384C.1
agtcgcgttcatctgtctcaagtcacgctcgctcaatcatgaggcagaccatatcgcggggagcaggaaccacaccgcgcccgatgaagatgggctgcctttcgatactgtgatgtgggctgctgaagatgttgaggataccatcaaccttgtcgacaagttcgtcgtgctgaaaataagctgacgtgttgacatgacaatgggctcaaccggtcctaaatcttgaatcgaagcacgcagtgcgtaaacatttcttgaactaattgggattcaacttgagtgcgttaacaagatgtacggacgaaatgaggctct

SEQ ID NO: 42091 - DNA, 345 bp, Zea mays
  Clone ID: MRT4577_138385C.1
ctagcatgcatgcacgcctactctagatgatcccttcggtgaattccaattccacattttcaagaaacaacgacgcatacatggtgagatatgaattggaattattatgatgtcttattagtgcctatcctgaagccaaaggaaatgatatcggaattcctcggagaattccaattccacattttcaagatataaggatgcaaaaatgtacatatatgaattggaattatgtgtgttcttattaggcctatcctgaaaccacagaaaatgagatcctaattcctcggggaattccaactgcacattgtgaagaaatatggaggcaaacatgttcatatatgaatt

SEQ ID NO: 42092 - DNA, 318 bp, Zea mays
  Clone ID: MRT4577_138386C.1
cttatttatataaccctatttaatctatgaattagaaatagaacttacggggtgggggaacggtttagctcttgaccttttccttcataattaatgataaatacaagataactgtaccgtctattctagtggagaaaacagaaattttagatttacaatttacattacattcaagctaatctaaatttttacatatcactgatgtgtgctattgagcggggtacgaaatagcgaccaatttaaccatttgacgctatttatgcaaaaactttaccaatatgatttcatcttctagtgcgctatgtacatatcaatatt

SEQ ID NO: 42093 - DNA, 2193 bp, Zea mays
  Clone ID: MRT4577_138387C.1
agggcgttgactcaatccagtgggtagtgatcgtgccaattgccaattgggattggcttcccatgcagccaaaaacggctgctgtgctctctagtaaaatcgtgcacaagtcaaagatcaaattttgccctgcttgtggaagtccaacgaaactggccatacctgatggcgatgagaagatgagggctgtttgttcttcttgtggaagagttcactatgaaaaccccaaaatggttgttggttgccttgttgagcatgataataaggttctcctttgcagaagaaagattgaaccagcttatggtctttggacacttcctgctggttatttagaggtgggggagtctactgctgaaggagcctctagagaaacattagaagaagcatgtgcagatgtagagataatctcaccttttgctcagttggatattccactgattggtcaaagttacattattttccgagcaagactgaagacccccaatttttcacctggagcggagtcgctggaatgtgcactttttgctctcgatgatataccattcgattctctagcattttcttcaatcattgtcaccttgaggatgtatactgaagatgtgaggtctggaaacatcaaatatcactattgcactataaacaaaagattaggagccagcccgtcagaccttcggagtttcgatattgataaccatatagctgtgtgaggttttaaaggttctaaaaccctttgcgattgaggagaatggttttggcatacaacaggcacacagccacacaacaaaaacatcgccatcagatagaccagtgttgaatgctgaatccccatgggagccttgtttggcgcattgcttgccctcgctcggctcgatccccactctaccgtgccagccaccaaccccgcccgcgcctccgctactaaagccgaggcctcacccaccaggccaccgccatgctcctccccttcctcagatcccacccgctcctccaccacgccgctcgcctgtcctccccgcgcactcgcctgatcctccgccgcgacttgctcccgctcgcgcgctcccggcctatccgcatggcggcccattccggctccggctccggcgccagcccccctgccccagcgccgcctgctgccgtggtgcaaaagtcaaagatcaaattttgccctgcttgtggaagtccaacgaaattggccatacctgatggtgatgagaagatgagggctgtttgttcttcttgtggaggagttcactacgaaaacccaaaaatggttgttggttgccttgtggagcacgataataaggttctcctttgcagaagaaagattgaaccggcttatggtctttggacacttcctgctggttatttagaggtgggggagtctgctgctgaaggagcctctagagaaacattagaagaagcatgtgcagatgtagagatagtctcgccttttgctcagttggatattccactgattggccaagtgagtgaaaaattggcatagtcacaaagttgtaggttatttcgtccgctactaagttgattatctttgtattacaatgagatgcagtagagttacattattttccgagcaagattgaagacccccaacttttcacctgggccagagtcgctggaatgtgcactttttgctctggatgatataccattcgattctctagcattttcttcaatcattgtcaccttaaggatgtatactgaagatgtgaggtctggaagcatcaaatttcactattgcacgataaacaaaaggttaggagccggcccttcagatcttcggagtttcgatattgataaccatatagccgtgtgaggtgaaaggttctaaaccttttgcgattgaggagaatggttttggcatacaacaggcgcgcgcgcacacaccattggagccttgtttggcgcctccctgcacattggaacagatttaaagtaggtgctggaactgtaaatgattcggtatcaaaaaggctggtttagccattttaggagattatgcgtttcgatttcatgggagttgggaggacagaattgtatcatagtgcagtaactcttggttgtaggattgagttatcctgcatgccatggttgtggcgcttcgtcagcgaccgaatgctgtaatgtgggtacgattctctgagctccttttcaaccattaattccagttgt

SEQ ID NO: 42094 - DNA, 689 bp, Zea mays
  unsure (1)..(689): unsure at all n locations
  Clone ID: MRT4577_138388C.1
ccggccgggaccttccgcacccatattcagcaagcacgaacgaagtctttgttgtgatttaactgacgtttcttcactcgctcagcgtcaactcatcaacaacatcgacatcttcagcttcactgcatatactattcggaagcacttaatttcacccacataatcaacaccagcagccacaatgcagtacgcacttgcacctctcgccctcgcggctatcgtcgccgcccttcctcaggcttccacctcgtcggagtgctctgagaactacccaggcactttccagatccaggttgtcaaccagaccgatgtcgccaagcgctccgcattcgagaagcgccagtccacccctctcgagatctccctcaaggacggtgtcctcaccgacgcccagnggccgtgtcggcagcatcgttgcgaaccagcagttccagttcgaccctgccccaggtcagcccgacgctgtctacacctctggctggtccgtctgcaacaacggctcgctctccatcggtggtgactccaccttctaccagtgcttgagcggcactttctacaacctctacgaccaggatgttgccgaccagtgcagcccagtctacattgaggccatcaacggcgctggctctgcatcgcaggtcccagacggccaggtcaccgccacccaggtcgcttctcagatgcctgac

SEQ ID NO: 42095 - DNA, 694 bp, Zea mays
  Clone ID: MRT4577_138389C.1
gcccgggtgaattatttcgtcggggacaggcggtttttcagacaaggttttttttttttttttacatgtctttagcaattactagcatgcacaaatttattcatttactaatcggcgagatcgacgatgacactgtgaaataaaactttcctagctgttcatatctgaactgataaaagctggaggaaacataggcctaagccaactgatgtctgattcgaacagtgctggtggactgatggtggcgccgtacctaacatggcttgtcgctgatcgaacatccagcttggtgcgcgtggcaggttaggccaacttcagctctgttcgtgtcacgcgagtactcgtgctaagctaacaacaaaggtcatgatcatgatggctcatgagtccagtttagatggagttgccgtcgccgtcgccatacacgaagcgcttgacgagccggaccaactcgctgctggcgtcgctggccggctccacggtgaagaacccgtggtgctgaccctcgaactcgacatgctccacgtgctgtcccatcgccttgagccgcgcgacgtagtccgcctggcggtcgcgcagcaggtcctgccccgcggccacgacgagcgtcggcgggagcgcgacgtcgcgcaggcccagcagcgcggggctctccggcccgaacgggttcgcgaacgggttgtccctcgtggcg

SEQ ID NO: 42096 - DNA, 290 bp, Zea mays
  Clone ID: MRT4577_13838C.1
gcgccggcttccccgtcctccaggacaagtaccctcgccgctacaaggcattcctctactgcaacacggcgagcttcatggcatccgtggccctcatcgtgctccttctcaaccctaacctgtacgggccaggcatcaattgctacgcgctctttgtctgcatggtggcgggcatgttcagcctcatcggcgcctacgctgctggaagctccctgcacctgcggacctccatcgtcctcttactgctggttcttgcggtttttgcggccgtgttatacgtgaccatcaag

SEQ ID NO: 42097 - DNA, 1941 bp, Zea mays
  Clone ID: MRT4577_138390C.1
cctcgaggccggccggggaaaaaaaaaaaaaaaaaaaaaaaaaaaaaaaaaaaaaaaaaaaaaaaaaaaaaaaaaaaaaaaaaaaaaaaggtcccacataaaccgcccgtggaccaatcccgaaggggaacgtgttgggcggccgacctcatgcctcaccccttccccgtcggcccccgactccccgagtcgccattgcctgccctcgttcggctcgatccccgcactacagcgcccgccaccaaccccgcccgcgcctccgctactaaagccgaggcctcacccaccacctgaccaccatgctcctccccctcctcagatcccacccgctcctccaccacgccgcgcgcctgtcctccccgcgcacccgcctgctcctccgccgcgacgcaatcccgctcgcacgctccccgcctatccgcatggcggcctcgtccggctccggcgccagctcccctgcctcggcgccgccagctgccgtggtgcacaagtcaaagatcaaattttgccctgcttgtggaagtccaacgaaactggccatacctgatggcgatgagaagatgagggctgtttgttcttcttgtggaagagttcactatgaaaaccccaaaatggttgttggttgccttgttgagcatgataataaggttctcctttgcagaagaaagattgaaccagcttatggtctttggacacttcctgctggttatttagaggtgggggagtctactgctgaaggagcctctagagaaacattagaagaagcatgtgcagatgtagagatagtctcgccttttgctcagttggatattccactgattggccaatagagttacattattttccgagcgagattgaagacccccaacttttcacctgggccagagtcgctggattgtgcactttttgctctggatgatataccattcgattctctagcattttcttcaatcattgtcaccttaaggatgtatactgaagatgtgaggtctggaagcatcaaatttcactattgcacgataaacaaaaggttaggagccagcccttcagatcttcggagtttcgatattgataaccatatagccgtgtgaggttgaaaggttctaaaccttttgcgattgaggagaatggttttggcatacaacaggcgcgcgcgcacacaccattggagccttgtttggcgcctccctgcacattggaacagatttaaagtaggtgctggaactgtaaatgattcggtatcaaaaaggctggtttagccattttaggagattatgcgtttcgatttcatgggagttgggaggacagaattgtatcatagtgcagtaactcttggttgtaggattgagttatcctgcatgccatggttgtggcgcttcgtcagcgaccgaatgctgtaatgtggttacgattctctgagctccttttcaaccattaattccagttgtaaagcctgtattgcttccgcctccctgcacattggaacagatttaaagtaggtgctggaacatattgatagccattttaggagattatgcgtttcgatttcatgggagttgggaggacagaattgtatcatagtgcagtaactcttggttgtaggattgagttatcctgcatgccatggttgtggcgcttcgtcagcgaccgaatgctgtaatgtggttacgattctctgagctccttttcaaccattaaaaaaaaaaaaaaaaaaaaaaaaaaaaaaaaaaaaaaaaaaaaaaaaaaaaaaaaaaataaaaaaaaaaaaaaaaaaaaaaaaaaaaatacaaaaatataaaaaaaatttaaaattgaacatataaaaaaaaagggaagggatccataaattttttttttttaaaggggggtctctttttaaaatgcataatatatcccctccttctttcaaaaatttatttttttttaattgcctttataaaa

SEQ ID NO: 42098 - DNA, 266 bp, Zea mays
  Clone ID: MRT4577_138391C.1
ttattttaaagggcgattaccccatacttacttatacaaccttatagcatatataacgtttacacaatacacatttcacaatgcacctgaacgcttacaccatcaaccttctaaatgctaacatccattttcccaaccagttcatttacttcaacaatatacaaacaatataatcaccaacacaaacactcttaactttcctaatttccatcctagtttattaaacttcatatatccaaacaactcaaacaacaaccgttacatca

SEQ ID NO: 42099 - DNA, 398 bp, Zea mays
  Clone ID: MRT4577_138392C.1
gctgctgcctgcagtcgctctagagatcctcgggaatcattcactttcagaatacgagccaatggcaattgaatggaatattgtttcctataggcctatcctgaagccaaaggaaatgagatcggaattcctcggggaattccaattccacattttccagaaataaggaggcaaaaatgttcatatatgaattgggaatatttgttttcttattaagcctatcctgaagccaaaggaaatgagaaccgaatatcctcggggaagtccaaatccacattttcaagaaataaggaggcaaaaatgttcatatatgaattggaattatttggtgtcttattaggcctatcctgaagcccaaggaaatgagatcggaattcctccggggtaccgaactcgaa

SEQ ID NO: 42100 - DNA, 267 bp, Zea mays
  Clone ID: MRT4577_138393C.1
aaacaatctggcactaatttctctccctcactcggcctataaaagctgccttagagccccttccttcctacgttgcttgctctcgtgctctgcatacagccgatccagtgcccgcactcaccatcccactgcgtgcctgctgctgcttctccatttccgttcgtgccatcgacgccggagctccactgcagtgacaagcaactcggcctcgatctgcgtcctcaacatctcgtcgcagcccaagtctgcacccatcgtcgtcgaacc

SEQ ID NO: 42101 - DNA, 322 bp, Zea mays
  Clone ID: MRT4577_138394C.1
gagatactttgggtataacaagatctttcgtatttactaaactaatgcacagccccgacaatttttcacatttttcaaaaccttctcacgacactggtttgttttgggtcacccacacatttcagttgtcgctgtccctactttgtttcctcagtatttacagctattgttctgttcaccattgattcaagtgttttcctttttttagcgtgttttattttttcttctttttatctcttaacccatatatatgcacttgatcttctctgaatatcggttttccttcaccatgacttaatatgtaaaaatcttttcttttttc

SEQ ID NO: 42102 - DNA, 342 bp, Zea mays
  Clone ID: MRT4577_138395C.1
agggcacaacgggggtgttatcacccaatttgtcaaaggccgacggttaaaaagcgtatacagatggggataacgttactacatccaaatagcgtgtagaatgcgtacaaagccaaacatataaccttacagcaggcatcccattggcgcttcacacatgtttgttgccttcgatacataaacagcacaagtggattactagcagggattggggttctacaacatagggaatcacgattttcaccgctgaccagagtctactccttggaggcgtggacggcggacccggaatagaccatggtatcgaccccgaacttgttgggaacgttggaaccccagcat

SEQ ID NO: 42103 - DNA, 280 bp, Zea mays
  Clone ID: MRT4577_138396C.1
actacttcccatatccatacttaggggacgtgatccgtgtagtcttgggagtcgttttctgactcatgcgctggcgtgtcggtgcccccaagcgagctcctatcaatggcacgctgctcaagcttctctctacagacaccctgtgccatggcctcggccacatcactagcattgagtgctccgctgctgctgaagtctgatttgctgacactatgaaagctcttgagcccctgttcagcgcaacgtgtactcagctgatcctttgacagctaagatccct

SEQ ID NO: 42104 - DNA, 443 bp, Zea mays
  Clone ID: MRT4577_138397C.1
tcgagcggcaagtcgatcgatctgaatccacagattgatcctcgactagtagaggactacgtacgtgaaatctcgagacagtgcgaggacgactggagtgtggcgggcgacctatctgataagccatgggacaacgggccttagaggacgaacgctcagctctggcgactgtggcaagtttgctgctgatgctaacgacagcccaagctgctgctgctgctgcttggtggacaccatctgtctttgtccactcagaaggaggcggcggcgcgcttgaccgacaccactaatattgacatgcaggtcatcacacccgtgcagatcgctatctcgacggcggctagaatgggtccggacgggtgctccggggaggacgtggtggtgtaccatatcagcgccaaccttctgcccagtggtatacgggcctacacggtgcgcatcat

SEQ ID NO: 42105 - DNA, 479 bp, Zea mays
  unsure (1)..(479): unsure at all n locations
  Clone ID: MRT4577_138398C.1
ccgcncnnggcgccgcggcccgcccgggccccccgcgccgcgccgaaggacggngncnccnncgccggcgcaggcaacacgaaacancaacnccgnaaagagcacggccnncccggaggacggcncccgcgcggcggggagncgnacacccgggacgaancaagcggncggcngcaggcgcggcgggcggcgccgggcnacgccaagnacgacaacggcgaccgggccaacnncgacaacgnggnccgcggcaaccggagcaagggcgcgcnccgcggcggggagggccncccccaggaggagcgcnncggcaggccccccgacaagggcaaacncggccaggaccaggagcccggggacagccgggacgacaacggcnncgcccacaagagccccacgagggcgcncnncgaggacccgccggacggcaagccgccggccgccagcgggaagagcgccgccgccgccgccagggggaa

SEQ ID NO: 42106 - DNA, 328 bp, Zea mays
  Clone ID: MRT4577_138399C.1
atcgttggttgtgctagtaatatctgtgggcacccgggtcatgattacgctgcagttaagtgtgccagatgccttggttacatgtgaggctcatgacactggaaaatgtgacatggacctgtcttagcctcgcggaaaaaaactgtaacttcgtaagcgtagccactcctttaaatatatattcctaacaacgctgcccgtttatagaaatttaagcatttgtgggataaaccaagcattgattttgaattttggagaagaaagttgggatttatataatttttgtgagaaactgagatccaacctatggggggttacgttttattat

SEQ ID NO: 42107 - DNA, 448 bp, Zea mays
  Clone ID: MRT4577_13839C.1
ttgggtaccgggccccccctcggggcggccgctatttttttttttttttttttttgttttgcctgatggcattaggtttattttgtgggaaagcagaatgggggctctctgaaaggcactggtgaggcataaaagtaaaggttgccacatggctaatggtggacgtcttcctggcatccttgggggtaggggaaagacagacagctcccagggccacagaaaatacctctatcagatagagaaatccgagtcccagtgccttatggtggagccaagggttaagcagatggcctgctttttttatacgaagagtttgcttcctccgggcaatcttaaagtctggcattcacggctggaggtatagggcccatccacttctctcccagcaggtgcgccagcagctccatccggtcagagccaaataacatgtgggtttggccatccacat

SEQ ID NO: 42108 - DNA, 148 bp, Zea mays
  Clone ID: MRT4577_1383C.1
ggtcgaccgcacgcgtccgtctgtttgtgggtacacaggagactacgagctgtgtcggagacatagctatgtgtgtgagggctggagcatcaaaaaatagtcttggacaacatgtgccaatgggtctggggaaatgtggttatactgg

SEQ ID NO: 42109 - DNA, 289 bp, Zea mays
  Clone ID: MRT4577_138400C.1
attgttcgggactccaatcgacttctatggggaaagctggcacgctcacgcagagcaccgatccggtatagtgggcgcgactccacgcgtccgctcatcttgtggaccggccgatcgatgcttgagatgtttcaactgagtggccataccgctcgtgtcctttagatggctaagagcgcttatggatgcgcagaaccatcacccgctgcagatgggaccatgagattcttttacgtctctggagacccggaagtggccgagcctgcatccaatgcttccccactgggat

SEQ ID NO: 42110 - DNA, 647 bp, Zea mays
  Clone ID: MRT4577_138401C.1
ttttttttttttttttttcacacataatccatccatgtaatgcgcatacagaaacatgaagtatcaaatctcatattgatccgtacaccagtaggctaacttacactgttacacagcattctactgatttttaccggagcccaaaacgttcactggagatctaatatgctagcactaaactttggtatgaacaggttgactatatcttccacaaaccgcagttcgccatggcaaaccttgtttgaccaaaatcctccttcggcggtcggtgatcatgaacagccgatgaaatcgtgcgcaagagttgtacgactgaaagagaacaggagaaattcgatgctcattgcaactccttgtcctgtctcaacgcaaacttagccgtgtccttccacagggacacctccatttctttctcaacgagcttcttctccgcacgcctatttatagcaacgcggcttccagctcctcaatccggtcccggtttctttcgtggagaagctcgtggagccttctctccagctgtacggcagaaactccgttgtactcagcgtcatggtcgtcgtcgtcgtcttcatcctcaacacctccccttgaatcttcatcaactccatcccggtagtcggccatctcgtcgtagggctgacgcg

SEQ ID NO: 42111 - DNA, 483 bp, Zea mays
  unsure (1)..(483): unsure at all n locations
  Clone ID: MRT4577_138402C.1
aagcagtggtaacaacccggactacttttttttttttttttttttttttttttttcttttttttttttaatattattattttttttttttttatattttaaataacattttttctttatatcgtacattaaacacctgcctcctcctttttcccacacaaatcttcttgtggggtgttgggcccttaccttcccccaaccccctcaacatcccccccaaggaccatgacaacttttaccccccttttcaccaataaaccccttaacctttccaaccacnaccccttccacaaccaacctttcctttcccccataaacccctttacctttcccattaccactantnnnntttccccccccctcctttccccccatctttccctttttttaaaaaaaactttttnccccctccctctnnctaactttccccccccccccccccctttcatttattaaccctccactcccccccttttactttcct

SEQ ID NO: 42112 - DNA, 172 bp, Zea mays
  Clone ID: MRT4577_138403C.1
ccgcccctcctttgcgctccccagatcgcgtgcagcctttctcctcgtgtcgcgactcgcgagcgaaaccctcgccacggcggaggcgaccgacaccgccacagccacgccgccgacagcgccagcgacggagactttgtgcgcgcctgtcacggtttggatccactaccgc

SEQ ID NO: 42113 - DNA, 332 bp, Zea mays
  Clone ID: MRT4577_138404C.1
cttgatattctgaggttatgacgtactacacacttcgcgatgtagaaggcgctcatttgcgagggtaacgttgaccttgaacctgggtaaggagaagtcccacatcaacattgcgggcattggccacgccttctttgggagagcatgccaccaccggccacctgatctacaagcttggaggcattgacacgcgtttaatagaggggggagagaaggaggctgctaagatgaacaagcggtccttaaggtgtgcttgggcgctggacaagctcatgggtgagcgtgagaggggtatcaccattgatattgctctgtggaagattgagaccacc

SEQ ID NO: 42114 - DNA, 1850 bp, Zea mays
  Clone ID: MRT4577_138405C.1
gcacgaggacaaaagggaaaagaataactgaaaaagtaaatcgctcaaaaaaaaaggaaaataaaaaaaaaatcgtagagagttcgattggcagttgctgagcccgagcgcgccctccggcgccgacaagccgggaccccacctccgccggcggcgatgggcaactcgcaggcttcgccggcgtccgcctccagctcccgcttcgtcatggcctcgagggccttcccgaagcaggagctggacggcctccgcgagctattcgcctccctcgcagcgcagtcgcggaccggcggccgcgccatctcacgccccgtcttcctcgaatactatcaggtccgggggcgattaggcgacaggctgttccagcttgtggcgaaggagagtggcgggagcgatggggtcacgttcgaggatttgatcatctccaaagcaacatatggaaggggaactcgtgatgaggtcgatgaattcatttatcaactatgtgatgtcacaggagatggcgccttaacaaggtctgatttggaatcagtcttggcgtctgttcatgaaactgtatttgcaataaagaaggaagctgtcgaagtttccaacaatagaccattcgaagaattcctcaactctgcagtgttttcaaaggatgttgaaggggtctcagggaagtctatgtcattatcagactttaggaactggtgcactctcttgccatcattgaggaaattccttggaaatttgttgatgcctcctgattcaggtagaccaggatttgaagtaccactgcttcatcatcctgaaaacatctgtactgatacgctgcttctaaataaagagtatgcctggcatattggaggaggtttctcccaacatgaggtgcaagagtggaagcttttatatcatagttctcttcatggacaaagcttcaacactttcttgggcaaagtaacgaatggggatgctcagactgttctgattgttaaagatacagaaggatcaatttatggtggatatgcttcacagccttgggaaaggcacagtgatttttatggtgacatgaagacattccttttcaaatgctatcctcaagcatccattttccgccctactggagcaaacaagaatttgcaatggtgtgctgtaaacttcagctctgagaacataccaaatggtattggatttggagggcagccacatcatttcggactctttttatcagcaaattttgaccaagggcactcatttacgtgtagcacatttaccagccctcccctttccaagacaaataggttcaggccagaagttattgaatgttggggtatacaaatgagaggagcacaagatgaaaaactggagttagtcaaggggacagtcctcgagagattcaaggagtaccggaacatgctgaaatctgagaccatggttctttattctactgatcatattttgtctctcaaaaaagtaaattgttcagagtctgtacatcacatgttcataaaaataatcaaatctgagaccatgtttctatatctcaataatcatatcatccaagataagatggtctcatatgagttcatcgtaacaattgaccagtcgtgaaggacagccgagccaatgttgcgtttgatctcaagaatgacgtcatccaagataagatggtctcatatgagttcatcccattaactttaatgggatgactttatcctttctgttgtactaatgtgcttgtaagatgagaaagtatctagatctttagtggttttggtgattaatgccaacacaagattattgtaactaacatgtgtgtttacaaagataaattaatgttaggtcacaatgatgaaaatgatttgggc

SEQ ID NO: 42115 - DNA, 276 bp, Zea mays
  Clone ID: MRT4577_138406C.1
cgatccccaacccacatctcaagtccactttggcaatgtctccacggcaacggaagaagatgacaaggatcacacccacaatgaaagagctccagatgatggttgaacatcacctggggcaacagcagcaaggagaggatcctgagggggccgctgagagcacaggaacccaggggtcccggccacctgggatcccagacacagaagtggagtcaaggctgggcacctctgggacagcaaaagactgcagaatgcatccctaaaactcacgagaga

SEQ ID NO: 42116 - DNA, 286 bp, Zea mays
  unsure (1)..(286): unsure at all n locations
  Clone ID: MRT4577_138407C.1
gcgcggatcccggcggaaaccnnaatgccncagggacaacttggcggtatcgggctacaaaaaaagaagcccccgggggccgccaagtggaaccagaagagccaaaaaaaggggccaaggccagaagtagggaagcccctccgaacctcaaggaagaagttggggaacaaagagaggaccccacaaacttggcaccgcggctgcacaagagatgtgcactccgaaccgccacagtcccgtgctctttaaaggaaagaaatataataaccacagggagagacacaaa

SEQ ID NO: 42117 - DNA, 1012 bp, Zea mays
  Clone ID: MRT4577_138408C.1
cgggaaaaaaaaaaaaaaaaaagaaaaaaaaaaaaaaaaaaaaaaaaaaaaaaaaaccatgacaagtcaaggcaaagtaacggatgctcagacgtgagttaaagatacagaaggatcaatttatggtggatatgcttcacagccttgggaaaggcacagtgatttttatggtgacatgaagacattcctcttcaaatgctatcctcaagcatccatttttcgtcctactggagcaaacaagaatttgcaatggtgtgctgtaaacttcagctctgagaacatacccaatggtattggatttggagggcagccacatcatttcggactctttttatcagcaaattttgaccaagggcactcatttacgtgtagcacatttaccagccctcccctttccaagacaaataggttcaggccagaagttattgaatgttggggtatacaaatgagaggagcacaagatgaaaaactggagttagtcaaggggacagtcctcgagagattcaaggaggaccggaacatgctgaagatggttggtttggcaaatgcaagtgattaagtgatagaggatcacaatgatgtacatgatggagagtctgtacagcacatgttcataaaaataatcaaatctgagaccatgtttctatattctactgttcatattttgtcactcaaaatattcatctggtccacactttgtaacaattgaccagtcgtgaaggacagccgagccaatgttgcgtttgatctcaagaatgacgtcatccaagataagatggtctcatatgagttcatcccattaactttaatgggatgactttatcctttctgttgtactaatgtgcttgtaagatgagaaagtatctagatctttagtggttttggtgattaatgccaacacaagattattgtaactaacatgtgtgtttacaaagataaattaatgttaggtcacaatgatgaaaaaaaaaaaaaaaaataaaaataaaattaaaaataataaacataaaaa

SEQ ID NO: 42118 - DNA, 147 bp, Zea mays
  Clone ID: MRT4577_138409C.1
tgaatttttctaccatccctcctccctggtttggggccattctcccatgccggcagggcgtctacacctccttactccctactatgcattccgcttgttcgccgacttcatcttcaggccgatacgaattctggcaaccatcgttac

SEQ ID NO: 42119 - DNA, 116 bp, Zea mays
  Clone ID: MRT4577_13840C.1
cgggttggcttcatcctcctatgcggttcgggtacggattagtgaggatctccggggtatcgattaagtaggtgagcggatcgcgatgttggcgagagaagatgagatccgatgat

SEQ ID NO: 42120 - DNA, 302 bp, Zea mays
  unsure (1)..(302): unsure at all n locations
  Clone ID: MRT4577_138410C.1
taccgtacaccctcgcccntntttttttttttttttttttttttttttttttgggaggnncagnttgagggggacccccttacccacattaattccaaaataactcccaattacttttttctacaaaagacaccaacaccggttcacccacccatgggttggcaacaattccacctttaataaacggaaacaaaatttnttactttttaaacacatttttttcgatcacgtaaacaaacccccaatgtccatctagaaaaacaaacaattccattttcaccccccccgacttttccattccc

SEQ ID NO: 42121 - DNA, 561 bp, Zea mays
  Clone ID: MRT4577_138411C.1
gcggtacgccattcacagaactcgctcatcttgctccgacttatgcttatgcgcacctccaagatcgtgtatggccatggacacgcaagcctacgcggacacgcgccacctggtggccgccgccgattccgcctgggcgcacgaggcgaagccgcggcagctaagctcacagctcgcgctgacgacgacgtcctcccgcgcgccggccccggtccgcgcgaccgccggggaggcggtgaccgaggaggcgcccaaggggttcgcggacccgcagctggaccccaacacgccggaccagaacttcggcggcagcacgggcgagctgctacggaaggcgcacgaggaggagatctacgtcatcacgtgggtgtccccaaaggagcaagtgttcaaaatgcccaccggcggggcctgcatcatgcgggaggggcccaacctcctgaagctggcacgcaaggagcagtgccatacgctcggcaccaagctgctgctccaagtacaagatcacctaccaaatataccgtgactttcccacggcaaggagcagaaccttcaccccaa

SEQ ID NO: 42122 - DNA, 329 bp, Zea mays
  Clone ID: MRT4577_138412C.1
gcggatatatacaacaatggtcagatgattatctacacataaaggtggctcatgtacatgccacagcaaaggtgctttctgatgcactgtcccattatcaatttgcactaagaataaacccacaaaatgtacctgcaaataatgggattggagcgcttggagaaacatatgatgggagtggaccgagatgctccataagactatgaaaagaacgaggcggaggacgtagatgttgatacgagatgactttatttgaagctggctcaatacaggtctttgatagcaggggaagcttgctctgattgatcacaaccatctttgtatagcgg

SEQ ID NO: 42123 - DNA, 483 bp, Zea mays
  Clone ID: MRT4577_138413C.1
tttatcaacatgatgcctgcccctcagagcacagacgaacttagctccccaaccacatcatcaaacctaccgccaatgcagccacctgctactcggcctcaggagcctgagccaaatgagtcccaaagctcggttcagagaatattgcaagatttgatgatgtcaccgcagatgaatggtattggccagcttgggaatgacatgaaaagaccgaacggacttacatctagtgttaacggagttaattgtttagttggtaatgctgttacaaataactcaggaatgggaggaatggggtttggggccatgggtgggctaggtccaaatcatgcagctagtggattgagaactgcaatggtgaacaatgcgatggcaatcagtggtaggatgggaatgaatcacagtgcacatgacctatcacaggtgggccaactacagcagcaacagcaacatcaacagcagcagcagcagcagtaacatgac

SEQ ID NO: 42124 - DNA, 226 bp, Zea mays
  Clone ID: MRT4577_138414C.1
aaagggaaagaccaatgcagtaaccaattttcaagtaaaaggagggtctttagtttgctgggggcacttttttaagtgagagagggggggttcttttttctgcgggggtaagcctggcgggcaggccatatataaaccttctgagtttcttgcaatgaaagaaaccttagaccctgcctcctgctcttttacggcgggactcctgtggggtcatggtgcctggcca

SEQ ID NO: 42125 - DNA, 843 bp, Zea mays
  unsure (1)..(843): unsure at all n locations
  Clone ID: MRT4577_138416C.1
gtgaaaccagcgagcaagagcaagagcaagagcaagagcaagagcagcctttctccgtgaggtccattgcaatccagaaaccttcaagtatgggcagatctgcaatttctcaggccctcccggtgcaccaggaggacgaagacctgttcgagacctcgtcatccttctcctgcgactccgacgacgaggcccagttctcggacggcgaggaccagtttgtgccggcttccccgccggtgcggagactcaactctgacagcgtctacgatctgtcgtccatcaaggctgagctctccgccaagaaaggagggttgtccaagtactacgacgggaagtcccagtcgttcgcgtgcatgtccgaggtgaggtgcctggaggatctacccaagaagagcccctacaagaagatcaagtcatgcaggagcaacatcaatctagacggaaaccagagagattgccccgtaactggttctaacaacagcaaaggaatcgccaagcagagctctgcgagttcctgcgcgaatctgatgatggcgcggaccagcagcgccaacatgctctacaggcctccggcgatccctgttaacaagagcgcgtgccaccagtagggctcgcagctgcctggaaatgtccgtccatggctggcctcgcgcctcttctttgttccttgatgaggatttttcttggcgggcgtattagcctgtcaaatgtaaagaggcttttgattctctcatgttcaggaagatattgattgattcagtgtgtnaatagagagaccggttgtataccaaacattttttttactgcagtggctgattagcaaaaaaaaaaaaaaaaggccct

SEQ ID NO: 42126 - DNA, 269 bp, Zea mays
  unsure (1)..(269): unsure at all n locations
  Clone ID: MRT4577_138417C.1
ggctcgaggtaagtagtggtgcgatgtgaagcaaaccctctcnccactcctacaaggttttgagaacggtatcatcaaatggtattgagttggagccagacttgtaaggtcgacgtcatgatagcaccctagttcatgggaatgggtgatggttcagtatccttaagcgaagaagccaagcatccaggtgtgtgcacaagttcagatgagatcctcgttacgttatgaattcctaaggcttaataataaacactgcatattctaagaga

SEQ ID NO: 42127 - DNA, 346 bp, Zea mays
  Clone ID: MRT4577_138418C.1
acgtaacaacaaactaagcacattcaacactcaacaatcacagacaatatatatgtactgtttatgcttgcgcgtggcccgctcttcacgtgctcataccactatcatactataatactactctcatactataacatctctattaccacccatctactcaccaccaactacgtaatatattttacaacacaattcttcaccactacatcatccaccacgagataacatctagcttaatatcaccattaccattgttcatcctccaatcaacatcaatactacaacagcttccttcacttcagcatattatcacttaacatcactgcacatcatctacaacaactta

SEQ ID NO: 42128 - DNA, 309 bp, Zea mays
  Clone ID: MRT4577_138419C.1
gtttcacgttgggtctgcaggccaataagcactccaacgtaacagtctcagaggtgccgttacgctttaagaggtgcataaggagcctgcagacagaggtgagcaggaacaggtcaatctggaaccagctataaagagcgccgaagtgacagctgcacacataaagccaaatcccaagcttaggcatactcagcctgataatggtctgagcacgatcaagccatcgttggatgacaagatgtacatcccgtgaacagactctaacggacagaaagtagttctgaaagcagtgacatccccagatggaag

SEQ ID NO: 42129 - DNA, 292 bp, Zea mays
  Clone ID: MRT4577_13841C.1
gcaaatgaagtattttttccctcttggcaacttgtgtcagagttactctggtctgagtcaactttcgctggggaaaacctatggaacctactgcaaaaagattgtccaaaatgcctaagaaaatactcctctgatgcatttagccttcaaccctacctgtcttgctgaagggagaaaaatgttttagtacattataggcccagcagcttttattcatgtccaccagctagttgcacagagaatcatgtgtacctaactaaggatgatctaggataagtaactcctgttttat

SEQ ID NO: 42130 - DNA, 596 bp, Zea mays
  Clone ID: MRT4577_138420C.1
gcggcacgtggggctgcggacagccacttaacgagactcgcacgccggagcactcgcatgaggctcatgccgcatcctccaaagtcgcctctgccctgctacctgatgttccaccacctcctgtgatgaatccccgaggcccggatgggggactagatgccttgtctcgccctatgcttgacactaacgccggggactacactcgcgaggaggatgagattaccaccgtggaggctgatggtggagaaagacgcacgctgcggcatggtcgctgtcatcctcatgcggactacgcccaagaggacgattgtcacaccgggggcgaactgccctcaacatggaatgggatgacgaatgtatgtgccaagcgcctccaaaaaaaggtactaagaaggggatcgtgtacgacacggagtaacatggatgcagaatcccatgtcttatagctttgtccttatgaaggtagctatatggatgctgtgtttgttttgccacgagccagccacagataaaaggtggatgcgggtgtgatgggtcatgatcccatactatgaaaggtgcatgtgcagtcgtcagtaacatctcactatctgttt

SEQ ID NO: 42131 - DNA, 1449 bp, Zea mays
  Clone ID: MRT4577_138421C.1
aatcgaacggtccatgatcaagtctagcagggagaaactcactttcccaaggaagtcaccgaatccgcattcgataaacctgccgtgtcccgttcaccccgcgttcgcttcatccgggcgtgggctaccgccgcagccgccgccctacgtccggtgaccaggctttcattgagctttgccgacgacgaccacgcaccagatggctgggtatatgtcaagagggccccaaaatggttctgtgtatgtctgcaatctacctcctggaactgacgagaatatgttggctgaatattttggcaccatagggttgctaaagaaggacaaaaggaatgggcgcccaaaaatttggatctatagggacaaagtttccaatgaaccaaagggtgatgctacagtcacttatgaggatccacatgctgcttcagctgctgtggaatggttcaataacaaggatttccacgggagcactattcagtgaacaagatgaagtggataacggagcaggcagaggtagagggcgtggtgatggtcccggcaaggcttggcagcaagatggggactggatgtgtccaaatacaaggtctgttatgattgttgtggcaatgtaaattttgccttccgtggtgtttgtaatcgctgtggagctgcacgccctgccggtgctggtggaactggtggtggaggtggcggtaggggtagaggccgtggtaactctgatgcaagaggaagcagtcgtgcgggtgctggtgctgctactggtggtggtccacctggattatttggcccaaatgattggccatgtccaatgtgcggcaacatcaactgggctaagcgtaccaaatgtaatatatgtaacacctccaagcctggtaccaatgaaggtggtgtgaggggtggccgtggtggtgggtacaaagagctcgatgaagaagaactagaggaagttaaaaaacgtcggaaagaggctgaggaggatgatggagagatctatgatgaatttggcaacctgaaaaagaaatttcgctctaaagctctgcatactgaaagtgcacagacacttcctgggtctggacgtgctggatgggaagttgagcatcgtggttctagtgaaagggaaggcagggagaggagcagggatcgtggtagggacgactatgatgaaaaggaaaccaggagcatagatagaggtgatcatggaagggaccagcgccggagccaagaccgcgaaagggaaaaggggagggagagaagagaccatgagtatgagagaagtagggagcgtgaccggcgccacaggtgaagagagaaatgacagggctttctgttcttacatcgcatttgccactttttgtagccatggaacccgtggtcttgtgttagtatctgggggcgtgcattgattctcagaatctgatttttgctttgaatgtttcgctgcattggcacttt

SEQ ID NO: 42132 - DNA, 344 bp, Zea mays
  Clone ID: MRT4577_138422C.1
ggctgtcggcgtccttgtcctcgtccgccttcatcttcgtcgaggaggaggacggggagggctacgaggaggaggaggacctggcctcggacgcgggggcacgccgtggacgtgccgctgccgatgcgtcggctgctgactaacacggtgctgaacgtgtccgccgacgcggcgctggcgttcgtggagcagggcgtcggcggtagcggcggcggcggaaaggcgtgcggcatcaacggcttcaagggtgggctcggggacggcgacaggggcagcatcctgtccatcacggacgcccactaccggcagatgatcgaggcggacccgggcaactcgttgctcct

SEQ ID NO: 42133 - DNA, 342 bp, Zea mays
  Clone ID: MRT4577_138423C.1
ggttgggaccatatgagttttgttattgatacccaagaacaagatcgatttgatcaagcgcgtacgtgcacttgaggtacgacgggatattagcactggttaaagaaatacaattgggactcgaacacaaggtacacgcattacccatattttttgatcacaggaaaaaaggcctgtttgacaagggcagttggcggtacttaattattgggcacatatgcttgcctgataactaaacactttactactaattagcaagctttgttttgtacatacataagtcgacgaggaccacttaccagcaacttgttggctggatggcgggtggctaaataggcgggg

SEQ ID NO: 42134 - DNA, 1397 bp, Zea mays
  Clone ID: MRT4577_138424C.1
cccgttcaccccgcgttcgcttcatccgggcgtgggctaccgccgcagccgccgccctacgtccggtgaccaggctttcattgagctttgccgacgacgaccacgcaccagatggctgggtatatgtcaagagggccccaaaatggttctgtgtatgtctgcaatctacctcctggaactgacgagaatatgttggctgaatattttggcaccatagggttgctaaagaaggacaaaaggaatgggcgcccaaaaatttggatctatagggacaaagtttccaatgaaccaaagggtgatgctacagtcacttatgaggatccacatgctgcttcagctgctgtggaatggttcaataacaaggatttccacgggagcactattcaggttcacatagctgagtcaaaaagcaaagatgctttcgataaccccacaaatttgaacaccattgctggtgtcagtgaacaagatgaagtggataacggagcaggcagaggtagagggcgtggtgatggtcccggcaaggcttggcagcaagatggggactggatgtgtccaaatacaagttgtggcaatgtaaattttgccttccgtggtgtttgtaatcgctgtggagctgcacgccctgccggtgctggtggaactggtggtggaggtggcggtaggggtagaggccgtggtaactctgatgcaagaggaagcagtcgtgcgggtgctggtgctgctactggtggtggtccacctggattatttggcccaaatgattggccatgtccaatgtgcggcaacatcaactgggctaagcgtaccaaatgtaatatatgtaacacctccaagcctggtaccaatgaaggtggtgtgaggggtggccgtggtggtgggtacaaagagctcgatgaagaagaactagaggaagttaaaaaacgccggaaagaggctgaggaggatgatggagagatctatgatgaatttggcaacctgaaaaagaaatttcgctctaaagctctgcatactggaagtgcgcagacacttcctgggtctggacgtgctggatgggaagttgagcatcgtggttctagtgaaagggaaggcagggagaggagcagggatcgtggtagggacgactatgatgaaaaggaaaccaggagcatagatagaggtgatcatggaagggaccagcgccggagccaagaccgcgaaagggaaaaggggagggagagaagagaccatgagtatgagagaagtagggagcgtgaccggcgccacaggtgaagagagaaatgacagggctttctgttcttacatcgcatttgccactttttgtagccatggaacccgtggtcttgtgttagtatctgggggcgtgcattgattctcagaatctgatttttgctttg

SEQ ID NO: 42135 - DNA, 1166 bp, Zea mays
  Clone ID: MRT4577_138425C.1
accccggccaaattgttgttgtacacacggcacaccctaaccaaacatcctgccgcgtcccgttcacccagcgtgcgctccatcttggcgaggccgcgagggcgaccgctacagcagcagccgccgccgccgccgccagatccccaggccttcgttgaacccttcgccgtaacgagatcagatggctgggtatatgtcaagagggccccaaaatggttctgtgtatgtctgcaatctacctcctggaactgatgaaaatatgttggctgaatattttggcaccataggcttgctaaagaaggacaaaaggactgggcgtccaaaaatttggatatacagggacaaagttactaatgaaccaaagggtgatgcaacagtcacctatgaggatccacatgctgcttcagctgctgtggaatggttcgataacaaggatttccatgggagcactattcaggttcacatagctgagtcaaaaagcaaagatgcattcgataaccccacgagtttgaacatcattggtggtgttggtgaacaagatgaactggataatggagcaggcagaggcagagggcgtggtgatggtccaggcaaggcttggcagcaagatggggattggatgtgtccaaatacaaggtctgttatgattgttgtggcaatgtaaattttgccttccgtggtgtttgtaatcgctgtggagctgcacgccctgctggtgctggtggaactgctgctggtggtggcggtaggggtagaggccgtggtagctctgatgcaagaggaagcagccatgctggtgctgctgttggtggtccacctggattgtttggcccgaatgattggccatgtccaatgtgtggcaacatcaactgggctaagcggaccaaatgtaatatatgtaacacctccaagcctggtaccaatgaaggtggtgtgagctaggatgaattttgccgcacagcaacagtactccttaaaaaactgcagatcaattgcagtgatattgtgcccttaatgtgaccagtttttgacctttgggctcagaaattgactcaagaagccttggtaaacaatagatgggttaatgacatatctggcagcctgtcagcccagattatcatcgactttctagtaattttggacctagtgcaaggtttttcagttac

SEQ ID NO: 42136 - DNA, 122 bp, Zea mays
  unsure (1)..(122): unsure at all n locations
  Clone ID: MRT4577_138426C.1
agctggtacgagctcgatcactagtacgccgcagtgtgctgatcggcacgaggacaaaagggtaccggaagcngaaagcctngccccgcgtctcgcatcgctcggacgcacgcagacaggcc

SEQ ID NO: 42137 - DNA, 267 bp, Zea mays
  Clone ID: MRT4577_138427C.1
atcaaattaaaccactggttgggggtaaaattataattggaatacctccaataactcctatcttatttacattggctacaaaaaagccatactttgaaaactaataattccaattcccttatatatatactaacctttttattcatacaaaatctctaatttgaattctcttaataattcctatcttatttcctatcccccccataaaagtctaatttgattacatatttctccaccttatttattaacataattcccctcccccct

SEQ ID NO: 42138 - DNA, 383 bp, Zea mays
  Clone ID: MRT4577_138428C.1
tgacacactctccagcggcccacccttacccctgctcaagacgtctttctctcttttgctcactcacgcacgcatacacacacacgctctctctctctatctcttcttcagtcacgtatataactcccagtgcgatggtcgcaacagccctcctccgtagaactccagggacgttgtccgcggctatccgcctgcatcgagccaccacagcttttgccacacctgcagctcgcgcgttgagtacgcatgtcacaaacgccgcctgtgaggaccacgaaccaagcttcctaggttctgtcgaaacgttttacgatcgcgcggccaagattagcgggatctccgaaaagtctctaatgggcatcaaggccgttgactctgtgctc

SEQ ID NO: 42139 - DNA, 211 bp, Zea mays
  Clone ID: MRT4577_138429C.1
gcagtgacttcacctgagaacatcccagcggcaggacaagagaaatcatgtttattcctcaggaatactgaagtgccctggagtaagctgccattcttctgtaacaatgttatcagtaatgctttaaactccagcacctggttatgcatttgaaaccaagtctgtttcttgttttgtattttctctctggaagttgtaaggaggtggtctt

SEQ ID NO: 42140 - DNA, 347 bp, Zea mays
  Clone ID: MRT4577_13842C.1
ccgggggacccacgcgtccgccactcttcctgaatcagagcgtgctattttttttcttcctttaggcgacccccgctgaattaccaaccggtcggggcgccaaaagctagggttccgctgggcgccggtgccggctctactttcgtagcctctccgacggctcgcgggaaccggatgctgctaaactctgggtttctctcctcctgggtgcgcctattcttcacctgcactggtggttgttttggttgtgcccagactactccgataatatcttttgatgagcccacacaatgtttaagaattcaagggcgctcacctaaaatacacaatttatttgactacttttt

SEQ ID NO: 42141 - DNA, 207 bp, Zea mays
  Clone ID: MRT4577_138430C.1
ggctcgagctcgagccgatcaaagacagctactacaatttcctgtgtccttaactaaggaccagcttacatgtgaatgaatgtgaatgttttggacattaaaaaaaaaaaaaactcgggggggccgccgattagtaaccccgtcgacccggaatttatttcgggccgggtccctgcgggggtaccagtttcccctaaaggatcggta

SEQ ID NO: 42142 - DNA, 574 bp, Zea mays
  Clone ID: MRT4577_138431C.1
attcaacaacaaggcggagcatgtgaagcaaagttgtgggatttcttcagatatgaggttgtatacgaggccagggcggatgtggtggccaccacgagctgtaagaagctcgtcgtggacatgcattacgaggtgcgaatccaagccatcgtcagctaccatggcgctccatccttggtgagaaggtgaccaagtaggacgcccgaaccatgtcattgactagggaccagtagttgcagtgctgggagcagatggtggataggtggtgctcacctgaatgggacgaggtgcacaatgctagccgggaacgatgtttgatgatttggcgtcacatggtggccagccatgctccatcttcttgaattatgctatgacccacaagggcaaggtgacgtccaacatcacctacaacccggatgacgggcccgaggcgtataacaaccccgccgttatctacatccgcctaagtgagagcaaggagcacgagctcgagcctagccatacgacctcggtatgacaactcacatcatcagatataataactctaggcccagctagaagaagaaatgaggga

SEQ ID NO: 42143 - DNA, 217 bp, Zea mays
  Clone ID: MRT4577_138432C.1
tcccgctgcgacccactcatcctatgagatttcaactgatcttgcttatatatctcacaagtttcagaaatttctcagaaatttatttaatactttgccatccccttatcttgattttctcctattcttttttctttttattctttttatatcttcttctcttattctcttatttttttttttttttactttttttcttatttattttctttttttt

SEQ ID NO: 42144 - DNA, 312 bp, Zea mays
  unsure (1)..(312): unsure at all n locations
  Clone ID: MRT4577_138433C.1
ggccgctgacctggaaggcctcttcaacgtcccgttgcaatattctattcgttgagaggacaagcgcctggaggaccaccttgccgatgtgcaggaagtctacgcacaacaggccaggggtcctagcacggatgcaaagcaactcnttccacttccggggccgccgccgccttaaggggaagcgtaatctggtggtggccattcccgaccaggtcaactgttctaccgggcggatacacattgaaacgggttgcttctacctggcacaactaggggaaggagaactggtgcttaggctgtcactagagatgc

SEQ ID NO: 42145 - DNA, 673 bp, Zea mays
  Clone ID: MRT4577_138434C.1
ggacaaccaggggttaatacagttacataaaaaaaggggttttttttttccaaacaacccaaaaaccatgttgttttgggcaaccaccatcctacctttaaaactccccccccaaaaaaataaatacccaaaaaaagggcaaagggaacgtcgccgcccacccaacctttaaggaggcccaggggaaaccccaagcggaaatcgttaccctaacggaccgagggggaaaattaaaccaaaaagggaagggggccgaaaaatcagaaacacatggggagggcggcaacccagggaccggaaacgaaaaatccggaaagaatagggggggccggggaattcccctgccattgcaacgggccgggaagttaaaaggctaataaacaccattggggggaaccaccaaaattccagtggcgggtgggaaaaggctaaacacccctgggttcccagggaaagcactaccgggggggggggaggaaagggacaaaaaattggggatcagggggcggctagaagatcctgccgttggggcacgctacctttttaggggggggaccatttgggggcccgttaaaatgggaagccccattttgggccctgaaaaacgtaccaccaaaaccatctccttgggggacaaagcttccggacccgtttgcatcaccttgaaaaccag

SEQ ID NO: 42146 - DNA, 1030 bp, Zea mays
  Clone ID: MRT4577_138435C.1
tcccgcgttcaggaggtccttaagttctgctgccatttctcattctacttgttcatgcgtcccattgcagcaccgggggaattcattctcatcacatgagattaggaatcatcagcccggatcacgctttcgtcctcctgccaccctccccggatcatctaccgccgcctgtgcatctgccacctccggttcacctgccacctccggtgcatctcccaccgccatagcttcaagggaaggaggcagaccaatgtcagagatccgcaatgtcttcgatcagattcgtcaggggagaaatgcaagattggaggatttgcttctcattgatcggtcacttattatgagacgcgcaaatttgattgatagacatcgggatatgcggcttgatgtggataatatgtcctatgaggaattgctcgcactaggtgaacgcattgggtacgtaaacacaggacttagtgaggaaaaaatcctaagtaacttaaaacaacggaaatatgtcttaatatcattggaagatcctccaacaggtgttgaaccatgttgtatttgccaggaagactacgcggaaggcgaggacttgggcagactggactgtggtcacgacttccacaccgcatgcatcaaacaatggctggttataaaaaatgtgtgcccaatctgcaagaaaacagcactggacgcctaagacatggctgcattttccctccctagggaaaatccggtagccggcactaagggcaagtggttgtcatctaaccacaccatgcacccaaagactagcaactggttacaagcatgttacaccttcccattatcaacacacatgtgggaatttatactataggtggtacatggcacttacctgaagccaatggctgtagaccccggagtttcatccttgttttgtttaaacctagatttgggatttataatttattgaatgacattcgatttacttgggcaaaaaaaaaaaaaaaaaaggcccctacagcaatacctgctatcatcattggtggctaaatcaaaa

SEQ ID NO: 42147 - DNA, 153 bp, Zea mays
  Clone ID: MRT4577_138436C.1
gaaagcaaatgggccagttttgtattggacatgcaatttacataattctcgcaagcaacaaggggtaagttgtagtaacaacacaagacattacacccttagtgttaaataggctttggaaggggataatatgatatatattaccaggcccgg

SEQ ID NO: 42148 - DNA, 202 bp, Zea mays
  Clone ID: MRT4577_138437C.1
cccacgcgtccgctgacacgtgggtcgacgttgatgatcctgcaatgttgtaggtgattggggcatttgttggccctgctgctgaccacctatgtggctgctatacactgtacctgtctatgcatatatgagactggaacatttggcgcataaaaaaaaagtatacataataatggcaaggcacattatacatatataatat

SEQ ID NO: 42149 - DNA, 293 bp, Zea mays
  Clone ID: MRT4577_138438C.1
cggaccgtgggctgctgccgccaccgctcgcccagtctaggtccagccgctgccccgcccagccgctcgcggctcgtccaagtgtccgccatcgctcacccagtctagcttcagttcttgttcttgatacacgggtgctcagttccttcagttcttgttctttatacacgggtgctcagttcatgatacacgggtgctctatgcctgctagccgtgttatcattgcttatgtggtttctacgtgcatgggtacgaattttgcaagctgcttttatctgcaatcagcaagagca

SEQ ID NO: 42150 - DNA, 1300 bp, Zea mays
  Clone ID: MRT4577_138439C.1
cgtgctgcgccaccccctccgtcctccgatccaaactaccgacgaacgccaccacccgaattcgaaaccctaggcggccgctgtagaacacgtgaggctgtagtgcctcttgttcggtggagccggcccgcggcagccggctatgtcgacggaggacgagaagctcctcaaggaggcgaagaagttgccgtgggacgagaggttgcagcataagaactggaaggtgaggaacgacgcaaacatcgacctcgccgctctatgcgactccatcaccgaccctaaggatgcccgcctccgcgagttcgggccgttgtttaggaagacggttgcagattccaatgcgccggtacaggagaaggcgctcgatgcccttctcgcgttccagcgagctgctgacgccgatgcatcaagatacgcgagggaggtctgtgattcaatcgtggccaagtgcctcactggccgaccaaagactgtcgagaaagctcaagctgcattcctcctatgggtggaactggaggcatcagaggtcttccttgaagctatggagaaggctgtgaagaacaaagtggctaaagcagttgtacctgctattgatgtgatgtttcaagcactaagcgaatttggaactaaggtagtgccacccaaaaagattctgaagatgctacctgagctgtttgaccatccagaccagaatgtccgggcttcttctaagggtttgacactagagctttgtcggtggattggcaaagaccctgtaaagtctattttatttgagaagatgagagatactatgaaaaaggagttggaagcagagttggcaaatgtgtccggacttgctaagccaactcgaaaaataagatccgaacaagaaaaggaacttgaggaggagtctgtgcccgagacaagcggggctaacacttctgaagaggcagcgacagatgcccctgtggagatcgatgaatatgaccttgttgatcctgtagacattttaaccccactagaaaagtctggattctgggacggtgtgaaagcaacaaaatggtctgagagaagggatgctgtggcagaattaaccaagcttggttcggcaaaaaaaattgctcctggtgattttcatgaaatttgccggacactgaagaagctcatcacagatgttaatttggctgtttcggtggaagctactcaggcaattgggaatttagctagaggtttaagagcccaattttctggaaatgcacgaatgctccttccggttttacttgaaaaattgaaagaaaaaaagccaacaatgacagaagca

SEQ ID NO: 42151 - DNA, 459 bp, Zea mays
  Clone ID: MRT4577_13843C.1
ccggccgggagatcctttaatctccgacgccgtcctcgcagtcactcacccctgcatcacctcgcacaatatgcttcgccaggaggactgatatgatgcttttctcgtgggccaactcgtctctgtggagagctcgcctctaaccgaccgggactctccgtcaagctcgttgttccaaggaggtcaggatcctcctactgggcctgtacacatcgctcaccgagaccatcgctgaacgcagatgctgacagacacacgcatagttgcaacaccagaccccgcatcacccgacgtcggaggaaggcactatccttgaaggacacgttccagagtccacgatatctttctcctcttcactatcacggcgggtggggatcgatcatcgtatcgcacagagcgtaagactgtaatatacctgggattatagcatatgacatagagtatccaaccgtctgaatc

SEQ ID NO: 42152 - DNA, 168 bp, Zea mays
  Clone ID: MRT4577_138440C.1
aattgttttaccgacgagtactaatgtcggcgggcgccccgatgctctggtggcttttttaaagctttttttggtctaaccccacaccagcgcccgggccgggccaaacgtatgaagccggatgggcacacatgggcttagaacccacctgagaccattcaaggggac

SEQ ID NO: 42153 - DNA, 421 bp, Zea mays
  Clone ID: MRT4577_138441C.1
aaaacaaccatttttcaatgaacatacaaaccctttttttaaaaaaagggaggagggggtgcaagggggtaaacatacaggacagggttggggggaacaaaatgcaccggaaacgtgcacactaaatacacattgttccttaacgtaccgaaaaaccaaacatttgtgggaacatatggggcggtcacggaccaacaaaacttttgggagcacgttcgttttcaaaaaaaaaaaattttgccaacaaacgggtgaccgaccgacccaccgggagcaaaaaaacgttttttgctaactttgtcaccaacagtagtagtagtagagcaataaagtgagttaagtacccgacggtaagttatcctttaccttaacctgaaactaccacctgcaccattcgggaatttcgtgcactggacctttt

SEQ ID NO: 42154 - DNA, 329 bp, Zea mays
  Clone ID: MRT4577_138442C.1
ccccccgggccccaaaacttaattaggtcccaaacatccttttttttacgcaaacgggcccttacccttgtttgggcccaatccatgcgacccttttaaacattaatccccataataataaccccccccccctttttgttggaccgaacaggcggcccccaaattttggcgggggggttttttttttcccccccaggaggtatttgcccttttttccgggggggaaggtaaaaagcttgccttttccaacgggctcacagaaaacgggccgggagctaaccatcccttatttgcgctgggatgtttttgacagcccctggtccatgggg

SEQ ID NO: 42155 - DNA, 298 bp, Zea mays
  Clone ID: MRT4577_138443C.1
agaagatggcagagaagaaccgcaaggatgccgaagattggttcttcaccaagacagaggagctgaaccgcgagtggccaccaacagcgaactggtgcagagcggcaagagcgagatctccgagctccggcgcacgatgcagaacctggagatcgagctgcagtcccagctcagcatgaaagcatccctggagaataacctggaggagaccaaaggccgttactgcatgcagctggcccagatccaggagatgatcggcagcgtggaggagcagctggctcagctgcgctgcgagatg

SEQ ID NO: 42156 - DNA, 530 bp, Zea mays
  Clone ID: MRT4577_138444C.1
agtgtctccaccaccgcgagaaagcaggcatcgccttcacagtcaacaaaagctacggcctacgacggatacggtctcccctccactgcctcccttgccctattgtcttcttcatctcatcgcatcccatagttgtgccagttggagacgcttctgttgctgaaggagacctacataaactatagtcagccgctaagttaaacaagccacgtgctgggccagaacctagcaggcttaaggatgagtaaaatgatatctgttcaacatgaggcacaacgatatctatctttcaagaatcagtaaactgatatctgctagatgtgcttctctatcttcgtttgttttgaaacacatatatagttgaaaaactgtagtggtgagaaactcgaaatgaatctgagccagaactcagctcagactgccaaatttcataattttattcacaaatttcaacaatattgaacattgagtatatattaagcgaataccaaaatcatgttttctagcctatttcatgccatgatgacatc

SEQ ID NO: 42157 - DNA, 298 bp, Zea mays
  Clone ID: MRT4577_138445C.1
gaaaaaaacctttttttctggaatttttccccacattttttttggttttaccccctattttgaatacaaccccttgagctccacgaaaaaataacggttggtggtaaaataaatgcagcctcgcggttgatactaaaacgctcaatcttgagcaaatacccaagcttggtcaaaccctcatatatgtcaccgtctagaacggttaacgggggcgggtgggagtaaaaaaaaaggggggtcccttttggggtaccaagggcctttttttattattatttccattagcggtttttttttg

SEQ ID NO: 42158 - DNA, 575 bp, Zea mays
  Clone ID: MRT4577_138446C.1
ctgggtcggcaactgactgacagtgaaaaacccgttgggctcggctcgcgcggcgccgtcctctcccactctctacgcacgaacacagcacgcgccgcaccccgctctctctctcctgcgttcccatctgcggcggggagtgagcacattgaggacggtctactcctcgttcgcgtgcggttcgtcccgagcgatccggcaaccatgaacatcttcaagaagaaggtcgaccccaaagaggctctcaggaccagcaaacgtgaaatggcggtcgccacgcggggtgagcaaccgagcactgctgaccaattgtttgccactgctgatgatttactgttagtagactattagttcgcattgctacccaggcatcgtggaaaaagaattcaggaatcgctggcacatttgctagtcgacatgtgtgttatattgaaccagactagcacatgttcatgaatctggaatataggtggatatctcataacttatattgttacaggtttggcatatcaaattacagtagctcttcgatttaagaatgacgcttaggtagcagaccttttagcctttattta

SEQ ID NO: 42159 - DNA, 501 bp, Zea mays
  Clone ID: MRT4577_138447C.1
caaagggaaacaaaaccccaaaaaaagggcccaaaaaagcaaaatggccaaaaacaaacaaacatgttgggaaaaggaaatttcaaggaaaatccccaacaaagtttttattcaaggcaagctttacaaaccaaaggaaaaaccaaatccccgggaggaaaaaaacaaccaacaaaatggggggcgaggggatccacccaaccccagtcccccagctgaataatgaaagcatcgacccacggatatcctggggggccatttttccatgcaaaaaaaaaatcttcgttccccccccacggaatctggttgcaaatttggtcccctttccccccacaaaaataaggggtcccaaaaaacactgggaaaaaaaagtctccccacaaaaactgtcctgtaaaaaaaacagggggttttgtttggtttttgacccccctgggcacatcctggaagccgggggaaaaatatcgggaaaaaggcccccaactttaaattggggaaaaa

SEQ ID NO: 42160 - DNA, 301 bp, Zea mays
  Clone ID: MRT4577_138448C.1
tcaagcgggcgcccgggcaggtgcaagctttttttttttttttttttttttttttttttttaccaaagggggggggctcatcatattacatattcacatccatatccatgcttacacacagcacccgcatcattatttgttctaccacaaagctagcgacgagggggggggcgctgaatctgaaaaccacatggcaatgggatggatcctaacaatagccgtagttaggggaggactaggctcttcttgaaatgcgcgatactgaatggtcttcacattgagcttcttgaagatgctgttt

SEQ ID NO: 42161 - DNA, 295 bp, Zea mays
  Clone ID: MRT4577_138449C.1
gccaacgccccctcttttcgctcttgataatgtctatgcttatgcaacgcatcctgctggtatgactgatccacctctacgacggagcgctatgagggtgtccacgccaagaatcccttgaccaagtctccgggccgcaggaggatcaagatcacttcctatcgatggggatgtatatgacactgaagccaaagataatggatctcgtacacgcatcaaggagagatgatttcgtcttcatcactgccacagtgatgcgcactcgtggcaagaaccgcgagaggcccccgcgatg

SEQ ID NO: 42162 - DNA, 247 bp, Zea mays
  Clone ID: MRT4577_13844C.1
gccttgtttcctgccttatatcttgtatttcgacttattacagagttgagggttcttgcttaatttagatcaagtataaaatttgtatgacttcaagtctcattttatctgaaaggtttttttctcatttactctgatgtggcattttcgtcatctgaagcatgagtgacaagttgggaatgatgtggtgatttagaatgcagtattggccaagtccaagttgtcaacttaagcgtctgtttaccaa

SEQ ID NO: 42163 - DNA, 278 bp, Zea mays
  Clone ID: MRT4577_138450C.1
cggacacgtctgtgaaggcgtccagtaccttgatgatgcatgtagcgtgacctgacaagggacagtataaagcccctgcaagcacatccggctataatatgtactagtatgagcatgcagacaacagttgacaattgaattaatcatgtgatcatctatcattgaacggctctattcgtgaccatatatcaaaatatataagataatacagataattggaggatgttaatacagtgcagtattttggatgctgcgttttcatggggggcaaacaattt

SEQ ID NO: 42164 - DNA, 578 bp, Zea mays
  Clone ID: MRT4577_138451C.1
aagcgcttcgatgttttgggtgtggcaatcttcttcagcacagcagcaagactgatgaatactcagatccctgccgcatcgcggccctccgcgccccgcccccacccccggcctcctgtactcagatcgactgttgagagcatacaagagacctgtggaggttgacgcggaccaatcaaggtggtttatatccaaggatgcaattgtatctggccttggtcttctaggtatcaagcagggtggacctgaggcaacattttctaagtctcgtcgaaagagagtcatccgcaaaaaggtcacttcaggttgagtttagtggatttggatagcaatgctggaacaattttgcttctgttccactatgccagagggaggtctacccaaattatggtaaatgagaaaaaggtatcaagtcaaccagcacgtggtctgtcggcgaagggatcaaagggtttgttactgggaagggttagttaaaaggtgccaattactattttatatgttcttcccagtcgtttcagggcagtctttttgaaagctgctgagcttagtcttgtcgggtttgtggccggctctgt

SEQ ID NO: 42165 - DNA, 2225 bp, Zea mays
  Clone ID: MRT4577_138452C.1
cattgctcctctttcgatagctggcgaaggcgcggcgcgcagggccagtagcaaccctcccatggcctacgctgcgcctcccatggcgtcgtccctcaccgcctcccacccccctctttccccgtcccacctcataacccatccgcatcgctgccctgcgcgccccaaccccaccaccggcctcctccgcctcaccccgtctcgccgccgcggtcgtccccccgtggccgtccgcctcgcaatatctgcctcgtccacctcagccccgcccccgtcggcggatcggtcggaggccgcgtcgtcgctggagagatacctctcggcgacggtgacgggagcggtgatgggaacgggggcggccccaccagcttcggccccgccgcgcgccccgccggcgatgaaggggggacggaagcagtatagcgcgttgggggctgtcacgctcgagaaggccaagctcgatctctcccagcgccgcaagaatatcatgcccgagctggcgacaggtggtggtggtggagatattggaaaaaggatcggtcatggtgggggtgatggtggtgatgatgatggtgacgatgatgactactttgatgattttgatgagggagaggaagaaggtgggcttttcaggaggcgaattgttgtacaagagctattcaatagggagttcgtagaagctgtgttgcaagaatggtacaagacgatgagtgatttgcctaccggtcttcgccaagcttgtgagatgggtttggtgagttctgcacagatggtacgttacttgtcaatatttgcaagacctacaaacgctaggtccttctcaagagctcttccaggctggctttccagaggtcttgttggaaggacacttgcagatccatcattcccacataaaatgtctttggagtttatagctaccattgcgtcatctatttggtgtgaaatgaatattcgcaaagagaggtttaaacaagaatgggatttggtgattgttaatgctttgactgcagcttgttgcaacttgatggttcttggacttttagcaccatgccgttcatatgcgagtacatctcgatttgacttccaaaatgcaattgagaaacttccgaacaacatatttgagaagagctatcctttgagagagtttgatctagcaaaacgaatcagtgcattcttttataaagctgctgagcttagtctggtcgggtttgtagctggctctgtgcaagggggtatgtcaatagtcttgtccgcaagaaaagaaaggaggttatcggtgactattccctctatcagcaccaatgctcttggttatggagctttcctaggactctatgctaacttgcgttatcaattgctatgtggagtagaccaatatatggtcaagcgcttcgatgttttgggtgtggcaatcttcttcagcacagcagcaagactgatgaatattcagattggtgaggcatcaaggaggacttggcttggcgaggaagctgatccacagtactcagatcgactgttgagagcatacaagagacctgtggaggttgacgcggaccaatcaaggtggtttatatccaaggatgcaattgtatctggccttggtcttctaggtatcaagcagggtggacctgaggcaacattttctaagtctcgtcgaaagagagtcatccgcaaaaaggtcacttcaggttgagtttagtggatttggatagcaatgctggaacaattttgcttctgttccactatgccagagggaggtctacccaaattatggtaaatgagaaaaaggtatcaagtcaaccagcacgtggtctgtcggcgaagggatcaaagggtttgttactgggaagggttagttaaaaggtgccaattactattttataatttaattgcagttatttaaggtaagaaaatatgttgttttcttgtattgctgtgaggcaaatagacacgtttagtggtagttttgtaagattgttaatgtactgactttacatgagaaatggattctgcatttttatatagatcaaatagctgccgcatgcttgtatctatcttttgaggtcaatcaggccagggtcctgctttgttgctggttaggactacgcttttataaaaacttattttaagtacgaaggccgatctctgtggaagtttcatcgtgctatttccaagactactacattttctaaagaggaatgaacctcaatggaatgttttatttc

SEQ ID NO: 42166 - DNA, 422 bp, Zea mays
  Clone ID: MRT4577_138454C.1
catctccctcttgctcaaccgcgtcccaacgaccggtcctacccgctagccttcaccgacgctgcccacttgaactagatctagccctgcttgacctccctaggtgccaacgacgtccctaactcctctgttgtcgctcttggtgcatgccaagtacgcagccaggaatgggccattgtccagccaaacagagtggccaccgacccttgatgagaggctcctcgccatgcctcggcctagcagtggcgtaaccgagagctagagcaccgcttcaccttcgtcgtctagctctccgatggcatgatgatggtggtgtccccaaggccttccggcttgccggtgatggtgacaggctcccatgagaaggccatggcggtcggtggcttcaacacaattgctaatttctcctaccgccccatcgt

SEQ ID NO: 42167 - DNA, 478 bp, Zea mays
  unsure (1)..(478): unsure at all n locations
  Clone ID: MRT4577_138455C.1
agaaagatcaatctagagagaccaaaaagagatcggaagagatggcttctacctccgcgatgtcgttggtcacaccacttaaccagacccgttcgtctcctttccttaagccattacctctgaaaccatccaaggctttggttgcaactggaggcagagcacagaggcttcaagttaaggccctcaagatggacaaggctttgaccggtatctccgcggctgctcttactgcttcgatggtgattccggagatagctgaagctgctggttctggaatctctccttccctcaagaatttcttgctcagcattgcttctggtggcctcgtcctcactgtcatcattggtgtcgtcgtcggcgtctccaactttgaccctgtcaagagaacctaagacctatatatctttcttacatcattattngaatctggtctccttctgtggtattcgttcaatgttgcagcaatgaacttttggat

SEQ ID NO: 42168 - DNA, 404 bp, Zea mays
  Clone ID: MRT4577_138456C.1
cagaaataaggaagtacatttctaaaaaaaaaaaaaaaaaaaaaaaaaaaaaaaaaaaaaaaaaaaaaaaaaactctaaaaaaaaaaaaaaaaaaaaaaaatggcttgtccctggtccgggcccaccctaagggtgaattttgaagtttcccttcaccctgggggcccttatagcatgcatttagggggcccatttcgccctttactgagttcttttaacataaactgtccggggttttacaaccgaagttttggaaaaaccttttggttccccaagttaaaccccttggcaaacatcctcttttggacacctggatgagcagacagaaggccccttccgaccgccctttccaaatgttccgaatcataagtggataagggcacccctttttctaagggatttt

SEQ ID NO: 42169 - DNA, 259 bp, Zea mays
  Clone ID: MRT4577_138457C.1
gtgaaggccaggaaggcgacactcgtactccaggaggaccaagcttaccccagagactggcaacgttatggctgctagcacggcatggtacaagaccatggtatggtacagggactacacacagagtgagaactgctgaaagtggctcaggcgtgactctagttagctataagggtagttatgttatagagtaactcagcttatgtagagaggaaagaggatccatcaaattctgaatatcctgcatcaacataacaag

SEQ ID NO: 42170 - DNA, 265 bp, Zea mays
  Clone ID: MRT4577_138458C.1
cgggaacgctccgcccgctccccaccacgtctcgtgtcgcctccgagccagatcggcgcgacgagcagagggccccctcgtggcggggcgcggcattggtgcggtatgccggccggcggacgactccgactacctcttctcggtggcgctgatcggcgtctccggtgccggcacgtccgatctgctctctcgcttcacgcgcggcgtgtctcgcgcttgcgtccgcgttcaccagtcggcggcgcgctcgccccccggtctctcg

SEQ ID NO: 42171 - DNA, 607 bp, Zea mays
  Clone ID: MRT4577_138459C.1
gtgcaactaggccatcgggccgtttaatgaatcctgaaggaagcagatggccctcgaaatcgtcccgacacaggccacctctaaggggtgggcaggctgccccgcggggagcgcctcaggcctctggggagagccaggcggggaggccgggggaggccgtggggaggccgcgggcctggctgcctccgcatctctagggcgggcggttccagctaccccagcccccctcgccccccaactccaaccccagccccccactgcaggcgagcgcagtgtgcagaagacaggctctttaggatcacggactcgggaggagctgggaccacagagcccccccaccctggccctccccactggcttcgaccctcagcagacacttctggggacattctgcaggacaggcacgcaccgtgggaagggggaccgggcagcttctccctcaagcacacacacaacagcgctgggcccttcgggagcctgggagaaaccgtcaattgagagaaggaataagacttcaaaagattttgctcttcctgcacactcagcgccggggagccccctttcaaggcccgaggaacctcgtcctccgtgagaaggctaatgtgtc

SEQ ID NO: 42172 - DNA, 1095 bp, Zea mays
  Clone ID: MRT4577_13845C.1
atgggtcatttatttcgaaccccccagaagcgtcagaggactgctggtggggccgaggaggccggctcccaggcccagggcgcacagaggcgcttagtcctccgccgccaccaccaccaggctcttcatgagactgaggcggcgatcctgcgggagtgggaggcgcttgaggccgaacaccagcgccttagcgactggcgtacccagatggaggagcacaccaaggcggcgtcccaccagttcgcctccaagcgatccgagcttgagcgggaccgcgaggactacaaaaaggacctccagaaggtgtacgcccgggagctggaggcgagccggaaggagaagaggttggccaagaatgagaaggccttaaaccagaggaaggagaccacgactgtggagagtatccaaaaatgggagtgggagctggaggacaaggccatcaacattgccctagccgaggagaacctcaaggagaaggatgcttccctggataagtgggcgacggatctcgcctggcgggagaaggacctcgcattcagggaggaaatatttgaaaggtgggataacttgctggccgagcatgagctcgaggcggaggagaaggagaaaaagctggaagagtgggtctgccagttccaggcggcgcaggcagcaccgggcccccaggcggtggaggcgatgaagaaaacacttgaagatctccaggtggagcatcgcgccggggtccagtgcatcgccttatgggccggcgaggcgagcacgacactggtgccgctaggggtgagtcctatcctagtgtcggagctaccgacgtccatctccgacgcgctcccggtgctggactccaccgccgaccgcctccgacacctggaccagattcttggcgcccggctggaggccgagggcggcaggctctaccgggcggtgatcgagtatatcctgacgtgcttccagagccacgacccagccatctccttggagccggtgatcgctggtccggtggccgacaccgaagacgccgcccgggagggcgtacaagatgtcgtagaactggtggccgaacgcttccagcgggatcctactgatgatgagtag

SEQ ID NO: 42173 - DNA, 2031 bp, Zea mays
  Clone ID: MRT4577_138460C.1
caaatcttcgcctaccgttgggtcgacaagaggctgggcccggtcaactcaacccgagtttcgtcggcgctatccataccgataatcgccgcttaccccttcatgacgcgcttgtcgggaataaggcttggtgtgcctctctccggccgggatactccccgcttccttcttctcctgagtcctgactcctgagagtcctgttgctgtctatctcccccgcgcgctattcctccgcctcgcgatagcaatccgcgcattggacgtcgccgcctcaccggacggagccggtcgaaatggaggaggcggctcccgcaggaactagtaataaggtgtactacgacgggtgccccggctgcgccatggaccggaggaaggagagccgcgccggcgtcccctacaaggagctgctgttcgtcgccgccgccaccttcgcatccgctctgccaatcacgtccctgttccccttcctctacttcatgataagggacctgcgcgtcgctgagagggaggaagacattggattctacgctggtttcctcggcgcagcatacatgatcggcagaggcgtcgcgtcggtcttctggggcgtggtggcggaccgcgttggccggaagcccgtcatcgcgttctccgtcctctcggtcgtggtgttcaacaccctgttcgggctgagcgccaagtactggatggctatcgctacgaggtttctcctgggcgccctcaacggcttccttgcgccagcgaaggcgtactccatcgaggtctgccggcctgagcagcaggctctgggtatatcggtcgtaagcacagcgtgggggatgggcgtcataatcggcccggccatcggaggctacctcgcgcagcctgccaaacagtatccgcacctgttccatgagaaatcagtgtttggaaggttcccgtacctgttgccatgcctgtgcatctcgttcttcgccgccttggttgtcataagctgcgcatggctcccggagaccctacacaagcacagaggcctggagagagcagcagctgaagtggcagaaggcacgacagcagcagcagcagctcaagaaagcaccccggagccggagccggagccacctaagagcagcctgctcaggaaccggccgctcatgtcctccatcgtctcgtactgcgtcttctccctccacgacaccgcgtacgtcgagatattttctctgtggaccgtgagtggcagagatcacggcggcctcagcttcgcgtccaaggacgtcggccaagtcctcaccgtcgctggcgccagtctcctggtgtaccaaatcttcgcctaccgttgggtcgacaagatcctcggcccggtcaactcaacccgagtttcgtcggcgctatccataccgataatcgccgcttaccccttcatgacgcgcttgtcgggaataaggcttggtgtgcctctctacgtcgcggcgatgctcaaaagcgtcctcgccatcaccagagtcaccggcacatcgctcctgcagaacaacgctgtgccacaggagcagaggggcgctgcgaacgggatagctacgacggcgatgtctctgtccaaggcgttcgctccggccgtggccggcatcttgttctcgtgggcacagaagcgccagcatgccgcgttctttccaggtgaccagatggtgtttctgctcctgaatctgacggaggtcatcgggctcgtgctcaccttcaagcctttcctcgcggttccccagcagtacaaacagtgaaagcggtgctgcgtgcgtgcgtgctctgcatggatactatagagaggtagctagctgctagccagtgtgtgtgggcgagagcgagacgagggagatggacatgtcaagtagaagcagaggatatgatgtcattatacatatttactttgcgagatatgtagttcctcatgagtcttcgctgtgcggttttctaaaaaaaaattgagataaagttggtctctcaattatatggtgcattccggacatcattgttacatggaaagtgtacttcctctaactc

SEQ ID NO: 42174 - DNA, 185 bp, Zea mays
  Clone ID: MRT4577_138461C.1
acagaactcaatttatgccccggatgcccacaaagacgcatctgtcggggaaaagcccctacgacagacatggatgagggtgaagaacatccatcatgtacttgttcactccccatgaagatataatacacacacctccggctgatgtttactacaaaaaagaggagccgcctgttctccttgaa

SEQ ID NO: 42175 - DNA, 2295 bp, Zea mays
  Clone ID: MRT4577_138462C.1
tgaattcggcacgaggcgcttttttttttatcgacgagtttgagacagaccaaagaggcggaagaagcggggaagccgacgggcaacgaccggggcgtgaggcgatgtcgtggctccgcagcgcggtgcaccgcgccgtggaggcgagcgggggtcacagctccctccttacccgcaccgtccgcacctcccttgacaccgtcgtccaccatgccggccaggctgtcgcgggcggcgccaggctcatcaccgggagccggagttacaagagcgcgaaggtggcagcgaagaggctggaagaggaggcgctctcctgcaaaggggacgaacgggtgcagctgctgcgccggtggctcgtcgcgctcaaggagacccagcgcgcgaccacggcggtccgggagccgcaatttggggacaatccggaccagactgcgcccctgctggatttgtacatcgattacgacagcggtgcggagccgatgaactttttccatgtcttcctctacagtcaagccctcgagtgtgttgttctctccttgattagggaagccccaactgaggaagaagttccactggtctcagaagtttttggaatgtgcctttcgggagggaaggatgtgcacaatgcactcttaagtagtgtaaaggacctggcaaggttattctctagttatagtgacgaagtgttggcaaaacgtgacgagctgcttcagtttgttcagggtgagattacaaggctaaagatagatgctgacgttggaagataagattttgaaaatacgcagtagtaacagcacatagattcattggatacgcttcatgctaccccaatcggcaatcagaatgaaaaagctcctactgacactgagggttacagagagggagactgtgaaaatcggcttgacggaagaagggaggaacaactattgaagaagaaatcaatagacacagatgatgaattggagacacattttgataagttagataaactgaaggttatggctgcaacccttgtaaattgatctgcgaacgcggaaaagcggatcctggaagataggctacaaaaagaagaatctcttatcttccgggtcaccaaaacaaatgaagttagtggtatagaaaaggaattagttgctgagatctctggacttgaggagcaaaggaatcaactcgaggcagaactgaaaaaggtgaatactaaattgaaagttgctacagtgaagcttaaaaaaactagagaggaacgggaccaatttgatgaagcaagcaatcagattgtgttgcaccgagaaacaaaggacgacgaactttcaagatccatagcttcatgcaaagtagaagcaagtactgtcagtgcatggatcaactttttgaaagatacgtggaaattgcagtccttgtttgaagagctaagagaaaaacaggccaacgaagaattggatagatgtggactctgctttgcgaaattgatgaagtatcatgtttctgcatccatggaagagctaagcacttctattgaccgtatcaaaacctttgttgataacttgaaaatatttggtaacagatccgtgtcagcagaggatggagctaatggtccgtctaagcaatcaaaccctcgtagatatcttgaggaagaatatctccaaactgagaaaaaggtcgtagctgcattcagtttggttgatagtatcagagcaatatattcttcaaaccaggattactataaaacgagtttgtgcagaagggatgacactgaggtaaaaaatctgtttacctccattgacaatctgcggatcgagttcgaatccgtgccacgtccagtgcttcaaattgagattaaagaacaggcagagaaaaagaaacgatccccttccttgaaggtgtccgcgtcacctagccattcgagaagcgactctcctatcgcggctcagctcaggacacgactgccatcagagtccgaatcggagctggccaagttcgaccaggaatacaaggccgacgagatcagtgggtgggagttcgatgacctcgaagacgagccaacacctggcttcctatgatcagggtgttaatgggatttatcacagacatccagtagtcttcaatgagagccattggcacaaaatcattgggaaatgtagtatagcagagcgcagagccgtgtactccgtacgtgactttgtttctttttctgtcacgtcctgttcgctgtagatttttgctggcattgacctgtatatatgacaagtgcaagcgaacgccgtacgtatatatgcatacatttgtcttgggtac

SEQ ID NO: 42176 - DNA, 490 bp, Zea mays
  Clone ID: MRT4577_138463C.1
gccgggacgggggtacttccctaaacgctgagcgcgtctcgagcgaataatccacatttcccattacccctatcttcccacgtggcatagacagatgtcatagttgtctcgaatagatcccctcgctgcggcccgaaacacgacgcgagccgaacatgactcaaactccggatgtggctcccttgaacctggattacttgaccgcttgagatatgcatgcggatatctcgcgcgtggataacgtcgtccgatggtcattcttccgcacagcatacgagatgctcgcatgaacaggtgttccccgccacggccaatgacggagttaccgctcaccacttcgctgtcaactccatgctctcttactccccgggaatcgcgttcgggctgcgtggtcaaggcatcggtcctcatgattccattatatcattatcagattgagcgcctcttcaacttcctctttcacggattcgctgcggtcgggcttgcgttt

SEQ ID NO: 42177 - DNA, 2465 bp, Zea mays
  unsure (1)..(2465): unsure at all n locations
  Clone ID: MRT4577_138464C.1
cggacgcgtgggccgggacgaataaggtgcttaggatcgcagagaagggggagaaaggcccagaaatgtggctagagttggagctgaagttagtcgccgatgtaaggattgtaggtgctccaaatgctgggaagagcactctcttgagcgttattagtgctgccaagccagctatagccaattatccttttaccacattgctaccgaaccttggcgtggtctcattagattttgatgctacaatggtagttgctgaccttcctggcttactggaaggcgctcatcgtggttatggtttgggtcatgagttcctaaggcatagtgagcgatgctctgtattggtgcatgtcgttgatggttctgcacaacaaccagaatatgagtttgaggcagttcgcttggaactggagttatttagcccgtctctggttgacaaaccctatgtggtggtgtacaataagatggaccttccagaggcatctgagagatggaatacatttaaagaaaggctacagtccgaaggcattgaacctttctgcattagtgcaataaacaggcggggcacacaggacgtcattcatgctgcttacaagcttctgcngaaggagaggcannggctgaaggtttctgttatgtcgtggctccgcagcgcggtgcaccgcgccgtggaggcgagcgggggtcacagctccctccttacccgcaccgtccgcacctcccttgacaccgtcgtccaccatgccggccaggctgtcgcgggcggcgccaggctcatcaccgggagccggagttacaagagcgcgaaggtggcagcgaagaggctggaagaggaggcgctctcctgcaaaggggacgaacgggtgcagctgctgcgccggtggctcgtcgcgctcaaggagacccagcgcgcgaccacggcggtccgggagccgcaatttggggacaatccggaccagactgcgcccctgctggcgccgaactacctgtgctcgcgggagttgcaggatttgtacatcgattacgacagcggtgcggagccgatgaactttttccatgtcttcctctacagtcaagccctcgagtgtgttgttctctccttgattagggaagccccaactgaggaagaagttccactggtctcagaagtttttgggcaagttattcgaccatttgatgtcttaatgtgcctttcgggagggaaggatgtgcacaatgcactcttaagtagtgtaaaggacctggcaaggttattctcaagttatagtgacgaagtgttggcaaaacgtgacgagctgcttcagtttgctcagggtgcgatctcagggctaaagataaatgctgacattgcaagattagataatgaaattactcagttgcaacagcagataaattcaatggatgcgctccatgctacatcaatcgtcaatcagaataaaaaagctcaaacagccactgagggtttcagaaaggcagtttctgaagttcggctttgctctagaatggaagaacttctattgaagaagaaatcaatacaccccggtgattcattggagactcattttgagaaggtagataaactgaaggttttgtctgaatcccttgcaaattcatctgcaaaagcagaaaagcgtatcatggaaaataggctacaaaaggaagaatctcttatcttccgggtcaccaaaacaaatgaagttagtggtatagaaaaggaagacgaactttcaagatccatagcttcatgcaaagtagaagcaagtactgtcagtgcatggatcaactttttgaaagatacgtggaaattgcagtccttgtttgaagagctaagagaaaaacaggccaacgaagaattggatagatgtggactctgctttgcgaaattgatgaagtatcatgtttctgcatccatggaagagctaagcacttctattgaccgtatcaaaacctttgttgataacttgaaaatatttggtaacagatccgtgtcagcagaggatggagctaatggtccgtctaagcaatcaaaccctcgtagatatcttgaggaagaatatctccaaactgagaaaaaggtcgtagctgcattcagtttggttgatagtatcagagcaatatattcttcaaaccaggattactataaaacgagaagggatgacactgaggtaaaaaatctgtttacctccattgacaatctgcggatcgagttcgaatccgtgccacgtccagtgcttcaaattgagattaaagaacaggcagagaaaaagaaacgatccccttccttgaaggtgtccgcgtcacctagccattcgagaagcgactctcctatcgcggctcagctcaggacacgactgccatcagagtccgaatcggagctggccaagttcgaccaggaatacaaggccgacgagatcagtgggtgggagttcgatgacctcgaagacgagccaacacctggcttcctatga

SEQ ID NO: 42178 - DNA, 249 bp, Zea mays
  Clone ID: MRT4577_138465C.1
aattccctactcgacccactcgtccgctcacacataccaccacactcactcacctttaccttaacccatcatacaacaatacacacgacatgatactatcttttagcaaaacaatcaacaaccctacttctaacaatgtaatcaccattcactcaccccacgcttcaaactttaataatcttaccttccattccctctatatccccctaccttttccaaccatcaataatattacttttccaacaaaac

SEQ ID NO: 42179 - DNA, 693 bp, Zea mays
  Clone ID: MRT4577_138466C.1
agcagtggtaacaacgcagagtacttttttttttttttttttttttttttttttttttttttttttttttttttttttttttttttttttttttttttttttttttttttttttgggggggggggacccccccctggggcccaaaaaacccggggggaaacaacccgaatttaaaaaacagggccggacccccccccctagcccccggaattccccccaaaaaaaaccattgggcccacaattcccccccccccccccgggggaattaaggcccccgggggggaaagacccaactggggggcaggaaatcccccgaaaaaaccccggggcgccccaaacggggccgaaattagggggggggggaccaaaattcccctggggcaagaaaccagaagcgggttgaattccgggggaggggacccaaaggggggggcgggagggtttccaagggctttcttgaaccacaaacagaaaaacccccccccaccgggcctgggggaaaaccccccgaataaaattcaggcccgggcagggggaaaaaaaaatctttcctgggggggcccaaattttttttccgaaaacccccccccccccccggtttccacataaaaaaaccctggggaaaaagaacccccccccccctttttcccaacgggcccaaaaccccgtttccccgggggggggaaccccccc

SEQ ID NO: 42180 - DNA, 241 bp, Zea mays
  Clone ID: MRT4577_138467C.1
attaccaaaaaacacgatttattccctttgatttactatgataaatctgaggaggggcgaatggccaggcatagcaacaacaacatgctggtttttcacatacattagttaagagaccgattatgctatcacatgctcaggaactgaccctagtcactttaagaaaaagaagcattggtaacattaatgccgacacggcaagatatgcagctgtatagatttaccataacacgaccgtggg

SEQ ID NO: 42181 - DNA, 798 bp, Zea mays
  unsure (1)..(798): unsure at all n locations
  Clone ID: MRT4577_138468C.1
ctcgaggccggccgggctgctacttcaccctcttcatgccggattcgtcaagggcaacaacttgacctggtctcagattctcaagttccccaatgttggggcctcccgcttcgactgtggcttcaagcctctcgagctcaccatctccgatgcatccatcttcatgaagcaggttggattccgtcgcgctgagctccagtttctcaaggatgctgccgatggcgagggtggcaagggcgtcaagaccctccactggagtgtcaagcagaacccccagagggccttgaacctgacccacgagtacctcaacgtgtggcacgaggccgctgatttcagcagcaaccagatccaattccaggccggaaccctcattggcaagagcgatgccgacaagagcagcttcaagattcttgaccgcaccaacaagcagctctgggctacccccatcgacttcaccaactggcaaaactttgctatcactctcgactacgttaagaacgaggttaccatcttctacagcaagggaaagagtgccctcaagaaggtcgccggccccatcagcgctgacctctctggtggcggccagtaccactgcggtatgctcaagaagcctactggtacttctgatgttgccaatgctggtttccaggagtctcctcttgacgagagccagatctacggtggtctcttccttgaggactcttccaacggctgtgtttctctnctaatcagccgttgcctcctggtaacaccgggagcttgggggctctacatggacatggacagtgaacaatgctg

SEQ ID NO: 42182 - DNA, 419 bp, Zea mays
  Clone ID: MRT4577_138469C.1
tggattcgcccttagtgcgtccgggcgggcgggttccttttccatcggtggcttcggactgtgaaaaccaatctttaccgtacttgaccacaggaaatctaaggtgggctcttaccttgatgagcctgtgtggctgcacaattcttgagccgtataacaacagtgacctttggggcgtttatggggacaaagcatgagggcgcaacagctacgacaactggggctagcaaaccttgctgcctactctcagcaacagaagtttcttgcattcaaccaactaggtggattgaactctgcttcttatttgcaacaacaacaactaccattgagccagctacctgctgcctaccccgaggaatttgttccgttcaaccaactagcagcatggaactctgctgcttatttacaggggcaacaac

SEQ ID NO: 42183 - DNA, 228 bp, Zea mays
  Clone ID: MRT4577_13846C.1
gaaagataggaggaatcactgggtgctacgggtattacataccactcttcacccagtagaggggagcgaataagcacagacaagagacaacgccgcagaggatctggagctgaagcggagccacatccagaacctgctcacgatgaacaccataagaaactagctcgattcaagaaagggaactttttttttggagcctatttttccccctgggccaagatgtgacac

SEQ ID NO: 42184 - DNA, 382 bp, Zea mays
  Clone ID: MRT4577_138470C.1
gcagtacagtgctcgaactggactcgcagatgggttgtctgtttctgaaacaaggacagcgtgatgcagaggagcgcaagagacagccgtggctaatcagctgatgtccatgtgtgagagagtagttggggtggttctcctgcttttcgctcgtggccaaccaccgttcgttgaacctcacaaggatggctgtaacgttttcgttatcctttacctaccacgtcagattgtatgtaaggtttgtcagattgtatgtaaggttgtaccctcctttgatggaggacaaagctaaaacctggttttgattatctaaaaaaaaggagaaactgtccatgctccgccacacaccagtttttgtgaggctgaagcctgaagctactgg

SEQ ID NO: 42185 - DNA, 240 bp, Zea mays
  unsure (1)..(240): unsure at all n locations
  Clone ID: MRT4577_138471C.1
gcaggcagaggcagcagnccgggatactatatcagcgggccgagccgacactccctgccatcataactctctccaccatctcgtgtccttcatcctcggagcgtccgcctccgtcgtcctgctcttctttctcactattgctacaagcggatcgcggttcactgtaatctctaactgttccaacataaccacgggctttgacgaccatactcccgtccagtctgctccttttaccctttc

SEQ ID NO: 42186 - DNA, 296 bp, Zea mays
  Clone ID: MRT4577_138472C.1
cagccttaatggacacgaattcgatttcatccatgatgttaataaaaaacacaatgagtttgtgggtaactggaacaaaaacgcggtgcatgtcaacctgtttgagacccctgtggaggctcagtacgtgagattgtaccccacgagctgccacacggcctgcactctgcgctttgagctactgggctgtgagctgaacggatgcgccaatcccctgggcctgaagaataacagcatccctgacaagcagatcacggcctccaggagctacaagacctgggggttgcatctcttca

SEQ ID NO: 42187 - DNA, 802 bp, Zea mays
  Clone ID: MRT4577_138473C.1
ccggccgggacggcgtttgtttacggcctacggcacaacgcgcggtggtggtatggcctgcctgcctgctcatggtgtgcgcgatctgcttcgtgccccgcgcgcggcgccaggccggcagcccgcgtgatctgctcggggagggtggcgtaggccgtggcttccgtcggcacccgccttgggacgcgtggcgcccggtcgggctcagctccccctcgccaccgcaaccggccgccggggtctccgccccgtcccaaattttgaaggcagcgaggctcgatcgtgtcgcgggccgggagggacgctcatgcagatgcagtgacgagccagccggccggcggggcgcacgcgtgtgcctgcacggaaacgggagacgcctgccccgtcgcgcgcggcagggggttccctccttcctctggtatgccggtcggctgcctaccggcctcgtagtttgccggctgctgctgatccgcggtcgtgcctgccttttctcattctcatcgtccgcggcggtgccagccgcgcgtgcgtgttcgggaggtggtggaatgctgctgcgttggaagcgggatttcgggggctccgaaccacccgtgtcgcttgcattcgttggaaccaggagcagtggtagaggcggcaatgaccaattcctaatccaatggcttttaggttcaaaattcatccatatgatccagtaatcacaaaactattataactataactatattattactaatggccgaaaggttaagttctgggaagacaatttggtggggtcttctagtcttgccatttcatattg

SEQ ID NO: 42188 - DNA, 737 bp, Zea mays
  Clone ID: MRT4577_138474C.1
gccggccggtttgggatctcttccagtcttcctacgctcctgtcggcgcgtcctccgcatcccggtgaccggtgttctccgatttgggggggcgtcccttgcacgctccggtctgctgttcctccgccctccggagtcctatccagaggagcgcgctacggcacagatcgcccgccgtccatccctttcccagctctccagagcctccgccgccgcgtccgataactgcataaggccgagctcatgcaaaatggtgctatgccagggcgtatctgttggaaatgctcagttgctagcttttcctggtagatcatcaagccttaagagcacccagtttcttgttaaaacgaatcattttcctgcaagagctctacgtgttggtactgattctattcatcatgccatgcctacatcatccccaagggaaaattctgtcaggggaatcccatcactatcaagacagcacaatcagcatccaaggtccgttagttgtcagacatcctcactggcatctttcagctaccctgagctgacatccaaacccagatggtggtggagaactctagcttgtgtgccgtacttgctgccactgcacaacatgtggtcttatgctgacgtgatctaccagctgcacacttatttgcaggggttttctctgttgtacaccttcatcgataccatgactctgtgtcctgggtggctctttctggtgatatttatgacagtgtacttcttcg

SEQ ID NO: 42189 - DNA, 201 bp, Zea mays
  Clone ID: MRT4577_138475C.1
gccgtggcctgcgccggcgatattttccgtggccgggaccgggagcaggggacaaggcggggcaaactgcgcaagggacctgcatgctgtacgtgcacgccgggaccaaccctttcgaccaccataattaaggcggtcaaggtggtggaaaggcacatgcaaactttccataacaggaagaaaaaaaagctgccgtcgttc

SEQ ID NO: 42190 - DNA, 658 bp, Zea mays
  unsure (1)..(658): unsure at all n locations
  Clone ID: MRT4577_138476C.1
tgggaccctcgaggccggccgggagttcttgccgcggcggcgcggcctctccattccggtgtgttctccgatttgggggacgtcccttgcccgctccggagtccggtccagcggagccagctacggcacagatcggcttccgtccgccccttcccatctcaccagactctgcaccgccgcggtgatcgtgcctcggctgcttcctagctggcactgattccattcatcatggcatgtctacatcattcccaagggagaattctctcaagggcatcccatcactatcagggcagcataatcagcatccaaggtccgttagttgttgggcagcctcgctggcatctttcagctaccctgagctgacatccaaacccagatggtggtggagaactctagcttgtgtgccgtacttgctgccactgcacaacatgtggtcttatgccgacgtgatctaccagctgcacacttacttgcaggggttttcgctgttgtacaccttcatcgacaccatgactctgtgccctgngtggctctttctggtgatatttatgacggtgtacttcttcgttgtgaggcgcaagtggtcgccgcactttctgaggntccatgtgatcctagcgatccttctagacactggctcccaagcagtgggcaccat

SEQ ID NO: 42191 - DNA, 243 bp, Zea mays
  Clone ID: MRT4577_138477C.1
aaaaaaaattttaaaaaaatatatatctaaagaaagtctcccctaaaaatcttatgcttacttcccttcttaaaaaccccttttcttataccattctcaaagctccccaaaaacctcttaatcaaactaccaaaaattatccttagaatcttcaacgccagatagataaactttataagttacaaagacaagaatttccattacagataccatctctatacaatcttaagctaaaacttcaaa

SEQ ID NO: 42192 - DNA, 2032 bp, Zea mays
  Clone ID: MRT4577_138478C.1
ttttccaaaaaaaaaaaaaaaaaaaaaccttaccctatctcttccagtcttcctacgctcctgtcggcgcgtcctccgcatcccggtgaccggtgttctccgatttggggggcgtcccttgcacgctccggtctgctgttcctccgccctccggagtcctatccagaggagcgcgctacggcacagatcgcccgccgtccatccctttcccagctctccagagcctccgccgccgcgtccggtgagcacatttcgaccggtttccaggtagtcacgtaccgcacctgtgcctctctctatcctctcctcgccgtatgcctcttggcgatttctattagtttttcattgtcacttagtttaagtcagctgctggtctgttctcgctgtctttccataattctctggtaggtccatggcttcagctattagctctgaaatattctacatcacttcggtttggtgtccaacagttccagtatgcttgtcgaactgatgaactaagactagtctctgtggtggtttcacgagaggattatgggcattaaatatgttgatgtggcatattattaacgaagagagataaggtaaaaagttttatcgaatgaaatgagttccacgggcgatgaaacttatgtgcactgcttctaacatatcggagtcttgggaacattgacataaaatccccactgaaactggcctaataaataagctaatctgtgttgggtttgcgtcctgtactgctacatgatttcagtgccagaccaaatactcagttcgatcacttgtatgcgcagataactgcataaggccgaactcatgcaaaatggtgctatgccagggcgtatctgttggaaatgctcagttgctagcttttcctggtagatcatcaagccttaagagcacccagtttcatgttaaaacgaatcattttcctgcaagagctctacgtgttggtactgattatattcatcatgccatgcctacatcatccccaagggaaaattctgtcaggggaatcccatcactatcaagacagcacaatcagcatccaaggtccgttagttgtcaggcatcctcactggcatctttcagctaccctgagctgacatccaaacccagatggtggtggagaactctagcttgtgtgccgtacttgctgccactgcacaacatgtggtcttatgctgacgtgatctaccagctgcacacttatttgcaggggttttctctgttgtacaccttcatcgataccatgactctgtgtcctgggtggctcttcctggtgatatttatgacagtgtacttcttcgttgtgaggcggaagtggtcgccgcactttctgaggttccatgtgatcctagcaatccttctggacactggctcccaagcagtggccaccatgtgtacatggatgccaagcatcgtttatcaggggaagccaatgcagtacctctggatgtctattgcattcatacagatcttcacagtgctcgagtgtttgcggtgtgctctttgtggaatgtatcctaatgtcccattcatatcccatactgctttcattcactctgatctaaatctgttcagataggtgtttataaggtccgggattcaagaagggtgatttttttttgaaatggctacttatcataggaccagctggtacaatagcattcgaacaacactgcgattgatttttgttcctaagatgttattcaatgtacgttgactacctgcaaattttgttttgaggggcactactacttgttttatccgaacttggttgagaacttgagatgaagctggaagttgagatgcattaaattgtgcattatatggtgacctgcagctctaagttgagaacttgagatgaagctggaacagaatggaggggttacgaagaaatttgagacttgtactgcctgtgaagtttactctttccatgaggactttgtgaatattttgcctaacaacagtttgggagagtttgggaaaagaacaacagttcattgaatggacatggtccatctgagac

SEQ ID NO: 42193 - DNA, 428 bp, Zea mays
  Clone ID: MRT4577_138479C.1
gcatcccaaaaaggagagggcaccactctaaaacaaaactacaagtttacatgggtccaaaccaatttaacttgacaagggtaactaaacccaacactagatcatgccgcaatcacagcttattgaatttgacgggtaaaataagcaaaagaaaacttattcccaggcatcaactcaaataattggcacaaatcttgacaagaaccaaaacagccatcacctcatgattttggcaaaacaaactgattaaagggcttaaaacttctcaagggcctgcacaaaaacgttcttaaaaaccccaaaaacccccacaccaaagctgaacctgataagggtgtccttgaaccccaaaatgtccccctgctcctttgaatcccaaaaggacaagatggcaggctgaacaattatgctctcacagcccccaaaaa

SEQ ID NO: 42194 - DNA, 215 bp, Zea mays
  Clone ID: MRT4577_13847C.1
cgttccccagagcatatggtacgggccttttcggcccaagtaccttggcccgttcttcgagcagactccgtcgtacctgaccggcgagtttcccggcgactattggtgggacaccgcgggcctcttgggcgacccggagacctttgcgcgcaaaccggagctagaagtgatccacttccggtgggccatgcttggggcccttggctgcgtgttcc

SEQ ID NO: 42195 - DNA, 1494 bp, Zea mays
  Clone ID: MRT4577_138480C.1
ctagttctacgacgctgctgtggccgcggcctgagcctagttcctacgccgcggcggcgcggcctccccattccggtgtgttctccgatttgggggacgtcccttgcccgctccggagtccggtccagcggagccagctacggcacagatcggcttccgtccgccccttcccatctcaccagactctgcaccgccgcggtgatcgtgcctcggctgcttcctagattactgcttcaggccgtgctgatgcaaaatggttctatgtcagggcgtttctgttggaaatgctcagttgctagcttttcctggtagatcatcaagttttaagagcacccagtttcatgttaaaacggatcatttttctgcaagagctctacgtgttggcactgattccattcatcatggcatgtctacatcattcccaagggagaattctctcaagggcatcccatcactatcagggcagcataatcagcatccaaggtccgttagttgtcgggcatcctcgctggcatctttcagctaccctgagctgacatccaaacccagatggtggtggagaactctagcttgtgtgccgtacttgctgccactgcacaacatgtggtcttatgccgacgtgatctaccagctgcacacttacttgcaggggttttcgctgttgtacaccttcatcgacaccatgactctgtgccctgggtggctctttctggtgatatttatgacggtgtacttcttcgttgtgaggcggaagtggtcgccgcactttctgaggttccatgtgatcctagcgatccttctagacactggctcccaagcagtggccaccatgtgtacctggatgccaagcatcgtttatcaggggaagccaatgcagtacttctggatgtctatcgcgttcatacagatcttcacagtgctcgagtgtttgcgctgcgctctttgtggaatgtatcctaatgtcccattcatatcccacaccgctttcattcactctgatctgaatctgttcaggtaggtgcttactacataaggtccaggactcaaggaaggatttcggaatggctacttacagttgtagagagcgtgttttgttcatattgaagtcctgtgtaattcttatcataggaccagctggtacactagcattcaaacaacactacaattgattttcgttccttggattttattgtttgtacgtttggttacctgcaaattttgtttcgaggggcaacactacttgttctatccgaactatgttccgtttgtacttcaggtgaagctggaagttgaaatgccttaaattgtgcattttatggtgacctgcagctctaagttgagaacttgagatgaagctggaacagaatggaggggttacgaagaaattttgagacttgtactgcctgtgaagtttactctttccatgaggactttgtgaatattttgcctaacaacagtttggtagagtttgggaaagaaaaaaaaaaaaaaaaa

SEQ ID NO: 42196 - DNA, 446 bp, Zea mays
  Clone ID: MRT4577_138481C.1
ggaccggaaaaaaaagactatgcatgctattattttaatttgcttccgacgagcagcagggcagggcaggtaaacaggcgttcgatcttcgtcttcagttcgtcggcggggaggtcgcccgcaccgtgccgctagtagtagtagcctttgcatcagcaccttttggaggcgtcgtcggggtgggggccttctccctcgccaggtcggttttggcctctgaaccctcggggaaaatcttcaagacctcttctggggacttggtttccaagatcgtcaaagcttgcttcctggcatgctcgatttgcttggaggacaaggtgggcgcttccacgaggccgccatccgagaggtagtaggagcaatccaagctgtccatggagtcctgcctcccaaccgagctcatctcctggaccggccggtcgtccctggactagagagagagagag

SEQ ID NO: 42197 - DNA, 472 bp, Zea mays
  Clone ID: MRT4577_138482C.1
ccggccgggatatgactcttcctgagctggtactactggtcgatgatgctctgttgcgcttgctgctccgagactcctatctactacccaaatccacatcggacacatggccagagaaggaatggccgtatacccgcctatgtcctaccctaacactgcaggctacatgcaccttccgaactctcgcgccggtgatgctgtcacaatgcgagatccacgcgctgtatgtcggggactctgccttgaacttactcgacagctgtctcggctgctgaaatccccacccttgggaacatgtgtcctgaacataactgcatgtctgcatttgcttgtatagacactcgattatcggttcatgaaagtttaattccaatattttggtcgccgactctaagaatgatgataccgacactgtcaatgtcaaggttttgttccacttcagctggattgaaatgccctgttgcactactcg

SEQ ID NO: 42198 - DNA, 1531 bp, Zea mays
  Clone ID: MRT4577_138483C.1
ttgggtacctcgaggccggccgggatcggcgtcgccatctccggagtgccacgcctaggagctattctctctagtactgcggcgacttcactccaagcctcccccttcagcgatcagcacacatcacgtaaagcgcaaccaaatgatttccaccaccgtcgctgctcaccccgccaccgtcacagcgctgcggcgaaggtacccgcttcgccctcgccagccactctgtgctccaatcttcacggcggcgacgaggcagtgcatggctacggcgaagccctcggtcacaaacgcgctcgctaacctatccgttgagagcgcccccgcggcgcttcccaagctttcgttcccgatactggtgaatagttgcactgggaaaatggggaaggctgttgctgaagcagctgtctcggctggtcttcagttagttcctgtatcattcagtgccattgaggtccctgatcgaaagattgaaatatgtgatagagaaatttttattcatgacccatctgaaagtgaaaaaattctgcctaccattgttaaagaatacccaaatgtcatagttgtagattacactgtgcctgatgctgttaatgcaaatgctgaactctattgcaaatttggtttgccatttgtaatgggcacaactggtggaaataggcaactcttgcacaaaactgtgcatgatgcgaatatctacgctgtgatatcccctcagatggggaagcaggttgttgcttttcttgctgccatggaaattatgtcagagcaatttcctggtgcattttcaggttacaagctggaggtcatggagtctcatcaagcaacaaaattggacatttctgggactgccaaggctgttatctcttgttttcagaagttgggtgtatcgtttgacatgaatgaggtaaagcaagttagggatcctgaggagcaggtaacgttagtgggtgtcccagaagaacatctcgggggccatgccttccacatgtaccatctcacttcgcctgatgggacagtttcgtttgagttccagcacaatgtatgtggccgttcaatatacgcagaaggaactgttgatgcagctatgtttctctacacaaagattcaatcgggtgcgagcaagaaattgtatgacatgattgatgtcttgagagaagggaacatgagatgaggtccatgttggcgtcagatgagctttcatgtaccaatttgcaagctcaattccaccgtgaattaggttacttttacaatgtacccttcccaatttaccagttaactcactttcagttttgaattggctgcttcaatgatggaaggtactccgttccagagtgtatgcaattttagtttctctaggtatattgattttggcgttttgctatacacctatatgcaatctatagattgtagtaaaaaaaatgtattcagaaaggccagaatgatctacaatttgaaacggagtaatgcttagggacttaatgctttgagtcacgtccagccaaggatgctcgctcaatttattaacttt

SEQ ID NO: 42199 - DNA, 281 bp, Zea mays
  Clone ID: MRT4577_138484C.1
cggacgcgtgggccgcggcgccgtcgtgccctgcggtgggaagcctggaaaccacgtcggacgttgatctcccgtgggacgctccagattaggaaatagtgtacccattcgtggagctcccgggaaccgtctgatggcggttgatcagataggattagatgttgggtactgtttcatctgatgggattgtgaccgtggatccacgggcggacgggcccgatgcgatctggttgtaattaaagccgaacaatagatccttaatcctgtggtcgtcattgtgc

SEQ ID NO: 42200 - DNA, 274 bp, Zea mays
  Clone ID: MRT4577_138485C.1
gtcgcgctgtcctctcctctgcaccgactctgtcctgcggaaccatggccagcccgctgcgctccttgatgctactgctggccgtcctggccgtggcctgggccggaacctccaggccacccccgcgattgttgggagctccgcaggagtagatgccagcgaggagggcgtgcagcgagcgttggacttcgccgtaagcgagtacaacaagggcagcaacgatgcgtaccacagccgcgccatacaggtggtaagacctcgtaagcatcttgtg

SEQ ID NO: 42201 - DNA, 464 bp, Zea mays
  Clone ID: MRT4577_138486C.1
gtacgtccgaccacaccttctaggaaacccattcgaccctgaaagcgaacaccttcacccactctactcctggcctcattttactataaaatctcaaaccctgatcatctacatccagcccttacatcacttaaactattctgatattttttcatgctggggcatacaacatccttgacgtaccaactcaaaaacaccaatgctcctctcacctatggcaggcaacaacactactgaaacaaaatcatgatctctatgcaacaaactcaaacgacattctctcaataaaataacaaactctttcacatctcacacatttctaaattgtgattacactgcacagattgctaattatacatgctactggaagctagaacatctactctacaagatttgtgctatacgacataaccctgaacatataactgatgatactcagcgagctaactacatattaggaacta

SEQ ID NO: 42202 - DNA, 143 bp, Zea mays
  unsure (1)..(143): unsure at all n locations
  Clone ID: MRT4577_138487C.1
gcggtgatgtactcctactacctctcctgcatcgtcngcctgctctggcccgggcggtggaagctcgccgtcacggagcttcatatcgcgcagttgctcttcagcttcgcggcctccgtggtgattcttttgcttcacttcac

SEQ ID NO: 42203 - DNA, 433 bp, Zea mays
  Clone ID: MRT4577_138488C.1
gaagaatcttggtaaagtcgacgtgtgttctgattcagatgagtacttattaggccatgatgatgatgatgatgtattggatgttgaaagtgaaaatccagatgacatcttagatgactgttctatttcagatgattctgagatggatttaggggatgcagatgcagatgaattttgcagagactgagttggtggcatgtgtgtagcataaaagaacaaaaaaaaaagttgtgttaagtttgcttatgaaaacaaagttcagcaataactgtttgtgactttaagctcaggatataattgtgtactatactctagctgctgtcatctatggagttccaagtaacacttgaggcggactgtattcttctctcgtcagttgtatttggactttcaaatattagtcaaagctcaaacagatcacaatgatttgaaa

SEQ ID NO: 42204 - DNA, 2439 bp, Zea mays
  Clone ID: MRT4577_138489C.1
tgtgtacctcgaggccggccgggaccggcacgcccaccagagtagggagacgcaggacgcacagagcgacagaggagggagacctcgcccggtcgctccaccctcgcccacatcacttcgtctctctggtcgcatcccaccccacacccctcctctcccatctccgctcgatctcccattcttcctcgtctccgccgccgtctgccccacctccaaccaacgcccaacgatcagtattccagaagcttccccggcaaccttcgtccccgtcccggatccggggcgcccctgatgcggtgcccgcgcggcgcgatcgcgtgacggacggccgccatggatcccccaggccgcggcgaccaaggcgaggcgccgcagccgctggagtggcggttcgctcaggtcttcggcgaacgtgccgcgggcgaagacgtccaggaagttgacatcatatctgcaattgaatttgacaaatctggtgaccatcttgccactggggataaaggaggacgtgtggttttatttgaaaggacagatgttcgggataatgccagccagagagaactggagagacaagatgttccagttactagacacccagagttccgctacaaaactgaatttcagagtcatgaacctgagtttgactacctcaaaagtttggaaatagaggaaaaggtcaacaggatcaagtggtgccagacagccaacaatgctctctcccttttgtctacaaatgataaaacaataaaatactggaaggttcaagagaagaaagtaaaacgatttgcagtcatgaatttggacagttcccaaagtgcaggaagtagtaccactgctattgcaagtaccagtagttctaaggcacctcttccaaatggtggatgctctgatatgcttggttgcctgaataatgatctcacatttcctcctggaggctacccatcactgcgtttgccagttgttaccagtctagaagcaaaccctgttgctagatgtcgacgtgtatttgctcatgctcacgattaccatataaattctatttcaaataatagtgatggtgagacattcatatcagcagatgatctccgaataaatttatggaacttggaaataaacagccagagctttaacattgttgatgtgaagcctacaaacatggaagatctaacagaggtgattacatgtgcggagttccatccatcccattgtaatacactggcctatagtagttcaaagggttctatccgacttattgatctgcgtcaatcagcactgtgtgacaaccattcaaaaatatttgaggaacatgaagcacctggatcaagatccttctttacagaaattattgcatcaatttctgatataaagttttcaaggaatggcaaatatattcttagccgtgattatatgacgctcaagctatgggatctaaacatgaattcaggccctgtttcaaccttccaagtccatgaacatttaagacctaagctctgtgatctgtacgagaatgactcaattttcgacaagtttgagtgctgtcttagtggggatggacttcgtgttgcaactggttcttatggtaatatatttcgtgttttcggtcgtcctccgggaagcatagaggcaacaactttggaagcaagtaggaacccaatgaggcgtcagattgcaaatccagcaaggcccacacggacactaacttcttttgcccgtggtgttcggagaggtggagaaaatcaaggcgttgatgctaatgggaattcactcgacttctcaacgaagctgctccacctcgcatggcacccgaccgagaattctattgcatgtgctgctgcaaatagcttgtatatgtattatgcgtagagaatgccctacagaaaatttgttttttttgtggcttgctctcggcgaaggcccagggcccttcaactgcaaccagagagatggtgcaggacattgttgtcagttcaccccttggggccagaagccgctgatgtccacaagatcaccaatgctgtgctaacagactgcgccctgttgattctttagtacatgtgtaaattataattctaaacatgggaagttttgatccaaatattcaatcgtggcagttgtattgggagtcggtggaagggacatatcgaagataaaattctgtattggatttgcaggacatgcattgcaatggtgtagtatgactggcaatccttatcatgtaataccacctagacagggataatgttgtttaatgtcagaaaatgatagatatttcccagttattgtcgttactcatcatagttatccttctattagttgtactgttaaaataaggcagcaccgttataattgtgctttttctttttctgaatgccttttgtacactgaggttttcgcaagaaaggaattcacggaattaatgcaaaaaaaaaaaaaaaaaaa

SEQ ID NO: 42205 - DNA, 557 bp, Zea mays
  Clone ID: MRT4577_138490C.1
ggggttttgtttttttttttttttttttttttttttttttttttttttttttttttttttttttttttttttttttttttttttttttttttttttggacaaagaacacaattattccttggggatggaacaaaagtttacaaaagggggggggggggaaaccagggggcgcccacatgcatccggacaccaaaaggggaccgggggggccccccttacttgccggggacaaaattgggggggtaggcccaaacgttgttgttgacgggggcggcaatgggggcaaggaggttttcaagcgggcccttcccggggacaaaggcccggacaaaaaatcccaacatggaaaacatggggagggggccggtcttgagccccttgaccttgaacccggaaaaagccccgggggcctcgggaaggcccaacgggtcaaaactgccccccgggtaaaaggggtcaacaacctccccaagggggcccccggggatgcggtaaccctcgacggggcccatgagcaccacctggcaggcccaaaagaaaggatgctctgcgcgggg

SEQ ID NO: 42206 - DNA, 277 bp, Zea mays
  unsure (1)..(277): unsure at all n locations
  Clone ID: MRT4577_138491C.1
gggggccgggccgaaggggcacggagagcgtgcccatggttggcagctccatgagcagagacggcgactgcgggagcgcggacgcctccaactattccacacaaagaacaaggcgaggcactaagagggccagccagaagcgcctaatgagagcactagctcacattaactggggcgcgctcactgccctcccttcagnggggaaaccgggcgggccacctgcactaaggaggcggccaacgcgcgcccgagaggcgggcagcgtanagggcgctca

SEQ ID NO: 42207 - DNA, 410 bp, Zea mays
  Clone ID: MRT4577_138493C.1
aaaaagaacccccttttcttttattaacaatgcacagggtttggggatttcacctccctgggaaaaaaaacattttacccatttttttttggggaaaccccccttttatcaggggttctattttatcaaaacccccaagggggttttgattccctgtaaaaaaccccaaaaaacatggggatgaaacccagggtttctattacccaaagggaaaagcccaaggggccctaaagccctacctcaatgccctgcccaagggtacgccaaaaaaaaagtctcgcccacacaaggatccgaatatttgaattttcgcatagggggatttctttcccttaggggctgaagaaggatttaccaccctccccggcgattaaaaaccttcattggattaagaacacccgggaaccttt

SEQ ID NO: 42208 - DNA, 799 bp, Zea mays
  Clone ID: MRT4577_138494C.1
gaaaatctcgttaaatctatcaaatattttgaaattacgcgggtcatgatgaatcagcaggctgttgttgcaaataaagtcgatcatcatgaatcaaggttctgtttattaaaagaacaatgtaaacaccttgcaaaagaaggcaatcttttaagaaagaaggccttacgatacaaagagatatctgagacaagagactctaatcttcagaaagctgaacttgaggtggatttgcttggtgatgaggttgaggccttaacggatcttcttgcaaaaatctatactgcacttgatcactattctccagtactgcaacactacaccggcgttatggagaccttgagcatgattaagaagcacattagcatggcgaagtaaaatgcttctggtcggcttgacactgtagaattgtaggtttgacagcaggcttccagtggtttgacataagtttgtagaattgtagatggcagcaagcttttgtttccgactcaaggactaggtgattacccccttttgcaggcagagtagtggtcttggtagcttttgagcactctgtaaatgacccaacccaaccgtagctattagttcttgtgcttggcttttgatgctatggcctatgggctttgccacctgctatgctgggttgcaaaggtgaactcttgtaacattggtagccgagaggatgttagagaagctgagttttcatgtggatctttattttttcctggcacaatggtagataaatctacactatagcctggcgttcaggcatagtagtatttagatttgatatcctctg

SEQ ID NO: 42209 - DNA, 816 bp, Zea mays
  Clone ID: MRT4577_138495C.1
acgaccgcgagcagaaatccctaacctgtcccgacccaactcgccgccgccgccgccgccgccgccgtcgccaaggaaccctagcgtgttgatggcatcgacggaggagcaagtcttccttgaatcgaggaacctgtcatatgatggcgcccaccaccccgacgcctgcaccgactgggattacccggaagacccaggcgaccggcggaacggggtggaggttgccgagctccatgaccagccggcgcgcatgagcacctcagattcagatccatgtgaagtcgccaggcgtgccttggacctcatgttcccgcgggaggaggacagcgatgactgctggagcacctggagcgcacgggagaagggcagtgatgacgacgatgaacaaggaggggaagaaggcgatggtagcacacaggagagcagcgattatgaagacgacggccgcaattgccaagtgatactagccgagacaaactgtccaggaaagctctaccccgagagccaagcagaggccatagatgacaaatgggtacataggtactcccaacagcttacagaacacgagaagctgtgcagggagattatggctctgcgagatgatgaagatgatgatgatgaggaggaggaggagaaggatgatgatgctccttgccccgtctatcccatgagagtgttccctgacgcaacaggtgcctgtgtccttgggctcaagtgccaccatcgtatctacaggacccatgacacttccaccaccccatcaactcttggaaagcgcacaccaagttatatgctacaattattctgcatgcgtct

SEQ ID NO: 42210 - DNA, 464 bp, Zea mays
  Clone ID: MRT4577_138496C.1
aagcagggagcctccagagcggccgcccccccccaataaacgcccccaacggccccccacacccggggggaaaggtggagcgcgaggcggagaacaccccacacaacaagacaaccacaccaccacaaccaccacagccaacaacacccaaagaacaacaccgcccagcaaacacgaggcaccaaagacgaccaaaacccaaacccaccaaagacccaacaagagcacccaaaccgagaaccgcccagccccgagcgcaaccacagccgccgccccagagcaagaacgccccacaccccagccagccaccaaagcaaacaagcaaacccgcccccagagccaaaaagggcaggaggaccaaacacgccgcacacaaggcacgcgccaagaaaaagaacacccccgcggtaaccaaagcccccgcggagcaaagccccccaaacccaccaaccccgcgaccgggg

SEQ ID NO: 42211 - DNA, 522 bp, Zea mays
  Clone ID: MRT4577_138497C.1
ggcgtgtttcccggcagcacagatcttgcctaccagcaggcgatttatgttgccgccgacatcatagattgcacggggcgggtgtcgaaagacggaacggccttctgcaagcactccgctgacatctccagctccacgaccgcgtccgtcgctttcgcgtccaaagcctccaccgtccacgagatccagaacaagtctggcatcttctcgttcgatctgtcgtggagcgagatcgcaaccttgaagcccagcatcatctcccccttcgctcaggcaggcatgttaagaaatcctgcagcgaagaatgccggcaagctgatgactttgcccgaattcttagacttggccaaggccagcaacatcaccggtatactgatcgaaatagagcatgcttcctacctcgccaagagagggatcggcgtggtggaagcggtgtccagcgcgctgaccaaggcgggctacgacaaggagaccaagcagcaggtgttcatccagtccgatgactcgtctgtgctcgcggcg

SEQ ID NO: 42212 - DNA, 202 bp, Zea mays
  Clone ID: MRT4577_138498C.1
gaatgttaaatacaatatatctatgatcgttcacaagtgtatggtttgaacatttctacctgtaacgttttgaacattttttctactaagagacgttggcacccaacgacacttatagacaacaatatattcttttgtattcacacccatacgagggcatttaggcaacatgtctaataagttttttaacctaacatgtaat

SEQ ID NO: 42213 - DNA, 1277 bp, Zea mays
  Clone ID: MRT4577_138499C.1
gagcgagggaggagggggaaaccgaagatgctcctactgcgcggcgccagggcggcgtcggcgtgggcggcatccaccgcggtgtccgcaggcgccagcagcagcaggtccatatccattcggctggcccccgtcgccgcattgtcctcgggcggaaggaagaggaagggccagcggcggggcgaggccaagcccccgagcccaccgccgccgccgccgcccctgcctcggcagggcgagaccccgagcagcaagaagaagtccggcgcgaggccgtcgggcgagggcaagaagagccgcttggtggagctggaagaagcgcgcggcccgcggagggcggagggcggcgaggcgaggaaggggaatacgcagcagcagcaagagaaggcgaaggcgaaaaggctggtgaagtggaagtgcgcgagcgggtgcggtgcgtgttgcaagctagacaaggggcccgacttccctattcccgacgagatcttcgccgaccatcccgatgacctccagctgtacaggagtatgatcggctctgatggatggtgcattaactacgacaaggccacccgcacctgcaacatctaccaagaccgaccttccttctgcagggtggaaccaaagatttttgatgaattatttggcgtgccacgcagcagatttgaccgggaagcttgcagtgcttgtgtggataccatcaagatggtgtatggtgatgactctgctgaactcagtaatttcaagcgtgtgataagggaggaaagtaacaagctggaaagcaagaaccaagataaattgttggatgcatagatcctgcatggatctgcaatagaatctacagcacaccacattatatgcgaaggtaaaattgagaagtgaacaatgctcttaggttaaggtggaaaatggaacatcttgagggaaatactcagtgcaagcttcagttctgaacacgtccttgattcttttagtcaagcttggtgtgttcagaagtctgtggtgttttttttgtatatatagaaaattgttagcaggcaagagcatttcagttgattttgttggtcccagacttatcatttgattgcggtcctagtacttgaatttttgctgcgtgcctaaagtcgtatgcctatttcatctgtactatcagagaaatgctagttcttttaatcaacaacagttttttttgtctcaaaaaaaaaaaaaaaaaaaaaaaaaaaaaaccaaagacaaaaagctgaaaacgacaagggggcggccctccactagtgagctgc

SEQ ID NO: 42214 - DNA, 301 bp, Zea mays
  Clone ID: MRT4577_13849C.1
tcctcgcccccatggtacgcggcgttctttttataaacgggctaccggccccatctattctcctttctcttcctcttcctgcctgtgatttgttaggccaactctcccaacttcccgcatgcccacaagaataatctttcctacccgattctgtagatcaatgttcataagctcgtcctcaatatctccttccgatagagctacgaccgtctcaccctctccacaaatgttctctatcatttcatcattcatacccccgtcttctccaaatctatgtacactgatctgtctttctacatcc

SEQ ID NO: 42215 - DNA, 431 bp, Zea mays
  Clone ID: MRT4577_1384C.1
ggacatttgggctgatttatgtgcttggggaactttggtaggtaaagtgaaagtacttgtgtgagaggtgctgtgcgccttccgtcctgcttctatgcgttgcggtttccttgtcctttttgcacttgtttgcttcgcctttgttttgagtgaattggtggtggtggaggtgacgtagtatgagttgcggtggttcggtgtcgagtttgttgttggggtcggggtgggtttcgtctttattattgctgatgaggtacctacggagtggagtacgagtcctgctaaggtgtcctaggagtctaagaattcgtgtttgtagtctcatctggttcatgagcatcgtgagaagcttcattcctgtagtgaatagaagttagcggcgtcggataatacgaaagaccatgtcgctagggtttcggctaatgtcgctg

SEQ ID NO: 42216 - DNA, 706 bp, Zea mays
  unsure (1)..(706): unsure at all n locations
  Clone ID: MRT4577_138500C.1
ctcctgcagggttttatctcttctcgcgttgcccaccaccctagactcctctcccccctcacactccctcccatctccgccgccgccgccgctcgcctcgcaagatggcggtgcctatcctgaagacggcgatcgtgaagaagagggtgaagcacttcaagagggcgcacagcgaccgctacatcggcctcaagcaaagctggcgcaggccaaagggtatcgactcccgcgtcaggcggaagttcaagggatgcaccttgatgcccaacattggatatggttctaacaagaagaccaggcactacctgcccaacaagttcaagaagtttgtggtgcacaacgtctctgagctggagctgctaatgatgcacaacaggacgtactgtgctgagatcgcgcacaacgtgtccacgcagaagcgcaaggcgatagtggagcgtgccgcccagctcgacgtcgtggtcaccaacaagctcgccaggctccgcagccaggaggacgagtgaaatgtttcgaacagtagcgcttttggatcgttttgctccctgtagtagacttaatgccgaatctggagttttcttctctgttcgcctcgttgattcgacgctgttgaacatcttgctatcgatgctggtcatgttatcgtactataagcatggtcgactttgatgtngaagtgcggatcgcctttaattatcagctatgc

SEQ ID NO: 42217 - DNA, 142 bp, Zea mays
  Clone ID: MRT4577_138501C.1
acttcattaatatccctcgaacgtgtaagagagcgagcattacatggagtacgtacataatactactgggaaggatgtacaccgttctaaacagtcagaaacaacacgcattttaaaatgtgccaaaagtaagtgatagaac

SEQ ID NO: 42218 - DNA, 621 bp, Zea mays
  Clone ID: MRT4577_138502C.1
aggcttctccctccccctacgccgccgccgccgcccgcccgcccgctccgccgcagttctcccaagatggcggtgcctctgctgaaggaggcgatcgtgaagaagagggtgaagcacttcaagagggcgcacagcgaccgctacatcggcctcaagcaaagctggcgtaggccaaagggtatcgactcccgtgtcaggcggaagttcaagggatgcaccttgatgcccaacatcgggtacggttcagacaagaagacaaggcactacctgcccaacaagttcaagaagttcgttgtccactatgtctctgagctggagctgctcatgatgcacaacaggacctactgtgccgagatcgcacacaacgtgtccacccagaagcgcaaggcgatcgtggagcgtgctgcgcagctcgacgtcgtggtcaccaacaagcttgctaggctccgcagccaggaggacgagtaaagcattatctagtcaactagtcttggttgctacctttgtagtagacattgcatccctgtttgagaagaaaaatactgccattttgcaagatttcatgtatggaccgcctttttggtgtgagcaatggtgaaatgtactatctggttttgtcac

SEQ ID NO: 42219 - DNA, 390 bp, Zea mays
  Clone ID: MRT4577_138503C.1
tttcttatttctgggaagccacaaacatcagacaaaaactttttttttggacttttacctattagaaattttaaagaagggcccccccatggttgggtggttgttgaacagttgttgggttggcaaaaccaggtggttggatgggcaccattggtggcgttggtaaaagggggccagggttgggcccacgggcctgttgaaccggcaccaccgggggttggttaagaaaggtgccaggcttacaaccacttacttggtggatgggtattggtggtggttgtggaaattaaccagaaaagtcaatggttgcaagtgggtggatgggaaaaattggttgggggtgggcacaagatacttgcttaattggaagttgtggtggttccaattaaa

SEQ ID NO: 42220 - DNA, 354 bp, Zea mays
  Clone ID: MRT4577_138504C.1
ggtctagcattccaggccctaaagtgagtcatattagcgtcggctgaacgctgcgcagtagctcatgacggccgatgtctcgacggccgccatgctctgtgcaccgcgggcgccgtgcctcggcttcaggaatgacatgtatgctgtcctttcatcctattgcctagcgtcactgcatcatctaccgctatgctattaatattctttcaactatcaacaatgtgggtcaggactcacataactctgaagaggatttcaggaccgtcgtcttcaataaccccatgtacgatcatatcatgtcactcaccgtcatgttcgatatctacaacacgctctcaagcattatcccttacc

SEQ ID NO: 42221 - DNA, 577 bp, Zea mays
  Clone ID: MRT4577_138505C.1
ggccgcttttttttttttttttttattttttttttttttttttttttttttttttttttttttttttttttttttttttttttcaccataaaaatcgggaaagggacctttttattttggggggcccacatccatcatccaaaaactttttttttggattcccacctaaaacccaatttaaagggggccccccccaatgttgtgttgttggaaggagccccttggttctgtcaaaccaggtgggccaaagggcaccatttgttgaatttgtaaaagggttggggggttaccccaaaactggtggtaaaaaggcaaaacctgttgttgtgtaaaaaaggaaccccggtttgctgaaattagctggctaaagggaagaagattttgctgccgcaaataaccaggggggttcagggcggccaattggttaaagggaaaaagtttttgttgctaaaattaggcaaaacctacctggctgaagggaaaaagttgtggccgcaaaaaaccagcggggttcagggaaaacagtttgttgaagggaaaaaattgtttttctttacagaaggaaaaaaggtttccc

SEQ ID NO: 42222 - DNA, 409 bp, Zea mays
  Clone ID: MRT4577_138506C.1
acgaacactgctaatgttatacgtaacttccctactcaggctttgaactttgcatttaaggactacttcaagaggttgctcaacttcaagaaggatagggatggctattggaagtggtttgctggcaacctgacctctggtggtgctgctggtgcttcctctttgacttatgggtactcgctggactactcgagaacaaggatggctaatgatgctacagctgccaagggaggaggtgaaaggcagttcaatgggcttgtagatcactaccgtatgacactcaagtctgatggtattgctgagctctaccgtggatttaacatcttctgaggaggaatcattggatatcgcggtctgcactttgcgctctatgactccatcaagccacgaagtacgtactggccacctc

SEQ ID NO: 42223 - DNA, 254 bp, Zea mays
  Clone ID: MRT4577_138507C.1
cccacgcgtccgcccacgcgtccgcgctgttttgtttcagtccatgccagttcagttcatagaagcagaggcccctggtttgattcgggtcgaagcaaacagacggacacgggactgatttgatggattagtgactacaaactccacgctaatctaggtttaagacacggcagcatctctcaaacaaagggttaaggctcgaggctgacatcgctgattcacgtggtgtgacgtggccgtggcagctgggttgc

SEQ ID NO: 42224 - DNA, 495 bp, Zea mays
  Clone ID: MRT4577_138508C.1
cccacgcgtccgcccacgcgtccgcccacgcgtccgcttccattcgaacccctctccatgtccttcaacgagataaattactatgttgacatgcctgcagagatgaagagtcaaggagtaaccgcggataagcttcagctgctgtcagggatatctggggcttttcgacctggtgttctcactgctcttatgggtgtgagtgggtctggaaagactactctcatggacgttttatctggaaggaagactggaggatatattgaaggagaaatttatatatctggttaccctaagaaccaagaaacatttgccagaatatcaggttactgtgaacaaaatgacatccactctccacagatcactataagggagtccctactcttttctgctttcatgcgccttcctaaggaggtcactgaccaagaaaagaagatattcgtggatgaagttatggaactggttgagcttaacggtcttaaggatgctattgtgggt

SEQ ID NO: 42225 - DNA, 536 bp, Zea mays
  Clone ID: MRT4577_138509C.1
ccgccactgtcatgcaattctccaggattcgcccctaagcagtggtaacaacgcagagtacgcgggggtctgctcttataataactctattataattcaagctatttactacatacgttctcaaatatttatcgtccattagtttatttttaaactaaactgtgacaaataaaaaagaatagagagatagtatttaatattgtgtccacttttctctcacaaagagagagtatttaatattgtgagcctttatatgtcacctcctcaagaagccgacgagatattattatattgcatatactcaatccattggaagtaacccttgattcatgccaaaaacgtgttagaaatttaagcaatttcggtagcaatttaattcagaaaagaaaatcaacagacgtgtgacatcagatacgtagatcgtgtgatctaagggtgatgaaaatataggtaatactaagtaacatgaatttgatctaatgaaaaaaaaaaaaaaaaaaaaaaaaaaaaagtactctgcgttgttaccactgctt

SEQ ID NO: 42226 - DNA, 251 bp, Zea mays
  Clone ID: MRT4577_138510C.1
gaagtcatctggccatagactgccataatgatccatttgaagttatctgacttgttacataaatgacatttaataaaaattccccttccacaattaagaacaaaacaaaagattaagttttaacccctaaaaagcatgcccccgatctacccctcggggggagacaatgccagataaagtctacacctccgaaaagtcgtgtcagatttgaatgttacatgtcttgctttcccgtttccatgattgctatg

SEQ ID NO: 42227 - DNA, 135 bp, Zea mays
  Clone ID: MRT4577_138511C.1
agccctccctggggcacggggaaccataacgcgctatgggcgcggcaggcggcaaccagctaagcctggccgaggtgcgcgacacgctggggcggctggaggactccgtggaggtcgggctcaacgagcgcgccc

SEQ ID NO: 42228 - DNA, 282 bp, Zea mays
  Clone ID: MRT4577_138512C.1
cgaggacctggtatctctccgcttatttctctgatgtaagaccaagtgctacagcttacaatgtacaacatcctagcttgcttgcttggatcagcacatgcagaaaatgttctaacagacattaaattaggtaaataccggattgtatacgtaactccagaatactgcacaggtaacatgtgcctgctatagcaacttgaggctgatattggtatcacgctcattgctgtgtatgaggctcactgtatttctgagtggcgcatgattttagtgattcattca

SEQ ID NO: 42229 - DNA, 426 bp, Zea mays
  Clone ID: MRT4577_138514C.1
cagcccacagcagcgggcagaattgggccactaaccattcatgggcgggtaaaccacccgaatggcaaatggttaaagacatatgccccaaaatggccttctaacataaaaagggccaacccaaatagcaaaactttgaaaatgcaaccagaaacaggcccccttgttgtcttgatgggaaatgaccggacaggggcagtttccaaccccccgacgagctgctaaacggtagcgggggagggaaagggtttggttgcccttccagggggctctcctggagggcctgttcttgggggggggggggcccttgccacccaaaccacggtactttttgcctgctggggggaggccacggagctaacggggctgggccacagggttgcatacccaggtgaccctggggccggttttgatggctttgggggc

SEQ ID NO: 42230 - DNA, 379 bp, Zea mays
  Clone ID: MRT4577_138515C.1
aggttcgataataataaaaggccgggaacccaaccggcaaaaaacccttcaatccttggaaattaaaaaaaaacacaaattataaaacaaaaaaacaaacaagaaaaaggcatttggaaatgggctaatgaaggatggcatttactataataatatcgaagttgagattattagcatttactaataagactgcatttttttcattactgaacttgatatatacatgacttttcctctatctgaagctcgacgtaatctgctcgaccaacggagcagaagcatgggttcagaagctcaagtaagtttttttttgcgacctattcccttccctccccttctctggcaggatttcaacgatgcatctggattgctcgttttc

SEQ ID NO: 42231 - DNA, 1241 bp, Zea mays
  Clone ID: MRT4577_138516C.1
cacaaaaggcagaagttcaggtcgataggagaaaaatgaccatgcacgccgccgctacttccttctgaatcttgaccgatctgagctgcgggccgtcgtccaaggcgaaaggagggcagccggcggcggcgccgggctccggcggcgacaggcaggggaggggcaagatcgagatcaagcgcatcgagaacacgacgaaccggcaggtcaccttctgcaagcgccgcaacggcctgctcaagaaggcgtacgagctctcggtgctctgcgacgccgaggtcgcgctcgtcgtcttctccagtaccctcgaggccggccgggacgccaacaacagtgtgaagtccaccattgagaggtacaagaaggccaacagtgacacctccaactctggcacagttgcagaagtcaatgctcagcactaccagcaggagtcctccaagctgcgccaggcgatcgatagcttgcaaaacgcaaacaggaccatagtgggagattcaatccacaccatgggcctcagggagcttaagcagatggagggcaagctggagaaggccataaacaagattagggctagaaagaatgagctcttgtatgctgaagttgaatatatgcaaagaaggatggatctgcagactgacaacatgtacctgaggagcaagatcgccgagaataataatgaaacggggcagccagcgatgaacatgattggagtgccgtcgacgagcgagtacgatcacatggcctcttttgttgactcgagaaactttcttcaggtgaacatgcagcagcagcagcctcagcattactcccatcagctgcaaccaacgaccctccaactcggatgatgaaattaagaatcttcggccaacaatccatgcacgcaagcacgcagtaaatcatgtgtgtccaactcagataaaaaaatctactctagcgtttgtataattattaataatcgtgactagtaaactgttatatatatatgtatagccatgtgtgtggtggcgcctacatatatgtcatgtggctgtacggcgagttttttttttcacaagcgtttgcagcagcatttggtgttgctcatcgatcaattaatcgcaagaaattaaacttgtcaccactgtgggtgtacgtgttaatgcagttgttgtatctgttaattgtaccctccatcagataaacgcgggtgcgcgtatgcatacttatttatgtgtatgattatttgtgtagtttatatcgcc

SEQ ID NO: 42232 - DNA, 828 bp, Zea mays
  Clone ID: MRT4577_138517C.1
aaaagaaagaaaaactcaaatagcccgcggcctcttctccccctctcgccgccccgccccgcccccgccgccttcgcgcgccgcctgccgccgtcgccggcgagatgggagtcaagggtttgacgaagctgctggcggacaacgcgcccaagtcgatgagggagcagaagttcgagagctacttcggccgccgcatcgccgtcgacgccagcatgtgcatctaccagttcctcattgtagttggaaggacagggatggaaacccttacaaacgaagccggtgatgtcaccagtcatttgcaaggcatgttcagccggacaataaggttgctcgaggcaggaattaaaccagtatatgtttttgatggcaagcctcctgaaatgaagaaggacgagcttttaaaaagacacgcaaagaggaatgaagcaacagaagggctgacgaaggcagtagaggcaggagatacggatgcaattgaaaaattcagcaagagaactgtaaaggtcacgaagcagcacaatgatgattgtaagcgtctactaagactgatgggtgttcctgttgtggaggctccttgtgaagcagaatcacaatgtgctgccctttgcaagaatgacaaggtgtatgctgttgcatccgaagatatggactcacttacttttggagctacacggtttgttcgtcatttgatggatccaagttccaggaaaatacctgttatggaatttgaagttgcgaaaattcttgaggagcttcaattcactatggaccaattcattgacttgtgcatcctctgtggatgtgactactgtgatagcattaaaggca

SEQ ID NO: 42233 - DNA, 377 bp, Zea mays
  Clone ID: MRT4577_138518C.1
cggagcacgacctccatagcgccacatgtgaaactacagatcatccagacgagtatctttgaggttgcgctacgtatcgtcgactatttcaagccggagaatgttgccgataaaattgccgcggctgaggcagagcaggatttcctgttgcacgatttgtcgcgtaccgtgcatggtgccgtccgacatatgaagggcaaacatgatttgtcgaccatcctatctggaccgctagccgtccttacgattcctagtgtctcgccggagcatctcaaagccgccctttcgattctcgcacccaaagcatcgggtttttctgcgccttctcgtaaggcgaacccgggatatcatgaattgaccgtgcaggaaggtttaca

SEQ ID NO: 42234 - DNA, 482 bp, Zea mays
  Clone ID: MRT4577_138519C.1
gcggaggctcaccctcgacgtcaacatactcatgctcatcgcagtttccggggcgatagctctcaaggactactccgaggctgggttcatcgtgttcctgttcactacggccgaatggctggagaccagggcgagccacaaggcgactgctgggatgtcgtcgctgatgagcatggcgccacagaaggctgtcgtagcagagacgggggaggtggtggcggctcaggacgtcaaggtgggcacggtgctagccgtcaaagccggggaggtcgtgcccatcgacggcgtggtcgtggacgggcggagcgaggtcgacgagagcaccctcaccggggagtccttcccggtcgccaagcagccggagtcccaggtctgggccggcacgctcaacatcgatggctacatcgctgtcaggacaactgccatggcggacaactctgccgtcgctaagatggcgaggatggttgaagaagcacagaaca

SEQ ID NO: 42235 - DNA, 200 bp, Zea mays
  Clone ID: MRT4577_13851C.1
atttggttaaatactaccacgaggctcagcgtgggggtacacatggcaagcatggacgaggaaacagtatgcaaaaatcggattttccgaccacagacctccccgccctgcgcgcccgcgaatggatctcgcccgacgccctcgccacgcacgtcgtgacctccgccgcgccctgacctcttgcgcaaccctgctccgag

SEQ ID NO: 42236 - DNA, 613 bp, Zea mays
  Clone ID: MRT4577_138520C.1
ataagcacgtgtataacaattagaaaaacagaaataatgttgtgtagctatacaactcagccagtttgtcaacaaactgtcgacagggaaatttgtaatgctgtgggactatatacaagccattcaatttatcaacaaagtgtcaacattactttctccatttactatactgaagaaaaaaattccattcagccatccacctttcggaatctgccagcggaatctggagtctcggacaacaaagtagcaagcaaactcatgtaaataaatgatgaggcgacatctatatataggtgtcataaacgcatagtacaaaagaaaccagtatattcaacagacaaatcataccgagttttatacacagggtatggtttaaactttatggcaacatccaactggttcataaataggtcagcctggatcagtgcatccgtgggttgaaagatttaaagctaggctacagacttgtgacatacatgatgtcatatgttagactcagtgcgtccgtgggttgaaagatttaaagctaggctgcagaatatggaacatatacatacgcgctcaggatcgatggtatgcagcatctgctactgaccaacacgacatcgctact

SEQ ID NO: 42237 - DNA, 296 bp, Zea mays
  unsure (1)..(296): unsure at all n locations
  Clone ID: MRT4577_138521C.1
tcaatcttaaaccacatcattacattcttaaagtttttgaangacaagctgcccaattcatcatctttattcacatctatggatatcccaccaccccgtgtccctctctgtatcttgggttatgttttcattggaatctaccacaccgtcttctactatttcaaacttaggtttatcttctcagtattctcctaattattttgtttggcatcaaccctttcaaattcaaactcttaatttttgtttttattctaccctccatttttgtatttattctactacatttttaattattc

SEQ ID NO: 42238 - DNA, 610 bp, Zea mays
  Clone ID: MRT4577_138522C.1
ctcgatgtccggccgggacacgcatgatacggcggagtgctgttgtgtgattatatattaataccatcgatgttgagcgtgccggcccagacctgggactccggctgcttggcgaccgggaaggactccccggtgagggtgctctcgtcgacctcgctccgcccgtccacgaccacgccgtcgatgggcacgacctccccggctttgacggctagcaccgtgcccaccttgacgtcctgagccgccaccacctcccccgtctctgctacgacagccttctgtggcgccatgctcatcagcgacgacatcccagcagtcgcctacatacgtacgtgacgtgcgtgccaaacagtcatttagaactaagaggtctcaccactatcattacttgttgtgtatgcaaatgcaatgcaagaacaaaactgctgaaaaaagagacggaagcaggtgtctacctaccttgtggctcgccctggtctccagccattcggccgtagtgaacaggaacacgatgaacccagcctcggagtagtccttgagagctatcgcccccggaactgcaagcagaccaaaccgagacagacgttaagcagaacagaaaaacaagcga

SEQ ID NO: 42239 - DNA, 126 bp, Zea mays
  Clone ID: MRT4577_138523C.1
aaactactaccctccaatagggggttttaagaaaaatgcgcataatttgttcacaaaccaattaaacaagcatatcaattagtaaaggctggtaaaagactaactggaaacttatttgtgacattt

SEQ ID NO: 42240 - DNA, 439 bp, Zea mays
  unsure (1)..(439): unsure at all n locations
  Clone ID: MRT4577_138524C.1
gtgacaaatgttcccaaacccgtgctaaggatggtggtactggagaaattaacaaagttcctattgagcatcaagaaaggcgtcttacggagcttggtcagaagatacttgaaatatttgttctatctcatatatttagtgggattgaggttgcctataaagaagctgttgctttgaagaggcaagaggagcttattcgtgaagaggagctccttgagcaagaaatgaaggggaagcgtggcagtgtcgctgaaaaggataagcgttcgaagaaaaaacaggccaaacaaaagaagaacaatcgtaaggttaaggacaaggaaagagaagagagatctggattcaaaatttttagaaaggggtaaagatgtaagcacaaatcatgacgnggaggattctaagcaggtagggcaatctgctgtggaagctgataactttg

SEQ ID NO: 42241 - DNA, 480 bp, Zea mays
  Clone ID: MRT4577_138525C.1
atgctagcggaagacgaaagacggcgcatcgcaccacgcgatggtcgccgcctcacacatacgagagacatcggcagagctactcatcgacatccccctctaccctggtgtcgaatacgatctgacctgacctcgtctgccagctgtcgtgggaggaacaagagagacagagaaacctcacgcatctgtatatgagagcggtgtcgacgatcgaccagtacaagctctcccttcctgcgggatcaacgcgccaggaagaagaacatcatcacccgcttaatgtacgacaagttcgattacacctacctgattaccactgctattgatattgtgtctgagaccatgtactcgtgtaaatagaagtgtgacactccggctctgtgatactgttgaggatgaaagattcgagaaactcattacaagtgatataagagactcttcacttgtctgcaatggaatccaatgttgcctgcactacaa

SEQ ID NO: 42242 - DNA, 334 bp, Zea mays
  unsure (1)..(334): unsure at all n locations
  Clone ID: MRT4577_138526C.1
cccgccgccgccnaatttgccgagncccggccggcgcggcgggcggaggaccagcgcacgncccgagggcaagaaggccccccaccgcgggaacagcagcggcggggngcncagcgccgacgngnccgcgcganacggccggcnccggggnnacaacgcnancnacanangcgggaccgacgagnanggcaccgggggggagacgaaggccanggaggagaagngcacgcccaaggagancggcganaagnaccaggcnanccacaaggaagncnacaaggggnnnaacanaaaagacaagnnngggctggcancnncgccagagcagacagaa

SEQ ID NO: 42243 - DNA, 544 bp, Zea mays
  Clone ID: MRT4577_138527C.1
ccctctcccttgtttccccggccgccgcaccgccgtcgtcctccgccctccggtctccgccgcgacgccaccccgtcaggcatcggtagctgcgttggggtcgcctgactgaggtgccctgaagctgaatcgcacatccacctccggcaactgccggcgagacatggctgcggcggcgaaggaggtggacatgaagaagatggagcttatgaaggaggtaagagcgcaccaagtggcgatcggcgagctcaacaacctgcctccatccagggccgcgtaccagaagacctgcaacatcttctcccgcaaggacatcaaatccgccgtcgcgtcccaacagaagcaacttgacattgccaaggcgaagctgcagaagctggatcaggcatcatgacggttcactgtggaaatttgaaatcgcaacttatgctgcttcattcattcacctccgtgaattctctctcatcaagtgtcttgggagtgctagtcaactaggatgcagcttatatagctttccgtgtaataacggtgtcgtttttacaag

SEQ ID NO: 42244 - DNA, 262 bp, Zea mays
  Clone ID: MRT4577_138528C.1
gagatgcctgcaggctctgggcagatgagggactgtggtcagcagtggacaagttcctactttgcttggagagggaaaggggaactgcagtgtagaggagtagctcaacagcagagctgacactcttaggagcccccaaattctgcttcttggtagagtattctaataaagggctgaggtgaaactcagtggtttgacacttgcctagcacagacaggccgtgggcttggtctggatcctcagccctggaaagtttttgttt

SEQ ID NO: 42245 - DNA, 636 bp, Zea mays
  unsure (1)..(636): unsure at all n locations
  Clone ID: MRT4577_138529C.1
cattgggtacctcgaggccggccgggagccgtattgtcacgactcccgatcgcgagcgagctcgtctgctggatcatgtagacctctgcggcgctctccaccgccgctcatcgcacccagctctactgaggccgcgcttcgctgggtacatctgcgaaaggaattggcctgagcatgggccgtcgagcgcgctccatcgcgaacattcgcgtcgccaaggccggcggtaggcaggcactcatccaccgcggacacgaagnacgccgcgcatactgttagaacactcggacagactgtatngaacactaccatcctccatcaggggccactcttctactgcctcatcgcgcggctgctccgctacctacgctgcctacttcgtccctgccgactccggcaactccggtcacgaaaactacgccgatgatcaggtgcctgatgattcacggtggatcgcttgtgtcctacgcacggtcccaacgatcgcacgatctcctagcgattcagagggtgacctccacgaacctgcggagggagcaccgacaagacgatatctcaactacaggtatctacgttctggtgcactcaccatcttgtgtttgcacgtgctgcaacggcgccatacaacaaaatcat

SEQ ID NO: 42246 - DNA, 515 bp, Zea mays
  Clone ID: MRT4577_13852C.1
tttttttttttttttttttttttttttttttttttttttttttttttttttttttttttctttttttttttttttttttttttttgagattcaagccaccaaaaatatattcataccggcctataacaaattacaagatcagctttgggaatccccaaaaagcatttggtagtagggggggggggcgcccttacatgggactggaacattagactacccacaggtacccagggcggattgggggacggcgtacaaggggggaaccctggatttttaaagacagggtcggatgccctaagaaaatccaacatcccagggggaaaagccccaatgggaccccagggtccaggcccaaggggcggggtttttacgaaccaacaaaaaaacattggttttttggagggggtggaaccaaattcggaacaaaggggggggggaccccttttaaattgggagggttgaaaatgaaaagggggggaggaaacggccctttgggaaacaggattaggaacccc

SEQ ID NO: 42247 - DNA, 328 bp, Zea mays
  Clone ID: MRT4577_138530C.1
gggaggggaataaatccttttgtttagaaaaattttttcgccctccctccgtttttaaatttttcccattcgctggttcatttttaccctaaaccgttccaaataaaaaagaccggggaaggtcctttccaatttatttcccgccggtttttttttcccccgccaggggttcctttttcctttcctaaaccctaaacccctaaattgttttttttttttacagaccaagggcggtttgtcagcaaaaagggccattttccttttgtgatgccctccaagggtccaacattctggtcctttttccaaattttaaaacccaagacccttt

SEQ ID NO: 42248 - DNA, 1232 bp, Zea mays
  unsure (1)..(1232): unsure at all n locations
  Clone ID: MRT4577_138531C.1
acgctgcagagcatgcaggctctcgtccgcgcgcaggcggccgtgcgcgagaggcgcgccgccctccaccaccagcccgtccggccgcgctactcgctgcaagagcggtacgcggacgacacgcggagcgagcacggggtggcggcgtacagcagccgccggctgtcggcgagcgtcgagtccccgtcgtacggctacgaccggagccccaagatcgtggaggtggaccccggccgccccaagtcgcggtcgtcctcgcgccgcgccagcgccccgctgctggacgcccgcagcagcggcagcggcggcggcgaggagtggtgcgccaacaaccccgcgtcctcgccgctgccgtgctacctgccctccgggccgcggcgcatcgccgtgccgacctcgcgccagttcccggactacgactggtgcgtgctggagaaggcacggccggccacggcgcagagcacgccgcggtacctgcaagcgcacgcgccggccaccccgaccaagtccgtcgcgggctactcgccgtcgctcaacgcctgcccgaactacatgtcgagcacgcaggcgtccgaggccaaggtgcggtctcagagcgcgcccaagcagcgccccgagctcgcctgctgcggcggcggaccgcggaagcgggtgccgctcagcgaagtagttgtcgtggagtcgtcccgcgccagcctgagcgccgtcatgggcatgcagcgcgggtgcggcccccgggcgcaggaggccttcagcttcaggacggccgtcgttggccgcatggaccgctcgttggaggttgcaggcagtgagaacgacaggctggcgttcttgcagaggaggtggtgactggtcaggtccgtccgatcagcaagctccattggaaatgccaacaagatgacgagaggctctttcagggagtaattgagaataagaacgttttcatgtgttcctgcgagtgttctcgtcgtttttctttctctttttcttgtttttgcaatgtgatcaatcatgcgactagtgtttcttttctttttatcagtggccaacaagtgtatgacggaaatttgattcatactgcacttggcatgtaaatccttgctcttattaatgctgttcttggattgtgtcggggggcccggnnnnnnnnnnnnnnnnnnnnnnnnnnnnnnnnnnnnnnnnnnnnnnnnnnnnnnnnnnnnnnnnnnnnnnnnnnnnnnnnnnnnnnnnnn

SEQ ID NO: 42249 - DNA, 1245 bp, Zea mays
  Clone ID: MRT4577_138532C.1
gacaaaagctcaacaaagcattcaattgtcacgtggaacggggggtgtattcacacacacacgcgcgcgcgcgcagcaacatggtgaacgaaacctaggcatagaacaggacaggacaagacgagccaacacagagaagcgaagacacagagcagcgaaacgattatcgatctgctccggcgccccggcgaaggccgatcggtcagctcgccgacggccactcccggcggatgtcgaaggcgtagttgatctccaggtagcacttccggtcgtcgtcgaggaacttcgtcctggcggagtaggacccccgggcgaacattcccgacggggtggtgtcctccggcgtcacgtacgtgtagggctccggctgggggctgaacgtgccgagcatctccttggctctgtcaactttgaggcctgtcttccagacggtgttggtgtagcgcaggccggagacgatgttgctgctgacggagaaggtgaacttgagccggtacggggagccttccttgagcgtgaaccacacgcccttggtggcgtccaccggcagcggcaggacgatgtcgcgccgcccgggcgacaggatggacaggctcgttatcctcacgtccggctccagcgtctctcccacggaattcaagtccacgccgccgaggagctgctccttccatcgccgcaggctctcgtcgtccttgtccttctcgagctgctccttgatgctgaccatggggccgaggtcgatggcctggggggccttctcctcctcctcctcctcctcctcctcgtggcaacacggagccgcctcgccgtgccccgcgggcgccgctgcgtcctccggatccgggccggcggcggggacgtcgaccttggagcaggagacgggctccaccgccgacgacatcggggcactgctctcgcgtggcgtcagacagacagacaagagcgggtcgtacgagcagggagcggcgggcgaatgagcgcgcacgctgcacgcggggagtcgcaggggcggtggggacggaaaggaaggaaggaagacgaggagaggcgagcacagataccaagagctcaccaaaaggactaaaggagagcgcacacgacacgaggggaggggaggggaggggaggggaggggagagggagggcggacacgccgaggcggattcggacaagggggaacggaccgcggcgcaaggcagagcggacgccggacggcgaggtgggatggtttggatccgacgatcag

SEQ ID NO: 42250 - DNA, 603 bp, Zea mays
  Clone ID: MRT4577_138533C.1
tatatctatctgctgaggacactggacgtggttacgctgacgctgccgtccgcgcggtcatgtaatggacggcagcgatagatgctgacccactcgaacgccttatcgctgctgactcaagactcggggacgagacactgcggtgatcctgatggtgatacacacatctgatcaccttcgggtacaggggcgcgccgctctacttcaggaggatagaagagatcagagatgcacgacgccaagagcaacaacaaatgcgtgatggcgaggctgatcatcggcgagcccatgtggatgctcgccatcatcttcctcttgatcgggcccatcaaatccgccgtgagtgtgctgctggtcatgttcaccggatacatgataccggccctggcgcaacagctcagctagagcacggaatccgtgagaatgaacggcatgcacaaggcgcccttcttcctgtctagctggacgaggatgagaaaccactcaagccaatccacatgacagaggcaaggaatcccccgatgattcatcgcgctgacctgctcctctctctcgagtcgaacgccgaggctgtcggcgccgtagatggagaagacccgatga

SEQ ID NO: 42251 - DNA, 287 bp, Zea mays
  Clone ID: MRT4577_138534C.1
cattaaaaccaaaactgctttagcgaccatgcatatatatattgggcataccacacactgatacaggggagcagtggtactgaatgttcatatatacagatagagagagatggctacaggatgattggccaaacatcatgattaaccaggatgactgaatggcagcgaacacaccacaggggttggcgcggtaactgagcttctggtactgctagaatccacccatgatgcggtatgttctgcgccatcataatggtgatggggtaaagaccctgagctgccagcag

SEQ ID NO: 42252 - DNA, 310 bp, Zea mays
  unsure (1)..(310): unsure at all n locations
  Clone ID: MRT4577_138535C.1
ttggccngcatgagcacatcgaagagcttgcagttactgagagtgtgtgtgagagagatgatgggtggcagcggcagggctgctctgctgctggccctggtggtggtggccgtgagcctggccgtggatatccaggccgacgccgggtacggttacggtggcgggtacaccccgacgccgacgcctgtcattggggccccgaagtccgagaagcccctcaccaaggggccgaagccggacatgccgcccaaggagcacaagccgcccaaggagcacggtcccaagccggagatggcgtccaatgagcaca

SEQ ID NO: 42253 - DNA, 811 bp, Zea mays
  Clone ID: MRT4577_138536C.1
actcccggcggatgtcgaaggtgtagttgatctccaggtagcacttgcggtcgtcgtcgaggaactgccaaagaacaggatgccaaaccaaacctcgtgaactatcgagcctgaaggattcggattctgtctgaaccgaaaaaggactggttctgcatccacgtacgtacgtaccttggtcctggcagagtaggacccccgggcaaacattcccgacggggtggtgtcctccggcgtcacgtacgtgtagggctccagctgggggctgaacgtgccgagcatctccttggctctgtcaactgcaccgcgtgacatgacatgacaaccagcagaccgtgagctgtggtgttctggtggccgagtgatggccggcacactagtaggggacgtgctcgtgctcgtgcgtgcgcacaaatggcgtgtctgtcgtcccgccccgcccgccaggcgtcagatcctctggcctggcggctggctttctcactcacctttgagccccgtcttccagacggtgttggtgtagcggaggccggagacgatgttgttgctgacggagaaggtgaacttgagccggtacggggagccttccttgagggtgaaccacacgcccttgccgttgggctccaccggcagcggcagcacgatgtcgggccgcccgggcgacaggatggacaggctcattatcttcacgtccggctccagcgtctctgcgaacatcacacacacacacgcacaggatgttcaaatttcagatctgcttcttacattgcattaaattggacatgctcattaaattgagcgtctctttcac

SEQ ID NO: 42254 - DNA, 605 bp, Zea mays
  Clone ID: MRT4577_138537C.1
ggggacgacgcgacgaccagtaggtccatgggcttcccacctcgctgcatcgcgcgaccagccgagccgctaatttcttcgtgcctctcgattcttctcgcatgtgtcatctctctcgttgtcccttctcgcctccgtcgaccgaagacgagcgaggccagcacagcgacggtaggaccgaagcttcccagaacaaaaatcggcgacgacggcgacgctgaccccaaccatctgcccacgctcgaacagtactcagtatggatgtcttcaagggaaaaagcggctcctgttcttcggatttttttactccttcctcgtagccaatgtttctagcaatggttataccattcaaactgcacctagaggaatgtaattgattgcattgtgccttctgaggagcttacaaggcttacgccaactgtgcagcaacaaaatttggcttttttcttttcttttgttattttgtttagtcacacatgcttcatgttaataaggaagaaagtggaaataggtgacgtacactatgattgatccgtgtgaggaaaaagatttttcaatttattttattaaggttttcaaaaaaaaaaaattaaggaaccttatag

SEQ ID NO: 42255 - DNA, 175 bp, Zea mays
  Clone ID: MRT4577_138538C.1
tccaacaatacataacctaacagtttccttacgaatacgattcttactgacatttctttgcaaatatctaaaaaagctcaaaaaccgctatttaataaacctgcttattattatgtaattggtcaagtaaatgctgaccaagccaaagatccttacctttacttttcccatgatc

SEQ ID NO: 42256 - DNA, 629 bp, Zea mays
  unsure (1)..(629): unsure at all n locations
  Clone ID: MRT4577_138539C.1
cacgcctgcgtgtaccgggctcctaattacacggcacgtcctgcatttataaacacaccaagcgaacgcactagcaacgacctaacaacatttttttttgagaataaatctcaatcaatgatattgattgttctttagggaaacacacgtcggagtgagggcaccattatagagctcatttgattttaagccaaaattggcactccaacaagggttgcttccttggcctgacaagcatctttctaagacaaccggtcgtgctggcaacaaattgcttgctgctgagcgaaggacgcaaccaattggtcaaccgctacaacaggatttgccaaatgtaacaattcatgccatcacaccgcaacatcaacaacagttcctaccatcactgaaacacactagccgtggggaagcctgacgtctactcacaagagcagatgcttgcatgcaacccacttgctctagcaaacgtagttgcagaccagcagcaacaacagctacaacagttggtgccaacgaataaacaactagccatggtgaaccctggcgngtacgtacaacaacaacaactggtttcatctagcccactcgctgagggcaatgcacctacatacctgcaacaacaattgttg

SEQ ID NO: 42257 - DNA, 367 bp, Zea mays
  Clone ID: MRT4577_13853C.1
cggccgcgtgggtttaaagaaaggaattaaaccagttttaaggtcctgtcgggataggacccttagggggggcccattccgttttacttccggggattttaactttgaaacgggaggcgccgggaagcggttaaaaatggcccaggccttaaaaaatttgtccaggcaaggccaatttttccggggtaccaaagggcagaagcccaatcccgcctggatttttaaaatttgcgatggggggcgtccaaaggggtaaggaaattaattggggtgggcttaggaaaccggggccccccaaaccaatttactttccggtgggggggggggggggaagaagggtggccatgtggcctttttcaactgggtt

SEQ ID NO: 42258 - DNA, 844 bp, Zea mays
  Clone ID: MRT4577_138540C.1
cattgggtacctcgaggccggccgggacagattccacctccgtccattcgtacccctttcgtctctctcactctatcatctgacatacaacacatcctcacttcctcctacacatcacgaaatcatggtccgcaacgtagcgtcaatgcaaagcctccgccataacatggaagacatgaacttcgatgctcctcccagacgcaccttgtacgaggagagctacgcgtctatgcaagattcgccccgaaggaccactaccacacctatttcccagccccaacaacatcccatcgtccagctctgcggcacggacgattacaccaagcagctcatgaaccgcgtagcaaccggtgtggctaccgaggcggaacagaaggcatttgctcaacaagttcagcgtggtcttcctgcgatgatcagcaacgcttcctccaccagagcctcgtcaatgcgctcatcgccacgagaggacaagaccgctcgcttcatgcaagcgactcgtgagaacgccgagaagtacacgaagcccttctgcgacttcttgaccaacaacccgactgtattccactgtgtggatgccgtcaagacccagctgaaagatgctggttggaaagagcttagcgagagggatgcttggaagatcgagccttcgggcaaatactttgtcgagcgcaacggatcggcgctcatcgcattctctgtcggcggccagtacaagccaggaaacggcgctgctatcttggccggtcacgttgatgctttgactgccaagctgaagcctgtcagccaggtccccaacaaggctggctacattcagcttggtgtcgcaccgtacgcgggagca

SEQ ID NO: 42259 - DNA, 306 bp, Zea mays
  Clone ID: MRT4577_138541C.1
acctgcatgtttttcttgcaaggggggtgttagtgtcaggtgcagaccgagcccacggccctcgtgaactatgagtgcatacgcgcgctaaacatgaacagccggactgatcctgggacaacctctaaccataggtgtgcctgtacaggaccagagacaaggctgggcatccagactcggacacgagctaccattgatccttaagcgcaaaaaccccctgcggacagatgatctccagcagtaggtggacggtatccacctggccgtcagacatatcctgtggctagactcacatcctgatggaca

SEQ ID NO: 42260 - DNA, 448 bp, Zea mays
  Clone ID: MRT4577_138542C.1
gacctttgggctgctttatgtgcttggcgggacgttagataatccacagtcctcggtgggacgttactactttatctagtcatagggatgagtatccctagcggtcgcgggaacttaagaaggtccctgcagcgtaatacccgtaatcgtatcagctcccgtacgcgcggccacgtacgacgtccccggagcctggccatacgttggaaagtaggtagaggcgtcgaactaaaccgctcacgagtcgttagaggaatatttaccactagagataaagttatcgtgcgaaacttccggatacatcgccttctaagctgcggttggccgtacttccggaacttctacggtcgctgccacgtccccgctctctgggaggctccagctaagcgccgcctatttcacactctgtcggcgacggtcataaagtacaaaaatacgactcctttac

SEQ ID NO: 42261 - DNA, 468 bp, Zea mays
  unsure (1)..(468): unsure at all n locations
  Clone ID: MRT4577_138543C.1
ccggccgggagagacttgacaacaagaacctaacggtaataatgatagtacgactatcaacttcgggctggcaacaagccaaggtgtctaaagcattagcgtactactctagactgtcaaagagtgtctatgcgctggcgatttctaccaatgctttggtcactaaaacggaaatgtgacagatagacaggcgatgctacatactcattgggattcaatgatgtggcatggcgcagttggtagaagctcagctatcacgcacagcaagaagcatgaaacactacaccaacttgactaacagtcattaaaaccggcttctttccgatccgatttgatgtcatcaaagcaacgcggagccgatagtgcccaatacactgtcacatattgagtggctggaacaagatatattgancactatgtaaatacacgcttgaatcattcaaaaaaaaaaaaaaaaaacccgcggcc

SEQ ID NO: 42262 - DNA, 221 bp, Zea mays
  Clone ID: MRT4577_138544C.1
ttcttcacgcgtccgccgacgcgtgggctgagagggtgtttgcgccaggaatggttaaacaagcccagctaatgcttagggtacaagtgtggagggtgacaatcgtacagtacgtatgtaagttatatgtgcccgcataatgcgatttcacatgattgactgttgacattatatgttctgcaggtgggaaggcgaagcaagacacgtcattgcttgctgcc

SEQ ID NO: 42263 - DNA, 458 bp, Zea mays
  Clone ID: MRT4577_138545C.1
atatgattgctttttattgcagactgattaacaggtttccattgggacactgagcactgcccaagacagtgaacacaacaaaccttccttgccgatggaacacactggtacggtaagataattgtacttaacgtgtcaaactggaaccagggtgatctgacatgcatcctaccacactagatatacgtacatgtgcccctggggccggggtacttccacctggttatttaccgggtacaaaatatgctgcataggcccatgcgtagctggtgacatgctctccttagagaggtctgataagctttctatcgggcccttgcccgggaccaaggcctgtacgaagaaccctacattgataacattgtaaggccctacgctcttgaacttcttcatcttgaactcctccaaggtcttaaggtcctgagctaggcctaacggctataacctaccgccctggt

SEQ ID NO: 42264 - DNA, 904 bp, Zea mays
  Clone ID: MRT4577_138546C.1
cggctgccagaagctgtcgcaggacgcgtcgagccacgcggcgcagaacgaccggctgccgatccagatggtggtgcgcgtgctctacttcgagcagctccgcctcaagtcgtccttctcgggcggcgggtccgggtgcgtcggcttgggcggcgccgacgggtccttctcgcagcggttcgtgtgcagcagcagcggcgtgccgagctcgtgcgtgtccccgcagcgggacaactacgcgtcgctgcggcgggagaaccgggagctgaagctggagatctcgcggatgcgggtgcggctgacggagctggagcgggagcaggggctgatgaagcagcaggggaggatgcgcggcggggacggcggtggcggcggcgggcggggcggtggcggcgagcacggccgcgccttcctcgcgtcgctgtcgaggggcatcggccgcatcaccatgttcggcgggcccgcggcggccgacagacggcgcaagaagagcggcggccggagctcccagtgctcagacggcaaggcccgcaggcggcagaaggcgtctttcgcctacgactgaagcttcgctgctgatatcgacagtggaggcgcgcagcgcaggcggcgatcgtggtggatgcgatctgactctcagcggctggaggatcggtcggagctaagcagggacggtggctgctgacagctgagtgggtgacgatgatcaagactgcgggttttagctgttggtgatggcagtccgtcgctcagacgaacaaacaacagggaggaatggaacggatcaggaggagtttatagcaggaaatgctacaggctagcgagagattttttagcaaagtagtgtagcaaactgttttagcctgaactctgaatgcctgctttcactggattgcatttgcac

SEQ ID NO: 42265 - DNA, 677 bp, Zea mays
  Clone ID: MRT4577_138547C.1
gggccaagagttctcctgttttggtgctaatgccaagggggagaaattaaggccaaagcaaatggatcagccaaccacttatgaatttcaaaaattgtagaaattgtagagttagaatctttgtgtttgatcaaaaccctcttattgcaaaaaattgttctcttatgggggagaatattgattatgggaaaaagggggagtttgtgacatttgatcaaatttactcttgaaagatctcttgatttgccaaacaagtgtttttgatatagatataagaaaaagaatttgttttgtgaaaataaaccaagtggtggcaaaagtgatccaaatatgccaaatcctatatgagttaaattagtcttcaatttgcactctttagcttctctttgaaaatgttgttgcattttgagttgcttttaatgtgttggcataaatcaccaaaaagagggagattgaaagggaaatgtgcccttgggccatttctataaatgttttggtgatgagatgcccaacacatagtattttagttcgtatgtgccaagtgctaaagagagatgcaaatcaaagaatcaaggtatgactctggccttagtaaattgtttttagtactaacatatttctctaagtgctagcaaccttgttttatcaaaagaaattggattggaagaaggtttgac

SEQ ID NO: 42266 - DNA, 219 bp, Zea mays
  unsure (1)..(219): unsure at all n locations
  Clone ID: MRT4577_138548C.1
gggggggggtgtgttttttaaaaaaattttttttttttttttggtccatcaaatttggggaatgggtttataatggaattgccccgcatcacatcctctggggccatgtacgggtgtacccatgtaaacatgaaataaatcgagcaaaaaggggggggggacattttttttacggggnaggnggntttgaagctctactgagtactgactaggtgccaa

SEQ ID NO: 42267 - DNA, 663 bp, Zea mays
  Clone ID: MRT4577_138549C.1
cacgaaccacttcccaccccttggactccgatgtattcggcgccgccgtggtcgattcctccgcctccgacggatcacctgcgtacacctctttcccccagtggggcgccgagtacgtgaaccaagagataaccgcagagcgctatgcggtccctattcgacacgtctccggaggctactcagccctcgccgttctcccccgagatcgacaccagcggcggcgatggctcgatactaccgccgacctcttagaaggggcgggacgagggaatcctcctccatcagcggcgaagaaaaaatgctatggaacattgccaataaagatgtcacacgagactgcagctacgatgacctaataattgctcgacgccgatgaattcaactaaagacttttttgagaagaggatacacaactgtgcatcgaacatggcgaacaacagatagagggagaacattgttgtgcccagacaagagagattccacgaccgctctaactactggaactggaaatccatttcagatctcgtgccacatggcatagccaccatctacaatcggcgtactagagacaacgacttgaagccgtccatcacagttgtccagggcccccagcctgtcaagctcaccgacctgtcccggatgcgccatatcttgctgaagctg

SEQ ID NO: 42268 - DNA, 258 bp, Zea mays
  Clone ID: MRT4577_13854C.1
gcgtgtttgagctgctggtgcggtggtcagcgcgatgcccaaggccaacggccgaacccggaggcagaagtttggttacagtgtcaaccgaaagcgtctgaaccggaatgctcgacggaaggcagcgccgcggatcgaatgctcccacatccgacatgcctgggaccacgctaaatcggtacggcagaacctggccgatttttgggttggctgtggaccccaacagggcggtgcccctccgtaagagaaaggtgaagg

SEQ ID NO: 42269 - DNA, 344 bp, Zea mays
  Clone ID: MRT4577_138550C.1
ctagttctagatcgtgagcgggcgcccttttttcttggtgcggacgattagatcaagatccagctctatgaatatattgactatttttgggaaacacaggccgagctgagggcgccatacactgagacatctcatatgtaatctaaaacacggcacctgcaacgacgggttggtgaatggctaggctcatcaaagagagctggctggatggcaccatttggtgctgctgcttgatgctagcgaccaatgggttaacctccgctcctggagtacatacctgttgctggtagtgcaggtcctcagcagagtttggcacggccgattggttgaatggaaacaactgc

SEQ ID NO: 42270 - DNA, 1276 bp, Zea mays
  unsure (1)..(1276): unsure at all n locations
  Clone ID: MRT4577_138551C.1
gttaattgagnaggaggcccaagcagattttgagacgtttcataagcaacgcccaccggtatcaaaattctatatggaagagcagctctcaaaagtatacacacataatatgttcaagaagttccaagatgagattgaagccataatgtactgccatgtatctttaattagtgttgatgggcctgtctctacattcaatgtcaaggagtgcattttctttgaagatggtaaaaggactatgagtaaaatttttgcagtgacatacaaagcggacgaaaagaatattagttgtatatgtggaggtttccaattcagtggcatactgtgtaggcatagtctctcaatgctcaagtttcaactgactctgcagtcctatcagataagtatcgccttgctttgaggttggtaagggagacagagaaatttctgctaaatagcaacacacatgatgatacacaaccaaggatcaagtctcgtgttcctaaagtaaataaaccaaatattgtgactggccaaaccatggtgggtacagctactggggaaatgatggtctcaaaggaccagaggctacagcagtcacgcaagtaccacaatcccaaaagggaggagcagaaaaaggaatagttcctactggctacattggagtaccagctaatctccaacaatttgtaggcaatcaaacagcatttcggccaagcattgtgtacatggtaccgagtggtgttgatccacatgcttttggaaatgttatgatgccagtgatgtaccagcagatgttccaggtgcctccgaagccaaatgagaccgtgcaggatacttcagccaatggaaaaagtaagcgacctcgcggtcagaagctcacagagacatcccaacaggcaaatggaaccccagcatctgcatctggctagagtggactactaacattttgaacaggatttctgtacatacgttgacttcgttgacttcatgccgtgagaaattttacatatggacgctggcactaacaattacctcaatgttgtccaaggtatctggcccaggactggaaattatctctcgcacactttctttttgtgtgtggctgatttctgcaagacaggttccacctaatgtacaagtccccctgtcctttttatgctatgtaaatgaatgttcttggaacagctctatcatggctcatgagtacggtgccagttgccttcgaattcccattgtcgataccagatcgatggctaatgcatatagaaatataaaggggacaaattatgactaa

SEQ ID NO: 42271 - DNA, 269 bp, Zea mays
  Clone ID: MRT4577_138552C.1
gtgaggttctccgaagttcggtttagtgggtgagcggatcgagatggcgaggtaggatgtagagtaccggtgcttcgttgaaggcctatgactgggccacggacgaccactccctccacaacgccttgagaacctacggtgaggccctcgaagacaagatcatactcgatcgggagacgcagaggtactgggcattgagctttatgaccttcttcacggaggacgcgatgcggaacgccatacagggtatgaacggataggaactggac

SEQ ID NO: 42272 - DNA, 196 bp, Zea mays
  Clone ID: MRT4577_138553C.1
gttgggtggtgctacataattggttgtatttgtttagagacaccgggggtttattaaaaatcaacgccggcccctcaatgtgttgtgacgtaacgtatcaaaaatgctggaagttttttcatatggcggatatttattgctaaaagcggagttcttgttgggggggggagccacctgggcgttagggaagatgctt

SEQ ID NO: 42273 - DNA, 556 bp, Zea mays
  Clone ID: MRT4577_138554C.1
aatcataatttgggcccctttatatttctatatgcattagccatcgatctggtttcgacaatgggaattcgaaggcaactggcaccgtactcatgagccatgatagagcttggacaacattgaggtaattgttagtgccagcgtccatatgtaaaatttctcacggcatgaagtcaacgaagtcaacgtatgtacagaaatcctgttcaaaatgttagtagtccaccctagccagatgcagatgctggggttccatttgcctgttgggatgtctctgtgagcttctgaccgcgagggcgcttactttttccattggctgaagtatcctgcacggtctcatttggcttcggaggcacctggaacatctgctggtacatcactggcatcataacatttccaaaagcatgtggatcaacaccactcggtaccatgtacacaatgcttggccgaaatgctgtttgattgcctacaaattggtggagattagctggtactccaatgtagccaggaggaactattcctttttctgctcctcccttttgggattggggtactt

SEQ ID NO: 42274 - DNA, 704 bp, Zea mays
  Clone ID: MRT4577_138555C.1
ctgtgcggcgctcacccggccggccgggattccgacttcaaaccacaaacgactcgacttcgtgcagactttacaatctcccacccgcacgtcaaaatccattcacaatgtctcacgccgagctcgcttcgtcctacgcggccctgatcctcgccgacgacggcattgagatcaccgccgacaagctccagaccctcatcaaggccgccaacgtcgaggaggttgagcccatctggacctccatcttcgccaaggctcttgagggcaaggatgtcaaggaccttctcgtgaacgtcggctctggtggcggtgctgcccctgccgccggtggtgccgccgctgctggtggtgccgaggaggctgctcctgaggaggccaaggaggaggagaaggaggagtctgacgaggatatgggcttcggtctcttcgactaagcggttacgccgtcacgactgtttccttgttctttgtacttcgactgcatggcttcggggtttccaatcaatcgatcataaaggatggaatgcgggcactataccctgcgccctggacagagttgcttctttcatacgatgctatgacgaatgcgctcaacggagtttcgcggagggagaattggtcaattcaaaggctctgataaaaaaaagtcccgccatgggtggtttgagtccaaaaaaaaaaaaaaaaaacccctacccgcggcc

SEQ ID NO: 42275 - DNA, 2406 bp, Zea mays
  Clone ID: MRT4577_138556C.1
gcgagcttgtgcattttgtgtttggtgagagcaagcacaacagctctgtggagaggggtcgtttgaagctccaacctggagattcggaggcccttcggcttttcttcactcggatgcaggccaaaaatgccaacttttttactgtcattgacctggacgatgaaggctgtaccaggaatgttttctgggcagatgcacggtctagagccatgtgtgagtactatagtgatgtcatcacacttgatacatcatatgtggctagtaaatatgatatgcctcttgcaactttattggggtgaatcatcatggacaatctgtcttgatggggtgtgccctgctttctgatgaaacagcagaaacctattcatggctacttaagtcttggatagcatgtatgtatggcaatcttccaaaggctattgtcactgactattgtaggggcatccaaagtgctgtagctgagattattccgggagtccgtcatagaatgtgtttgtttcagataatgaggaaggccgcagaacgtttaggtgggctgtcagagtacagagctatcaacaaggcgatgcataaggctgtgtatgattctttaaccattgatgagtttgaagaagaatggaatactttaattacatatagtgggcttcagagcaatgactggttaagatcactttatgaatgtcgatcttcatgggttcccgtttttattaaagatacattttgggcaggaatgtctactacacaaagaaatgaaacaatcactcctttttttgatggatatgttgatttgaaaactaccttgaaacaatttcttgtcaagtatgagatggctttgcagagtaaatatgagaaggaggcccaagcagattttgagacgtttcataagcaacgcccaccggtatcaaaattctatatggaagagcagctctcaaaagtatacacacataatatgttcaagaagttccaagatgagattgaagccataatgtactgccatgtatctttaattagtgttgatgggcctgtctctacattcaatgtcaaggagtgcattttctttgaagatggtaaaaggactatgagtaaaatttttgcagtgacatacaaagcggacgaaaagaatattagttgtatatgtggaggtttccaattcagtggcatactgtgtaggcatagtctctcaatgctcaagtttcaactggttcgtgaaatcccacaacattatattcttgataggtggaagaaggattttcgacagttgcatgtgatgagacgccctccaagcgatcttgttcctaacaatcgcatggatcgatatgactatttatcaataagatgtttgcaacttgttgactctgcagtcctatcagataagtatcgccttgctttgaggttggtaagggagacagagaaatttctgctaaatagcaacacacatgatgatacacaaccaaggatcaagtctcgtgttcctaaagtaaataaaccaaatattgtgactggccaaaccatggtgggtgcagctactggaaatggaaatgatggtctcaaaggaccagaggctacagcagtcacgcaagtaccacaatcccaaaagggaggagcagaaaaaggaatagttcctactggctacattggagtaccagctaatctccaacaatttgtaggcaatcaaacagcatttcggccaagcattgtgtacatggtaccgagtggtgttgatccacatgcttttggaaatgttatgatgccagtgatgtaccagcagatgttccaggtgcctccgaagccaaatgagaccgtgcaggatacttcagccaatggaaaaagtaagcgacctcgcggtcagaagctcacagagacatcccaacaggcaaatggaaccccagcatctgcatctggctagggtggactactaacattttgaacaggatttctgtacatacgttgacttcgttgacttcatgccgtgagaaattttacatatggacgctggcactaacaattacctcaatgttgtccaaggtatctggcccaggactggaaattgtctctcgcacactttctttttgtgtgtggctgatttctgcaagacaggttccacctaatgtacaagtccccctgtcctttttatgatatgtaaatgaatgttcttggcacagatctgttctgtcattggtcgattgttgcaagacagtttccaccgaattcacaagtccccttgtcctttttatgctattgcattgaatgttcttggaggagctcattatgatttcatgagtacggtgtcagttgccttcgaattcccattgtcgataccagatcgatggctaatgcatatagaaatataaaggggacaaattactgataaaaaaaaaaaaaaaacggccctcgagttccaggttt

SEQ ID NO: 42276 - DNA, 250 bp, Zea mays
  Clone ID: MRT4577_138557C.1
atcctgcatcaactagtggaccagaagcgggatttgccaatgcttcagcggacacaaagagagacttggcagacagaaccgctgagctggagcgagttgatagagtcaaccactgcttacaggaggactgggaaaggagtgctgcgatgaagaagcagcgagacctggaggacaaggcttttgaacgggcttcagacaagctgtttctcctcgaccagtgtgcacagtatcggcgctgcaagcaatgcca

SEQ ID NO: 42277 - DNA, 354 bp, Zea mays
  Clone ID: MRT4577_138558C.1
ctctctcgttgtttcggatcaaatacactttacacactcctactgtaccttcggtgcggggtcaatccgattgatcacacgaagcacactgggctcaagtgcaccggatgcaatgcgccacagaagcagatggcgaccaatgcagcacgcacgtctggcccgtcatcctgcggcgtgaagaagccttaatgtttacgaccgggcacacgatgcgctccgagagatccgcaagtaccagaagagcacgcagatgctcatgcgtaagctcggcttgaagaagactggccgtgtgatcgcgcatgacttcaagaccgacctcagattccaatcctgatgcgtcatcgatctgcacga

SEQ ID NO: 42278 - DNA, 404 bp, Zea mays
  Clone ID: MRT4577_138559C.1
attggtggagccctctagcagatttcttatgagatataggccaacaatcacgtgcgtgatatgatgtatgtggcttcccagaaataataaagtccatttctaaaccgaaaaaaaacaacaaaaagactgaaaaaacggcgcggccgacctaacgaaccaagcttacatacccttccatgctacgcagtagctgtaatatcgaggaacctaaatccagttcactctccgcaacatttacaacatcctgactggaaaaacccacgcgctccccaacttaacattaatcgcgcacattcccgtttctacacccagcgtaacagctaaaatggccagcccgatagcccttgctaacagttgttcatcctgaatggctaatggcacgcgccctgtatcggcccattaag

SEQ ID NO: 42279 - DNA, 708 bp, Zea mays
  Clone ID: MRT4577_13855C.1
ttttttttttttttttttaacgtaaaccatatttgtttatgtgtaatgtaatcatatatcaccctagaaactgatatagtcctattcaaacttgttaccgctggtaatcaaacatgaatcattaccgttgtcatttacattacgtttcgtgaaccaatcgccaccttacacataataatacccaccattcggtgaggcacaacgaaagaaaaaaaaaagggacggtatgaacaaaagccccggtctgccacccatacgagttcctggttcaatcgttccacagtgccaaaacattactgttctgcacaattctttgcatagatcacagccctcctccgtcttctttcacgggtataccagcactgatcttcgaatgtggatcaatggcaagcggccttaagcttaccatggcattgccaatccgaaatgttgcacctctagctggatagagtagcaaacagaccaacatcacatcttttttcatctttgaacacatgcttgctgttaatgtacagaaataatctacaagttacggacgttgggcagttgtcatcctccttgtctcactcatctgtttgttgcactctcttaggggctagattgctggtcaagttcttcaacagtggctttagtgcagccatgatatctgcaaatgatggccgcctcgtgcggtccgtatgccagcattgcactattatctctgctaca

SEQ ID NO: 42280 - DNA, 177 bp, Zea mays
  Clone ID: MRT4577_138560C.1
aaataaataaacttataagtggaagttatggaattagggaacctttggatattatttggtttcttttgcttttgaatattcaattaaatgggattaagctaaccaaaataataataataataataataataaaggcagaaatatgcacctcatgaggaagttcttgcatttttgtat

SEQ ID NO: 42281 - DNA, 282 bp, Zea mays
  unsure (1)..(282): unsure at all n locations
  Clone ID: MRT4577_138561C.1
cctcgacctacacacatacatactttcttctactacaccaccacaaacattgtggggccggagaagatcggagagtggggcgactaccccctcgatcgtcgagatcttaagactgctcttgacctcctcatcgcggtgaaggtcatggtcgacaacatcacctatatccgctccatcttcttcatctacatcatancctatgtcaaaccttactatgacggctcttagtatttcccccatgcttacgtggactacaagattgacctattcacgtttcacgag

SEQ ID NO: 42282 - DNA, 290 bp, Zea mays
  unsure (1)..(290): unsure at all n locations
  Clone ID: MRT4577_138562C.1
tnatttttttttttttttttgacttttcaaagcgcggtttttaaatataattggggtctaacacctaggacattacaacacaggcacaccaggaatataccaccggaaccaaaccacctctaagcccacacatggcagagacaaaagcacagacacacataggggcaaacccttacacacaaatctatggggaaccaaaattaagggaatgcatatgcacacagttacaacactagcagagcactcggaaggcctacagggacccagaataccaggtcaatacccacagg

SEQ ID NO: 42283 - DNA, 826 bp, Zea mays
  unsure (1)..(826): unsure at all n locations
  Clone ID: MRT4577_138563C.1
aaacgcaaaacagtaaacaccaatcaaaagttgattgttgttggttcaatccatttgtgatgattcctgtggtgttctgcttcattgttcggccgtctactttaataacggagaatttgagctcagttagtgcatgtgccaatgagtcgacatcattataacttgccacataaaccaggatattatttccatacttcgtagcatccgcagttgaaccagtaccgagttccatgacaaactgctgctgagttaaattctcacaaacatggatatccactggatgttgtgtcaaaaattcgcattccctccctggaggcgtggctgaaaccttgataattttcccctcgatattcgtactccttcagtaagcaataaaaggccattgctggggcttccattatgtgacactcatcaaaaattatgaaatcatactctgattttttatcccgattatttgcatacatgtgcaatgcgaaaccagatgtcatgattgtaattggagtgcacccaaaagaactcaaaccacgcatttgaagagttggactcacattaaatggtggtccttgtagttgtctgcacacattctcggctagtggtcttgtaggttcaagcaaaagcacttttcncacgcatactaagatggtatggtagtccagtggattttccatgagcncaactgcacctctaagtaagaattccttctcaatgtttgcagcgcaagtcaatgttgtagagtgcgttcctcgcgaaattcgatgaacttctcctagtcggtaatgtggcacgtcctgttgttattagtgatcgaccaccaancccaaagtca

SEQ ID NO: 42284 - DNA, 438 bp, Zea mays
  Clone ID: MRT4577_138564C.1
ctctctttgtgtttataacatagacccatgcacgatgcaatgcgcgtgccctcaaaccatgtagtgatgtatgtacatctatcgatagagacctggtttgatcctcgccaggtcttctcgtggaaaaactatctagagaaccgcgactgactcgggtctccgcgaccagggcgagccaaccatgtgattgctctccagcgacatcctcctgtggatggatcagctgacctagacgatccatagcgcgcccttcttcagccggctgtagttctgcgtgcacccgaacccgaccttcgctgcgggggagaacatgaacatgcagacgcccttgtccgtgcacttgaacccgctcatggagccgttggagaaggacttcttctacatctaccagagctgcctcctgggcttcgacatgcgcgtctgcgacgtcatgctcta

SEQ ID NO: 42285 - DNA, 395 bp, Zea mays
  Clone ID: MRT4577_138565C.1
gggggggaaaaccctaatagattaaatactttttcaatacatttaaattcagtttaattttcctcgttactaaagtacccaaactaggcctaagtaaatggcccttaccccacccaagggacatggttgcgttttgtagcctgtaggggtcgatcaaaaaaggaatgaggaggcgtcaatattcagcgtccatgctttgggaatttagcggcagatcggacggacgaaaagatttttaaaccaaacctttccagtagcgggagatcactgttagatcaaaagccgccagatatacatattttcagtgctggaagcagagttaagaaagttaaacaactgttgaacaccaggaagctaccacagcagggtattcgtgccgaaactgggaggggggc

SEQ ID NO: 42286 - DNA, 416 bp, Zea mays
  Clone ID: MRT4577_138566C.1
cgcccgcgtgcaccggcccggaatgaatttatggccgggccagcgcgttaattagtcggcgggcgcccttttaacataccttttaatgaccagaggccaaaaatggactgtgtgaaacatgagggccattgtatgggactgagcgcgacctatgcggatgatggaccaacagaggaaatggaaagtgatgctggaccacacacattattgtggcagataatggttggtgccttgctcggtaatcaaatgacatagatcatgccacttgagtatgggggaaccggagatgtaaggataaatgacgtccttgataaaacaagtaatcaaacgacagctgatcggcgaacaaggctttaaaaccggatgcctccaacttgttggtgtttggcagggcagcaatgatacttggatttttt

SEQ ID NO: 42287 - DNA, 273 bp, Zea mays
  Clone ID: MRT4577_138567C.1
ccgccggtaaacccgtgtgtctgcacagctaggccggagcttgctcaaggtgcgtggtgcgagtgcaacggcttcggaagggagcagaggttgaagaaaatgcttcgccgcagccgatgaacagggaggcaaggtcatgaaaagcgacgtgtggtctcgaggacgtctgttggctgttgccttccactgggtggattaatttaccgaagtctatattagagtttttgtcaaaaaaaaaaaaaaagctagttctagatcgcgaggggccgccga

SEQ ID NO: 42288 - DNA, 437 bp, Zea mays
  Clone ID: MRT4577_138568C.1
gggtacctcgaggccggccgggatagaggttaccaaagaaggaaacagaccctggatttctccgtcggcggaggtgcacctcatattaatggcatggcgacgtgatgaggccgctacgtgatgcacaacgtgtaccgaaacctcttcgaggtctcctctaattacgcagcagctattcgtcccatcggccgaggcccctacggcattgtctgcgcagatgctgactctcaaccagaagaggaggttgccatcaagaatgttcgcaatggatacgacaaccacattcatgccaagcggacactcacggaaatcaagctgctgcgacacatgcaacatgataacattcttgacttaaatgatgtaattcgacccccaactagagagaaattttaatgacgtgtacattgctactgaggtaatggaaacccatctccatc

SEQ ID NO: 42289 - DNA, 1078 bp, Zea mays
  Clone ID: MRT4577_138569C.1
gcacgagcgaactgtcttggatccgcgcgcgcgtgccgtacatacctcgtcatgcaggagttcaggtgctgcctaatcctcggcggccctcaccgcgccaccgggtctcgcgtcgtcgctgccgatcgatcgatcgtccagcccgccgccagttgagttccgaaccccgatgcttatagcctcccatccctggttagcaagcatcgtgtgtatcttgcatctcagacttgcttcctcttcatcattcattcattcatactcaagcattaattattcaggaccaagcaagcggtagaattcaaattcaattcgcacaaccctttgcttgtcagctagcttaccttgtgtattggatttgaatacatgctggtaatccatctaataagaaagcgctgtgtggcgctacctgtccgtagtatggccgcgccgactgtctgtcggctggcatggcatgatatacattctagttatcttgaaccaaaggcgactgtccgtagagttgcttgctcttgcttcagcaggtgggaatggcgccgtgcacttgggttcgcctgtctcagttaccagaggagcctaatcccatcgtcgctcgtacgtcgctcggatgtcggcatcaacgaccagcgcggcagccagcatgcacaggcgcgccgagaatgatcagggggatggctctgggtgcggatgaatgctagctccatgttccgtcactttttgtttgtgcggttcttcactgactttgagtctagtgtcttggcgttctaactaaagaccgtcatgttgcgagtacatgcatgcatgtgttagagtagccgttcctcgtgcatgccttgcatattgctcatcatattaataatgatctgtcgtcacccatcttcatctcaactgtagaagatgcgagctgagatcggccatgcaccctgcatattattcatccagggccaaattttcttgttctctgtgtgggtttcgttttttttttcatgtgaatgaaatcccttatttcatgaagcaagatttctatgaaaaaaaaaaaaactcgtgcatgtgtgtttttgatatggtgcaagctcactac

SEQ ID NO: 42290 - DNA, 146 bp, Zea mays
  Clone ID: MRT4577_13856C.1
cgatccctccgccatcgcttcaagtcaccgcaccctagccgccctcagcgacggcattgccagaccccccagctcatgtacgttcaagcggaggaacggcgccacgcaacaccgcacggtctccggccatgctatgcacatactgc

SEQ ID NO: 42291 - DNA, 1329 bp, Zea mays
  Clone ID: MRT4577_138570C.1
cggaccgagttgaacccatcttctccaccgagcacgaactgtcttggatccgcgcgcgcgtgccgtacatacctcgtcatgcaggagttcaggtgctgcctaatcctcggcggccctcaccgcgccaccggcgtctcgcgtcgtcgctgccgatcgatcgatcgtccagcccgccgccagttgagttccgaaccccgatgcttatagcctcccatccctggttagcaagcatcgtgtgtatcttgcatctcagacttgcttcctcttcatcattcattcattcatactcaagcattaattattcaggaccaagcaagcggtagaattcaaattcaattcgcacaaccctttgcttgtcagctagcttaccttgtgtattggatttgaatacatgctggtaatccatctaataagaaagcgctgtgtggcgctacctgtccgtagtatggccgcgccgactgtctgtcggctggcatggcatgatatacattctagttatcttgaaccaaaggcgactgtccgtagagttgcttgctcttgcttcagcaggtgggaatggcgccgtgcacttgggttcgcctgtctcagttaccagaggagcctaatcccatcgtcgctcgtacgtcgctcggatgtcggcatcaacgaccagcgcggcagccagcatgcacaggcgcgccgagaatgatcagggggtgccgtctctatccttcattcagcgattcgctttctgaaaagaacattgcacaaaaacagcaagatggctctgggtgcggatgaatgctagctccatgttccgtcactttttgtttgtgcggttcttcactgactttgagtctagtcttggcgttctaactaaagaccgtcatgttgcgagtatacatgcaggtgttagagtagccgttcctcgtgcatgccttgcatattgctcatcatattaataatgatctgtcgtcacccatcttcatctcaactgtagaagatgcgagctgagatcggccatggatcctgcatattattcatccagggccaaattttcttgttctctgtgtgggtttcgtttttttttcatgtgaatgaaatcccttatttcatgaagcaagatttctatgagatttgtctatgtgtgtttttgatatggtgcaagctcactactcatgattcatgaagacagtagagctaccctttcatgaacaatgtatattaaatgtccttgatagtccttccatggatgagacttgtgtctaaaaaaaaaaaaaaaaaaaaaaaaaaaaaaaaaaaaaaaaagggcggagcgctataaaaagaaccaagctatcgtaaaccgtg

SEQ ID NO: 42292 - DNA, 633 bp, Zea mays
  Clone ID: MRT4577_138571C.1
ccggccgggatcgactaagaagacagggctagctagcgatgggtggagcctgtgcactgctcatcgtccgcgcggctgccgacgtggtcctggccgcggcgtcgtcgtctgcaggacgctggagccgcggcgtcgtcgtggatctgtatgaagactgcggcccccgacctgtgtaccaggtagggaggggtaagcacgccaacaagtacaaagtggtgtacgcgatgacggggctagagatgttcgaggtacgagctcaagaagcgcagagaagagcggcgcggaggctcgccaaggcaggaggacaagtatggccgcgacgtccgaggcgcggaggaggactgaacctcttgcaagacctactacctggacgccgacgatgacctcggtgcctgaaagcgagccattggcttcacgcgacgccgacaccattcgtgctgctgttacgatggtggcgcaggtacacccagaactgcgatgaggactgctcgaacgcctgtcttccacataccctgtggaggtgcacaatgggactctcataccgatgatctagatctgccgacgatctccaacgtgatgccttacgaacatgcccattgatttggttgctatcttattcccgccccctactac

SEQ ID NO: 42293 - DNA, 312 bp, Zea mays
  Clone ID: MRT4577_138572C.1
taacaacgacctaacagcgccggttatcaagatatcaggggttcttacgcttcttgccctttttggcaacccaacaaatgcattcattattccacaatgctcacttactcctagtgccattattacacagttcctcccaccacttacttcaatgtacttaccacacctagctgcccaagccaacatgcaacaacaagcgcttgcggcgaacgtcttacaacaaccaattgccccattgcaacaacataccttgccacatctaatactacaagccatcacaccgcaccaacctcaacacatcctaccaacact

SEQ ID NO: 42294 - DNA, 312 bp, Zea mays
  Clone ID: MRT4577_138573C.1
ggctctttagaggacggtctgaatgcacttctgaattttgaagtatgaatgaaagattctagctatgcagtacctttctatctgaactactttttatataataaactcgttgttttgaaaatcattggtcactagaaatgattaaaaacattttgttttttagtgtatgtaatagtaattcagacatatggcaatgttacatctatgctctgaatcatggatgttctctgtgaggatcatagaacaaaattgaactagatgtgcagcacacttgcatatagagaaatactagatcagcagcgatggtgatat

SEQ ID NO: 42295 - DNA, 310 bp, Zea mays
  unsure (1)..(310): unsure at all n locations
  Clone ID: MRT4577_138574C.1
cccacgcgtccgggctgctgctaccgcagcccttccgtaggcctccttaggccctgacaatccatatttcttcaaatggaggaaatttccataagaaataaacttacaacattggaatagttagcaagcattcatcgcattcatgatgtaggttctattatccctgcgtgtctcccagtgaactctgctctttgaaacatgtcctgatggtatttactgcagtaagtaaccattctgacgcagaacantntttaatatatttaatttaataatatattaaatagattaaaaaaaatatttaatataattt

SEQ ID NO: 42296 - DNA, 288 bp, Zea mays
  Clone ID: MRT4577_138575C.1
atagtgagtcgtattaaatcggtttttttgatggtttgacagaagatagtgagcacacacggtggtttcataccatgagtgccatgcgacgagctgtgcgtgctcacgctctatccgtcagtcactcatcaagctcatctgtcttagcttgtttccggatttccgctgctaataaatattcaatcctcaagtttatttgacacagatatcgatcgctatcatgttcgatgcatttatatagaagtattacttacatgtgcggatctcgtgtagatcttcttcctaatt

SEQ ID NO: 42297 - DNA, 205 bp, Zea mays
  Clone ID: MRT4577_138576C.1
actagcctcgtcgccggcgtggggccccgccgccgctagatccagcaccctggtggcgggccttcgtgccgacgggctctgcgcgcgatggcactcgtagcgcggcgcgcggcgtcgctcatggcgcggcaccagcagcttgcctcgtgcgcggcgagctcacgacgccgcggctcgcgcgcgcaacggcgtgcccgccttgcgg

SEQ ID NO: 42298 - DNA, 481 bp, Zea mays
  Clone ID: MRT4577_138577C.1
ataggattatcgagaacagggctagtcatagattacttttgcatgggctttattggcttagcagatctcataatcacaaacattgtgggactcgtggcagcctattgaaggcgattaaaggatcatgtagcgaataatatgtccctggacaagacgccgacgataaccgatttattggatggagactcgagcacgatgtatcaaactgtctttatacacaaggagtgacaaccatagtcctacatggcgcatttaaagagaactatggtctctcagatcacccaagccattgtggacacactgggcttatgccaacaccacatagggacaaccagcctggcaacagtcctctcttagtaatcactaagatgctctatgccgttggtacgctcctgtttgatatagacgcgggctggtctctgacacatccagggcgcctcaatgttctgattgctgagcgactagccacttagctaggtgg

SEQ ID NO: 42299 - DNA, 666 bp, Zea mays
  Clone ID: MRT4577_138578C.1
gaaacccaccaaggggccccttttttatattcccaacgggaaagggaaaaacttttggaaccttttttttcagccaacccgccaagcccttttttttaacaacaattttatggaaacaaaccccccccttccttttttggggaaggaacacccccccaaaaaaggcccaatttttttttttaaaaaattggatccccacccggggggggggcccggcccaagggggcaaaaaaaaaaccaacccgggggggggggaaaacccagggccccggggggcccaagggaaaaaaaaaaaatgggggggggggctttgccaaaaaaaacccccctttgggttttttcaagggggaccccacccctttcgggcaaaaatttttgggccccatcgccccccccgggggaccaaagggggcccggttgccgggggaaaactaaaggggaaaaccctgggcccaaattccggcgcccggggggacccatttttttaaaaggggccccccccgggggggacccccacttttggtccctttaagggggggaaaatggccccctgggggaaaaaagggaaaaaggggttcccgggggaaaatggttaccccttaaaaattcaacaaaaaaaaagaccgggaaaaaaaaagggaaaacccggggggcccaaaggggggg

SEQ ID NO: 42300 - DNA, 315 bp, Zea mays
  Clone ID: MRT4577_138579C.1
gccacgcagcgctgatggtgctggtcaccggcagcgacgtggtgtgggtgcagtgcgcgccctgctcttggtgaatcacatcccggtcccctgtgccagccaccagaccactctgggccgggacgccttatctacctgtggcaccggcggtgcccgccagcatccgacacctgcccgacctacggttgagcgagctgcagatgaggcttcaccagttcgctcgtgtagacccgccacgcagatagtgtcttgattgtccactcgaaaatgcacggccagaacttgattctgaagaccccctatagatccaagcat

SEQ ID NO: 42301 - DNA, 737 bp, Zea mays
  Clone ID: MRT4577_13857C.1
ccggccgggcttcggcctcgcccgcctcatcaaccacagccacgctgcgcacaccaccatgctcgccggcaccaagggatacatagacccggagtgcgtggtgactagccgcacgagcgtccagtccgatgtctacagcttcggcgccgtccttctcgagattgcctgcggtaggaagcccgttgtcccgcacgaggacgagagcaaggtgttgctcgtgcattgggtctgggatatgcacgggaaaggccagctcctcgacgtagcggatgcgcgtctgcacgacggcgggtttgacgtggagcagatggagcgaacgctggtcgtggggctgtggtgcatgcatccagactacgcgtccaggccttccatccggcaggcaatgaacgtgctgcagtttgaggtgcctttgccggagctcccgctagagatgcctgtggcaacgtacgcaccacctgtttcaagtggttaccggtcgagtaccacatcttcgtccgtgagtgacaacactacaggccactcgtcgacggcgaactcctcgggcttgtcggtgaagagtgacacccaagcagggacacgttcttttgtcacttccaacgacacaaggaatacaggaggcagtgttcgagaatccacttcatcaccaaatgctatctgatcgctcgagcactcgttaagaagcggtgcactctcaggcaggactgaacaatttcccagtacactctattcctcatagc

SEQ ID NO: 42302 - DNA, 159 bp, Zea mays
  Clone ID: MRT4577_138580C.1
caatcacaacatgttacatggcacattgtgattggcttgtttagctggatgacgggactcgctcaagtacctgggtcacagccgatgcgcgagttccagctcaacaagccaatcacaacatgttacatggcacattgtcttctatgcctcatagcagtg

SEQ ID NO: 42303 - DNA, 128 bp, Zea mays
  Clone ID: MRT4577_138581C.1
gggccaattgtgacaaaattgcgtataaataatgaccaacaaaactaggtgacacaggaaacaggcaaccgatacaagatagacgcccacacaagaagaactaacacacgctgcatatataccggaat

SEQ ID NO: 42304 - DNA, 241 bp, Zea mays
  unsure (1)..(241): unsure at all n locations
  Clone ID: MRT4577_138582C.1
gaaatctgaatgcaagtgaaatacatcatgaagaaactgctggcacaagacaaattatatggggccaaccttctgtagctcccaatgtaactaatcttcccactatctcaacaggagttcatgacatcgttccggattatccggctgctgcaaaagatagcacaggaaccgcagtggnaaacaaaatggagaaagcagatcagaatgaagctctcttctgtttttcacagcaaccaggtgc

SEQ ID NO: 42305 - DNA, 429 bp, Zea mays
  Clone ID: MRT4577_138583C.1
ccggccgggttacattctaaactggatttaccgttatttcacggagggtcatcacagcagatggatcccttggcttgctggtttggtgcaaacagctctgtatgcagatttcttttactattatttcttaagttggaagaacaacgtgaagctcgagttgcctgcttgagcatgcttcgtcatgccagaaagtgtgcatgctacatgactcaagttttctagaaatttgtttatatgggcatgggcatggggagacctgcgaaaattgatatttgtgtttccatggcaaagtcgatacgattcgaaagctaacagatgctgctgcacagaagtagactagttcctttttgtacctcgatacttttgatatggaaaatcaaaaacagttcagttggtctgttgtttaaaaaaaaaaaaaaaaaagcggcc

SEQ ID NO: 42306 - DNA, 1450 bp, Zea mays
  Clone ID: MRT4577_138584C.1
tgggaccctcgaggccggccgggctctgttctctccgccacgcgtccgtgcgcagcacgaggaactcgttggtggcatcgagcgagcggtgcgagtggcacgagtgcgtgcgcgagcaagatcggagcttttccttcgtcgcagtttcgaagccacgcggccagcccttccgacatcggcgccggcgcccacgaggccgacggagaggtaaccatggatgcccgaaggtggagtcggagaggaggagcaagcggcggcggagggcgcaggggaggaggagctgttctgttctaaacccccaaaccctccgtcctaacctctgcgccaccggcgtcaccaccgccggagccgcagccatgaacgccttcaggttcctcggggacatgacccacctcttctcggtcctcgtcctcctcctcaagatctacgccaccaagtcctgctcaggggtgtcgaggaagacgcaggagctgtacatgttggtgttcgtggcgaggtacctggacctcttcacggattatgtctcgctctacaactcggtgatgaaggtggtgttcatcaccagctcggcggccatcgtgtggtgcatgcgccgccacccgcaggtacgaaggacgtacgacaaggagcaggacaccttccgccacacggtgctcgtcgccgccgcattcctgctcgcgctgatattccacgagcggttcaccttccgcgagatatgctgggcattttcaatctatttggaggcagtggctattctcccacaattagtgttgctccagagaagcagaaatgtggataacttaactggacaatatgttttcttccttggggcctaccgtgcgttttacattctaaactggatttatcgttatttcacggagggtcatcgcagcagatggatcccttggcttgctggtttggtgcaaacagctctgtatgcagatttcttttactattatttcttaagttggaagaacaatgtgaagctcgagttgcctgcttgagcatgcttcgttttgccagaaagcgtgcaagctacgtgactcaagttttatagaatttagttgattatatgggcatggagagacttggtaatgacgtgagcagttgcagttgatgccaaacccttgatcttgtctgcgaaaattggcatttgtgtttcccatggccaagacgatacgattccaaagctaacagatgctgctgcacagaagtaggctagttcctttttgtacctcaatacttttgatatggaaaatcatatacagttcagttggtctgtttaacattcgatttcacttgctccaaacgaaaaatgcgatccaatgttcgtgcgatttctgtgtaaaactgttacacttttgactgtcctcaacaatccattttttatatataatgtcttggtgttactttggcctagtgttttttattatcttttctttaataaaaa

SEQ ID NO: 42307 - DNA, 146 bp, Zea mays
  Clone ID: MRT4577_138585C.1
gagacaccaagaagaatcggaacatacaggctttggtcaaccccaatgaatgttcatttctggccaccatgccttcctgaatatgaataagagatagaataccatttgatgtttgacattatgggggtaatctcaatgacggaaat

SEQ ID NO: 42308 - DNA, 343 bp, Zea mays
  unsure (1)..(343): unsure at all n locations
  Clone ID: MRT4577_138586C.1
ccgccctttttttttttttttttttttttttttttaaattttaattttttttnnnnnnntattntttataggagggtttttttggaaaacatttgtacctttcctacagggaaaaaacaacaagccccggaaatttccatgcacaatattaaaaaacattatttntttggataaaaaaaaaaaccactgtttttccaggcaccaaagtccaaacattaacatcccggtatttattgaataaaaaactaaacctggggcatggtaaccgaacctataaaaaagaaacaagcttaacaaaacagcagggtgataaagaaaaccgcccaattggttcagcgggatt

SEQ ID NO: 42309 - DNA, 237 bp, Zea mays
  Clone ID: MRT4577_138587C.1
gatgggctctactacggaagtaatggggggtcttctgcacagctcaggagcatcgcacagagcgcggacgggtcctcctaccggccatgccacgcttggcacaacatgcaagctccctctctctcgcgagagttgcccccaggtcagaatgatgactatcacgtgacagtagccaccaaagacacaaacactacaaagcaaaacaagctagctggaacagattccaccacaactacc

SEQ ID NO: 42310 - DNA, 586 bp, Zea mays
  Clone ID: MRT4577_138588C.1
tcgaaaaaaaaaaaaaaaaaaaaaaaaaaaaaaaaaaaaaaaaaaaaaaaaaaaaaaaaaaaaaaaaaaaaaggggaagaccaattttaaggggcgccacgtttttgtaggctccaattttacgtccgcggtgctttgctatgtgggtaccttttttttaattgcccccgtcagtgcatttacactggccgtgggttggacaaccccttggccttggcaaaaccttgttcgtttcccaacttattcccctttgcagcacattgcccttttcgccagttgggcccaatacctaagggccccccaccgttcgcccttcccaaaaggtgcacaggcctcgctcccttttgggaccctccctgtcgcgggcctttaagggcgcccgctgtggtggcttctccctgggtgaccgcttaactcgccagcgccttagcgcccgctcttttttttttcttcccttcctttttttccccttcggcgtttttcccggggatgcctttttgggggcctccttttgggtttccggttcatggcctctaggaacctgttccccaaaaacttcattaggggggccgttcaccttgtgggc

SEQ ID NO: 42311 - DNA, 222 bp, Zea mays
  unsure (1)..(222): unsure at all n locations
  Clone ID: MRT4577_138589C.1
gccgacgacgcgtgcgttctcacttcacncactgccatctctttcttacagaacaactcatcactggggaggagtatgccttttacaataccgcccctttccactacacacttttacatgacattgtttatcttttccttaaccgtcctcctaaccattctcacaactgcaccgaactccaaaccttccttttctttaatgcccccggtgtacatacccgac

SEQ ID NO: 42312 - DNA, 276 bp, Zea mays
  Clone ID: MRT4577_13858C.1
tgggaccctcgaggccggccgggtgagtaaggaaacaaagcgctgcggtgagagccgctcgcagtgcggggtcaaaacctgcaccgcaatttttgaagggggaagaggctggcgcgggtattgacactgccttactttgcaggacttgcctgtgcgggcctccccagatctcttccttgttctcgcctcgtcgtccccaatcgtcgccgggagtctcccgatccttcttccaccacctcaccggtggtgtcaggcacggatcgcgcacggcgcctt

SEQ ID NO: 42313 - DNA, 233 bp, Zea mays
  Clone ID: MRT4577_138590C.1
ccgatttccctggtcttcccacgcgtccgatcaatcgacaccataggggcattgaaagcccagtattttttcaacaatggcctgctattcatcacgctaccttatgctccttggtctttctgcaagtgtcgctacctgaaccattgtcccacaatgctcacaagctcctatagctacccttcttcccccatacctcttaccagcggtgtctccaatgtgtgataccccatttg

SEQ ID NO: 42314 - DNA, 469 bp, Zea mays
  Clone ID: MRT4577_138591C.1
aaaaaactggaaatgtaccttcttatttctgggtggccacatacatcatccaaaaaactttattattgaataacaactaataagcaatctaaaagagggcaccaccaatgatgtggtggtgggaggaggcccctggttctgccaaaccatgttggacaaagggcaacaattgttgtagttgaaagagggtcgcggggttacccgtaaactgctggtataaaggccacaactgttgctgtgtcaaaaaagaagcacggttcgctgcaactagctggctaaatggaacaattatttgctgctgcaaataaccagcggagttcagtgcggccaattgcttaaaaggaaaaaatcgctgttgcatgacagtttgccttatctaactgactcaatggcaatatttcctgctgcaaaaaaacatgagggatcactgaccacagttgtacaaatggaaaaaaacggtgcggttaaa

SEQ ID NO: 42315 - DNA, 434 bp, Zea mays
  Clone ID: MRT4577_138592C.1
caaggtccccaggcaaggagccaaaattaattatagaggattggtttttaagctaagcaaaaaaaaccctatctaatttttttactaaaaataccaggaaaaaataaaattattttttagagccttactacttatttaaaaggccacaaaaatccacagggccctaaggaagaagaagagggtagggtcctttagttaccccaaccgggataaatcatgcaagggcgttaacaacaacggggctttggacaaagggggccccgtttgtccaaacaagcctcccaaagacgaaccccatcccgagcttgtcctgttggaacgcccccgtcaccttgaactctttttcctcaccgaccttgttgaactcaagcaccctgggtttcacctccagggggaccccaaccggcgcgcgccagaacccgaggtacttggcc

SEQ ID NO: 42316 - DNA, 1529 bp, Zea mays
  Clone ID: MRT4577_138593C.1
ggcgattgggatcctcgaggccggccgggtgactcgcagccattgacggttgctatccttgcatcactgctctttggagagtcgattggcgcgataggagttggaggactcgtgttgggcgtcgtggggctcttgcttctggaggttccagcactgtcagttgaaggaaatgacacaacaatctggggaagcggggaatcgttgatgttcctctcagctcaaagcatggcagtcggaactatcatggtccgctgggtgtcaaagtactctgatccaattatggcaacaggatggcacatgattattggtgggcttcctttgctagtgatatctgttcttaatcatgatcctgctctgagtggccatattcaagatcttacatggagcgacatattagcacttggttatacatctatatttggcagtgctgtcagctacggtgtatacttctacaatgctactaggggtagcttaaccacacttagttctctcactttcttgacccccatgtttgcatccgttttcgggtacctgtacctgggtgagaccttctcaccagtacagattggtggtgcgcttctcacactggttgccatctacatggttaactacaaaagcattataggtgagaaataagaggctatcacgtacttgtgcgacgtctatcacataagggtggttgggtgctgcatgcagcacctatagccacttgttgggttcaggaatctgaagattaagtacagtcgtgtagactcgggcaaattatcagattggagagagatgtgctctgtttctggtctagactgtaaatgcagtataaagtggcacaaaaccaaataggtttcatcagctccttcgacaatcctattagattgcctggttatgtctgcttctaggttacccagccacctgtatctctgttatgcgtagctgagagaattataatttataggatgtttccgaattgtagttgctacgcattatcttctagggaggtaggggatggaccccccaacccgtgttgcaatggtcagaaacatggtatcagttgcaaggaagaaggctcgtttgtgtctgggttacctaacggcaaacatcaagaagctatattactcgctggtccaagtaaccgaggtacccgtggcggggttgccccgctgcagactgcacctgccgtcctgaccggattctcggcgcagctctcgccaccctgttggtttgcccccgccttctcctccgttctcagtcttcacctgcctcagcccacctcgcgcgccattcgggctgcttgccccaccctacccgcccgtacgtgatcgtcggcgccctggtccctgctagcctcctattgctcccccatgctgctcccgtacctccccttggtgatggccgccgctctgggacgcgctccccccttctgtcccgccgagaaggcctctcccgggtaccgggtcccgggcacccaggctgacctccgcaccaccaatctgtactggtgagaaggtctcacccaggtacaggtacccgaa

SEQ ID NO: 42317 - DNA, 312 bp, Zea mays
  Clone ID: MRT4577_138594C.1
tttttctttttttttttttttttttttttttttttggttttttttttttttttggaggcaattacccacttttttgggatttagaattacaggctccaagggacacaatacagcatttaaacccacacggggcactggcctggaaacccaatctgacgccttattttcccgcacaggatagaatcccgggggacacgggcaggctccaagccagggccagggccaggaacaccacggagcagggggaattccgggggacccccaaaggggcaaggagagggacccccttgctacaagggggacctttggggc

SEQ ID NO: 42318 - DNA, 797 bp, Zea mays
  unsure (1)..(797): unsure at all n locations
  Clone ID: MRT4577_138595C.1
ccggccgggagcggacatttgcgccttgggtccttcgactcccaaatcctccaaaagaaaaagcactgactggttcttctcagacagtcctgcgacgtggcctggtagaatcgctacattgaactgtcgcgggttgtcgcgccttgctcgctgacgtcgctcggcacacctttggactaccggggaaccgtgaccttcttgaagcatccataccttactcacatttcttaacgagtggctgtttccctttcatctcacaatccgcagtcttcttcttgcttcaattcttctccctgtagactttacctatttacaactatggacaccctactcaccgctgagatatacgcaaactcaccccgcttccggcggcggtcgagtacagccgtcgatgcaatccacgacctgcctgctagggaagaaatggcgcctgcccaactctatagcacagagtcgggccgcctcttccattcgggcaggatagtcatcgccacctgcggactcccggctcgaggaaagacgcacacctctgttgccctggcccgctacctgcgctggctcggagtcaagactcacgtgtttcatcttggcgactaccgtcgcgctacgctaagtccgggcatggacgtacctgaagactacttcttcctcaacgcagcaccacagtccgtcttgcttcgcaacaagattntgaaaaaatgtcgcgacgatatctatcattntctggagaaacgacaaggtcaggtagccatttacgatgcggtcaacgccatcagccagggccgtcggtcgttagc

SEQ ID NO: 42319 - DNA, 780 bp, Zea mays
  unsure (1)..(780): unsure at all n locations
  Clone ID: MRT4577_138596C.1
ctcgaggccggccgggacctttgcctttatcttcttcctgcaccacgatgcggctcgacgcatggagcgtgaagcaaagcacacgccccctctggcccctcttctcacttgcccctccctcgcctcgttccattccatctcgccactccattctctctctctctctctcttcttcgatcgaggagagcccatacacatccagccagcacagtagcctgcctgcgtgcctagtccatctcgtgtgcagcaacttcaactactagtacatcgcggcagctcctgctgtttcggccggctttatggccatcacctcacctgcagcaacttcaactactagtactcgttacagccacagcggctgaccacagcgcgcgcagtaactctgctgcagtcacctccgtcacctgttacgtcgccgtcgcgtcgccatggatcatcggtccttgatggggatgatgcatcatgcatgggaatgggagtgagtgctcgaggcaatatcgagagagattttctggtaccgcgcgctgcattctcgccgccctgtttgtgagttgctcagcaggcagcagctggtgtcggtgctggctcttgatctggatcttgccatcttagatcgcggcagcgagaagcatgatacctgctgggcgtttctttattattgcatctcgttgatccggtccgtggtggtggacgactggtggtgcgcgcgcgcaagatgagcatcccgcacctgttccggtgccccatcagnctggacatcttcacggacccggtgacgct

SEQ ID NO: 42320 - DNA, 457 bp, Zea mays
  Clone ID: MRT4577_138597C.1
cccgggtcgacccacgcgtacgcggacgcgtgggctgaactgtccgtcggcgtctaggcggccccgcgcgtcggacatccactcgctcctgaggtcgatgagcctctggccggcgtcgttgacggtgccgtcggcgttgacgagcgcggcgtcctgcctacacatgtggccctgcatgaacccccagagcacgacgccctgcaccgccgggtgcgcgaacgcctcgcgcaggaccacctctaggtcgtcggcgcggagcgcgtcatcgggctcgcagacgtcgacctccgtgaaccagacgggcaagccggtggcggcgtagaccgtgtcgagcgcgtcgcagatgacctcggcgacggggtgggtgacgtggccctgcatcccgacgccgtcgacccgggcgccgtcccgctgcagggctcggacgaggtcgacgtaccgctgcggcgtggtggac

SEQ ID NO: 42321 - DNA, 926 bp, Zea mays
  Clone ID: MRT4577_138598C.1
ggtcctcctcttgcctctccctccctccataggccctagcccatagccccgtcgtcgcaatcgcagtcgccacccgccgccgttcctccggcaagccgtccgtctccgccgcccgccccatccaggagaagcctgccaccagaacattcaactggccttcgttggaaatccgtccgttccccacaactgaactgacaggccacccatggcgctgctccgcgccgccgtatccgagctccgccgccggggccgcggggctcttacccctctcccggcgctgtcatctctcctctcctcgctgtctccccggagcccagcctccacccgccccgagcctaataacccccacgccgaccggcgtcacgtcatcgcgctccgccggtgcccgccgctcccggcgtcggccgtcctcgcccccgagctgctccacgccaggggtctcctcccgaggcactggtcgcacgcctcaccgctctccacctcctcctcctcttccagacccgcggacaaggcgcagctcacgtgggtggacaagtggatcccggaggcggcgcggccgtacgccatgctcgcccgcctcgacaaacccattgggacctggctcctcgcctggccctgcatgtggtcgatcacaatagcagcaatgccaggggatttgccagacttgaaaatgctggcactcttcggatgtggagctgtccttctcaggggggctggttgcacggtgaatgatcttctggatcgcgacattgataataaggttgagcgcaccagcttttactcctttaagagtgggcttccttggaattcagcttctattgggactgggcattcttctacaattgaataactacagtcgtattctgggggcgtcttcacttgttctggtcttctcgtatcccctgatgaagagttcacattttggc

SEQ ID NO: 42322 - DNA, 203 bp, Zea mays
  unsure (1)..(203): unsure at all n locations
  Clone ID: MRT4577_13859C.1
gaannnggggccgacccacgcttccggcccttctccggccaccacttcaaatttttttatcttcacctcgtcaaggataagttcgaggggttcttcacattttgtcgcggcgcttccaaccaccacctccactatggtcaccacaaaagctactgttttcttttgttcaagaccattgtcgattatgacatttacaccttcac

SEQ ID NO: 42323 - DNA, 427 bp, Zea mays
  unsure (1)..(427): unsure at all n locations
  Clone ID: MRT4577_1385C.1
caatcctatgccctatatcgcgcttacagaagccaccacagactcggcttaaggctaggtgcttagtgcaatcatcgccgccatgaaaaacaggggaaaaccaagccgccgcacccggagttcatccacaccagctctcaacctcgggggttttgctaagggagcttcgttgggacgcacagaaggagattgtgccctcgctggggaagtctggagattcctcgttgacgttgagggaagccgcggagttactgcacaacgtgtctagcatcatccatgtctcaatcttcggtaagaatctgcaccattagtttgttgtatgcctagggtcatttagcatgtagccacacgatcgtttggacaccagaatttgtgggcgagtttcgtcgacgatggcgccgncgcgggagcagaatgcgtcatgatc

SEQ ID NO: 42324 - DNA, 313 bp, Zea mays
  Clone ID: MRT4577_138600C.1
cttcttcctttttttggatgaacgcactaggctctttactgatattcagtaagttctttatcttacctgttctgaatacataggggaaaactgccggactagtttcaaagcccttatatactgtatgtcggccttcaactaggaaggaaaaagaagaccaaaaaacaacttggaacgccaataagagcccatgtagcagcttgctcgaggccgtcacaaaacatataatctctgacggaacggagaactgcacttcgttggggccaaccctcactgcaaagatcgcccactatctggcccccttgctctgaaa

SEQ ID NO: 42325 - DNA, 173 bp, Zea mays
  unsure (1)..(173): unsure at all n locations
  Clone ID: MRT4577_138601C.1
ctcaaatggtacgcatcctctancacatcattaagcacaccccctatgttggttactcacatataaactagtacacttgtcatctccataccgcacaattcttaatatatatttcttccatttattaacacgttcatccgctataatcgataagctataaatcactaactaac

SEQ ID NO: 42326 - DNA, 879 bp, Zea mays
  Clone ID: MRT4577_138602C.1
cagcagtcgaatcgcactccgatgcgcgatgaggacggctctcacgcacgcgccaaaggcaagggggcgcagacgccacagcaccgccaagcaaagcaactagctaaactacagctacagctccagttcctgtatactagagatgctcacgttacattggaacagcagaagcgccgtgacgatcgatctagcctgcaaatctccgccccgcaccgaacggaaggaagaacgtaaggctcgatcgaggtgctaaaggaacaagactacgagagcattaaagcaggagagaaaataataaaaaaaataataatcttctctttacacaaggttcgttcgtggttccctaattaagaccgcggaggcggatcgagcgtctcttgacctgctcggcggcgtctgcttcccctcctcctcctcctcctcctccccacacggcttgctgctcgcgtccagctagcgtgtcctgcatgcggctccgcagccctccccggcgccattgcatcagggacaccgagggctcaggcgtcaggcgtactcgcgccagcacaccagcatcgtgacgcagcggcgcatgatgtagaaccgcgcgcgctgctccttgacgagccgcgcgcaccgcccggagaaggacgaccggcccttgtcggcgccgcgcacgcccatgcccgccttgccgccgctcctcttcctgctgaacagcctgctgctgcacggctttctgatcctcggctgctgctgctgctgcgaagagctccatggatggatggatggatgtccagtggagtgaggcgagtgagtgagtgagtgagatgtgtgtgttgatctgcggtggtcttgtatgtgggggaagcgcatgctctagggcttattttatagacg

SEQ ID NO: 42327 - DNA, 302 bp, Zea mays
  Clone ID: MRT4577_138603C.1
gaaaacccaaaatgatacattaagggcccgattttaaaggacacaactgatgattttagttaaataaactccaaatgggcaacaagacaaaaaaacaacccttcagtcccaattgatgaatcttttttaatcatacaaatgtgaaaattaagttcacaactaaaaccctaacgatacaagaaatgcatttgtcgccacaaactcaggcattattttactcctttgactcaacctcaaaactttttttattgcccttccttgagtacctaaagttcctaaaaaacttggggtccatccccttg

SEQ ID NO: 42328 - DNA, 260 bp, Zea mays
  Clone ID: MRT4577_138604C.1
gtgacccccaggtggttgaaccggccctaggggcggttcaaccggtgtcaggacctgtttttgcagtctgacctgcactctggcagactgtctgtcagcctacccaggcggttgagccagtcttaggggcagttcaaccggtcttggttaacttgaccagtctgcatgtcagtcagccagtcagtctgacagtcagactggcagacagtctgcctgacctgtcaggggcggttcaaccgccctgggggcggttcaaccgg

SEQ ID NO: 42329 - DNA, 645 bp, Zea mays
  Clone ID: MRT4577_138605C.1
actttcttttttttttttttttttttttttaactcttttttttttttttttttttttttttttttttttttttttttttttttttttttttaaaaaaccggggggcttttacaaacaacccacaagcggggcaaaaaggtcgggcccctttcataaatttattgggggggggggggcttttaaacttgcccccaacccccccaacatacccccgggggggggggcccctaaaaacatcggcccttcaagttcatttaaggccctgcctcttggggggggaggaagggggggttccccccaaacccctgggcaacccaaaacatggtccctcaaaaccctgacatgggggagcccaggggggcccccaaaaaagcggccccgcccctcgaaaacacaccggggggtttattcggaaaaaggtaccagggaaaccgccctttccaaataggacccggggcgggacccccccaagggggaattccaaccccccggggggcggtactaggggatcccagcccgggaccaagcgggggggaaacaggggcaaaacgggtccccgggggaaattggtatccggtcacaattcccacaacatacgaaccggaagcaaaaaggggaaagcccggggggcccaatgggggggcc

SEQ ID NO: 42330 - DNA, 255 bp, Zea mays
  Clone ID: MRT4577_138606C.1
gccggccggttttgtacatcaaaactactatccttcaacacactaactgcaccaagccgtgcttccttcttgacacagcaaccgttgctgcctgtctaccagcaaggttgcggataacctcgcaaccgtcttacgactacagccatctggttggcgttccgccaactcgtatttgacaaacccagaagcctcctaccaacaacacgttattgggggtgccctcaattagattgcttatcacatcgtaattccata

SEQ ID NO: 42331 - DNA, 261 bp, Zea mays
  Clone ID: MRT4577_138607C.1
ctttaatttcagagctaattgaagaatttggtaatggtggcaaaggaaaaattaaggagtctgcttccacttccaagtctcaagcaacagcaactagcagtaggtgcctctccaaaggtatatatattttgttgtatgagcccataactgtttactggtatgactatgagcgcatgactgtttattgctatgagctgcactgtttacttatactccatccgtttctttttaattgtcgctggatagttcaattttgcacta

SEQ ID NO: 42332 - DNA, 461 bp, Zea mays
  unsure (1)..(461): unsure at all n locations
  Clone ID: MRT4577_138608C.1
attattcttaaatttaatacctttttcgaaattgacggttgcatattgcctgaaactttatgtagctactgaggaaatactagatgttgtctattgatttatggaacatcgctcatgactagactataagantacgcatctagtcaggatggctccaggcagctacgcggtgtatactcgcgaggcatatgagggatcagtgcgagcgtggtggggtgggaggcggtgtgtcggcatctctgtacgatttcatgatgtacacgacggattggtctctgcgggtccatgtgttcacatactttcctgtgctctgtagaaacatcacttagtggatgcacgatgcacgactactgcaggagatgcctatggagaatgagtggacggcgttgccagatgattgcagctggaagtacacacaccaaggtgcgatacgcatcatgcttaaggagtatgtaccaata

SEQ ID NO: 42333 - DNA, 513 bp, Zea mays
  Clone ID: MRT4577_138609C.1
atttctagattcttaagaaaaagaacaaacaaaaaaaaaaaaaaaaaaaaaaaaaaaaaaaaaaaaaaaaaaaaaaaaaaaaaaaaaagtttgttcttggcccggccggccggctcgaagggggggggttttgggggtttccttccccctggcggggcggcctcgggcttgcttttgagggggcccgtgttggccctctttttgggccgttttccggtgccctgcccgggcctttgcctccgcggggcctgggtgagccctggctttccccaccttattcgcctggcagcccttccccttttccccggctgggggaatggtgagggggcccgccccgttcccctttccttccatttgcccagcctgattggggggggacgcccccgtgctcggccctttaagcgcgctgggtgggcgtggttctcccaggttacccgctccctttcccagcccccttccccccgcccctttcctttttttcccttcctttctggccccgttcgcgggctttcc

SEQ ID NO: 42334 - DNA, 484 bp, Zea mays
  Clone ID: MRT4577_13860C.1
tcacatgtgtaacttatgtaattaaacctaattggccatatgcatcgcattgtgcgttttattattaattatgatctctcattttatttgggttggtattcacttgtacctagtaactgctaataaaatttgatctactcattaaaaagcaatgctcagctataaccattatttgttcatcagcctgacactatacatgaaccccaccgtaagtgagctcatgcacattattccatacacttgttgagcgatgaacttttgtgagctcactcttgcgataacccccctaccaccacacacacacataggtaaagagcaggtggccccggaggaagattactacgagaagtttgatgaggtataggtgttgtctcccagtcgacttgatggcgtcaaggaaataatattaattcgcttcatttactctcagttattttgtatgacattttcgatatgtaataaagtttgtgacatttatctcaac

SEQ ID NO: 42335 - DNA, 320 bp, Zea mays
  Clone ID: MRT4577_138610C.1
aaaaaaacaaaaaacggggggcccccgggggccgggggggcccaaaccccaggggtccccccccccaaaaccccccgggggggggaaattttgtttgggaccgttccagaaaactggccccccccccttaaccccggggccaattaaaagcccctttcgcggcttggggggttttgtcccccctggtcccgggaattctttaaaggggtaaaaggaacccccaacgggccgggtttcctccttttcccctttgaaacctttaagggccaaccttgtctttttttttaaaaacccccctctccccaaattggttttttttt

SEQ ID NO: 42336 - DNA, 532 bp, Zea mays
  Clone ID: MRT4577_138611C.1
atactatgactcatgcttacgcctatctacttagaatcgcaatcaactgtaactcctctgaagtgaccactatggatgaaatatcgcctccatgaagcatgtgttgatgaaggaaaataaggaacatcaaaaccataaccatctctgctcgccttgtgcaaatacaacgtcaccatttagccgtgtctgcatcacatcacttctgctgcacatctcatgaacctcgtgcaaatgcataagaacgacttactcctacatcgatgcatcattctgtcaaaattgagatccggacagaacaccaactcaaaggccacatgaaatttcaccgacgataacgatgtcttatacgactgtgggaatcctgctcacccaatgacgtgcacatgaccacctacgatcatgccacacccacactaacgaactctcctgtacaagtaataaaccaacaactgtattactaccacatctaaaactactgcataatgattgtgaaactactgctgacgtccagcagaaaacgtatcctgtaaca

SEQ ID NO: 42337 - DNA, 559 bp, Zea mays
  unsure (1)..(559): unsure at all n locations
  Clone ID: MRT4577_138612C.1
ggggggtgggggggggtttaaatttttttgtgggtttttttttttttttttttttttttttttttttttttttttttttttttttttaaaggaaaaaagagggaaccggttttgggggggacagcccaaataaacctcccctttcggggggttgcggggggaaacttctctttttccccctttccaaaaattcaggggcgaagggtacaaaaagggcaacccaacagggggcttttttttcggggccccccggggtttgggcaaggggccccacaacaccggggggggcaaattcattagcccgggcatttccaccttaataaaccacatttggccccaaagatcactcaaaacggtctggggggccgggggcctcattggcttcggtttctgaaccctcaatggcttcgttttcgggctttncaggggccccatggggcggatgggtttccttgtgggggggcccaatcagggtcggggggggcgagattcttcccgcaaggggttttaagggggggggaggcctgtggggggttaccccgccccttttggggatccc

SEQ ID NO: 42338 - DNA, 416 bp, Zea mays
  Clone ID: MRT4577_138613C.1
cccacgcgtccgcaaatccatggcgtgcctgttgactgggcattgggtgctttcattgtgcagacgacgatgaacagaacagagtggagaaaacctcgtctgaagacgatctacgatatggagaaaggcaggtacatcataacaagggtcagccaatgagtcgcgcacatcagcgttgggagtgggtggactttctgcagcggagcactattgaccatgtatgtagattttcctaaattgatttcttacttagtggccaactacctccagcatgttgccttgcggagtcaacttgttgagtttgagcagcaacccctgtatatgatagaaggatgcgggttgccgtggcatttgtgcatgttcagtgttgtatgtaatgttgctaaactgttgttgatgtaattagaattttgtgc

SEQ ID NO: 42339 - DNA, 1158 bp, Zea mays
  Clone ID: MRT4577_138614C.1
atttgatttctcaagctaaacacccggatccttgcactccaaggggatttacacgcatagcaggatcagctaaacttcctgttggtgttcttgagccgaaggttgaatacagaccttttgctcattctgtggggaacttctctgagtgtagatctgcagcactaacactactgcaaaaaggaaatgagggatgtacatatcatgaatgccgccttggagcagcatttgtaccagagttggaagggaaatttttggcgacagaaaacttttaccatacttcaaagttctttggtctgagttcgaagcccttcctttctgatctgatggtggctgccggccgggtttgccatggggattggtcgaagattaaaaataagtacagttcttttgatgacggacaactgcttcttttttgcttttcctcagcatatattattgctctactgcatgatacgcttaaaatgccactggatcataaaaggattgatgttgtaaaccaaatccatggcgtgcctgttgactgggcattgggtgctttcattgtgcagacgacgatgaacagaacagagtactcagattcatcagtttcatatctaaacagctatgactctcctggcttggttccgcttctgttcattattgtggttgtatttacagcattgtccattctaaggtggagaaaacctcgtctgaagacgatctacgatatggagaaaggcaggtacatcataacaagggtcagccaatgagtcgcgcacatcagcgttgggagtgggtggactttctgcagcggagcactattgaccatgtatgtagattttcctaaattgatttcttacttagtggccaactacctccagcatgttgccttgcggagtcaacttgttgagtttgagcagcaacccctgtatatgatagaaggatgcgggttgccgtggcatttgtgcatgttcagtgttgtatgtaatgttgctaaactgttgttgatgtaattagaattttgtgcatgggcatccatccgatgatgtaatcctgagataaccatgtgtctaatgatcgattgaagttctctgccatggatcatggatggcagggcagctgtatctaattgtttcatgtcaaatcactgatgttatgtaatcctaagatattatttct

SEQ ID NO: 42340 - DNA, 483 bp, Zea mays
  Clone ID: MRT4577_138615C.1
gggggaaaacccccccaccaaaagggtttccccttcaaactttgaaccaaattggccccccgggccccggggggggatcccttaaacacccttttcaccccaaaaaacccccgggggggaccccggggggggggttttaaaaccccggggggggcccccccccccctactttaaggggccggggggccaaaagccccctttccccaaaaaggggcacccactctttggtgcctcaatttccggccacgcgctttttgcttccgccggaccacaaaaagcacgcggaacgggggattgggggggggtccccctcccctgggggtgccccccgccgtgggcgggggcgcgccacccccccgccccgcgggtgtcccgctcccccccagccccgggggcggggccgggggcggggcggcgccctcggtgccgggggtccgctggccgggcggggcgcgccccgcgggtggggggggggggcgcggg

SEQ ID NO: 42341 - DNA, 352 bp, Zea mays
  Clone ID: MRT4577_138616C.1
ggggacaaacccttggggcccttttttaataaaggtcccaaaggttggttgccccacccaaaaacttctgggtaaaaacccatgctgtttggcatttggcagggcccaaggccctttcaaaaattgcttaccgcccaccaaccaacattttttttggttgttaaaagaaaaacccttctttgccccacattgggggaattattggccggtataatttaaccggcaagttttctttgggcctttaaaaaccctttcccccttttagaaaatctggaaccggtggccgaaggttgccccaataaaaacttgggtgggggggttgaaacccggttttggggttttaaatttcttt

SEQ ID NO: 42342 - DNA, 1702 bp, Zea mays
  Clone ID: MRT4577_138617C.1
ggaatggtgacccttgtgcaccgagggcatgggatgcatgggagggagttacttgccatcgcggtgacaaagggcttgtgataacacaactggatctggcgagtcaaggactaaaaggttacatcaccgatgaaataagtcatcttaaagacttggtaagcttgaatttgagctataattcactgactggaagcttaccacctggtttaggtcaaccttcacttgtgtcactggatatttcatcaaatgagtttactggaagcattcctggaaccataggttcatccaagttacagactgcattactaaacaacaatcaactcgatgggcaagttccagaaagactttactcaattggcgtgcatggtggcgtgatagagtaatatatccttacttagtcttcttgtaaacgaaacttcaacttcttacttgtgatgtcagatatggttagaaagatttactatgctcagatgataatcgtcattatttattagcctattttatgctagctcctgaacaggtccaagaatgaagggtttaggttctatcatgttgagtaatgtaattattatggtatcatcagagtagagtagaccaaatcttcaaactgcttagcaaaataggtctgactgtgatattccgtggtcttgcatcttcactcaggttccatgccatggcaggtccgcaggtatatatgttttgaatcaattttgcacgtgtcaccagcatggcggccttgcattttcgctcaggttccataccataccatggcagttacactgccagtttgagatattcgaaatgtagttcgtgtagcgcatatgtgcttgtatcctgtaatatgggggcatatgaggcagtcatttaatagttcgtgtagcgcaccgattcttttttacttttgaccgaggggtctccagatagtttagcttacgcttgtgctcaatgaatcatgtcaaggctttctattgattttttttttgtatagaacctaacaaaattgtactaaccgactttggagcatcgtttgggtttgttctgctcgtcatacttatagtggtctacatactgtgcatcagaagggggccatatgactatgattttgacttccctcaagatttgacctccatatcagcaatatcagcgaaaaggaataggtaccagagggcaaaatccgtgatgcttgctgagatggaggcacataacccggatggtttctacacaaacgggagccctcactgaatggcatgctcagaagtcggtcgcactcactgatggccatattctttgaggaagcactcaccgtggtcttgcatcttcactcaggttccatgccatggcaggtccgcaggtatatatatgttttgaatcaattttgcacgtgtcaccagcatggcggccttgcattttcactcaggttccataccataccatggcagttacactcacagtttgagatattcgaaatgtagcatatgtgcttgtatcctgtaatatgggggcatatgaggcagtcatttagtagttcgtgtagcgcaccgattctttttacttgaccgaggagtctccagatagtttagcttacgcttgtgctctcaatgaatcatgtcaaggctttctattgaattttttttttgtatagaacctgacatgccatggtattactaaccgactttgggcagtgagaggttcattaggttgc

SEQ ID NO: 42343 - DNA, 330 bp, Zea mays
  Clone ID: MRT4577_138618C.1
gacccactcgtccgcttgggcgtccggtactatggggatctcttttgaactgagccacatgatcctgatcggcccgaatgtctcctaaccggacgatatcatcacctcgtaccatatcctgacactgaagtggcacgctgacaagcactcgccgtcgtacaggccgtaagcctatgcgcgcttcaaggccatcagcgaggcctactacgcgctcctggaccatcaagacaacaggtgcgcgttctagctgtgcaacaacggtcgtacgggtgataggactcgcagcgccttcgctggcgcacacggctgccatggccgaggatgaggatg

SEQ ID NO: 42344 - DNA, 628 bp, Zea mays
  Clone ID: MRT4577_138619C.1
gggctcatggactgtggtccatgtttgagtaaacagtccaccggggaaattgcctccagactccagatcccctctgcggcaggctcggctccttcgttgtttgtactcacggaaaccatacaccttcggaacaatcctgaaaatcccttgttcttatctctcgaaataagtttcttttttttccatcaaaaaggaaaaagaattgtaagaaggttcaacgccggtgtcacctcacctcagttacttactatacgatacaacgacgatgggtatttctttgaatatctccttacaaggggaaacaaaaataaagagtgtttttctctccatgattgctgccaatcatacacctacatgtcagtgatgtcacagagctcaacgacaggctctttttttttcttttcaatttgcttgatccagacgccttagtagcgtgacagcataccccgccatactattattattgctattccaaaaaaaaaaaaaccaacataaacttcctgatcctgcagtctgcactacagatctctcgtttacgtgtacagcacacgttacaatacaggcccacatacataaatacaaatacgcagcaagtccaccaatcgcactgcattattagcccccccgt

SEQ ID NO: 42345 - DNA, 733 bp, Zea mays
  Clone ID: MRT4577_13861C.1
ctctcattctcgtctccccccatgctagctgctgcagctctcaagctagctggcagctagggtttacaccgatccggggtccggtcgccgccggccggcggaagcgggcaatcgagctccgcgacgtcgagatctgcttaattgctaggtggtcgccgcgccggcagccccggcacagagaaagtcaattgctctttgcaggggttgctgctcgttttaaaagagatcctttgcagtggatgatacaccgacacgcagctagccagcagggacaccgcgagatggcgggcgccgtcgggctaacaagacgatgataaggggcggcaaccaccagcaggcggcggacgtcgaggaggagctagcccggaacagcaggcacgccgccgccgtggcgacgtcgcggcaatggtcggcgcagacggagtcgcgcatcgtgcgcgtctcccgcgtcttcggcggcaaggaccgccacagcaaggtgaagaccgtcaagggcctgcgcgaccggcgggtgcgcctctccgtgccgacggcgatccagctctacgacctgcaggaccgcctcggcctcaaccagcctagcaaggtcgtcgactggctgctcaacgccgcgcgccacgagatcgacaagctgccgccgctgcagttcccgccgcaggacctcatggttggtcacctgacgccccacaacatgccgctgatggtgcacgacgagaagttcggacacctcgcc

SEQ ID NO: 42346 - DNA, 290 bp, Zea mays
  Clone ID: MRT4577_138620C.1
agggaaataataacaaccgggagaacaaacaggggcccaaaagcaaccccccccccgggccccctaaacatttttgtgcttgcagcataataacagctttttctttttattaacgactcaaattttcagggccatgcccttggtgacttggattaaaaagggaaaaaacagggggggggggtgatctttttttgggcacgtgggtttaaaaaccgggggattttttaaattcagaacggctaattttcatagcaccggtggggataagtgtttattggccttttttgttt

SEQ ID NO: 42347 - DNA, 296 bp, Zea mays
  Clone ID: MRT4577_138621C.1
gatgataacaaggtgtcgtatgcagtatgctaatgttctggatccaggatccacacataatggatgtaaatgttgagcttgtagtttcccccagctagctagctagatttctacttccgtccgcgcgcgctcatctgcgcacgcacgtgtgcccgtccgcaatggaggttcgaggccgacctgcttgtgcgttcctccctgaacggcgagggtctgtgcatgccgatgcctcgcgccgacccggtgaactggggcaaggccggggagggcctggtcgggagccacctggaccaggt

SEQ ID NO: 42348 - DNA, 379 bp, Zea mays
  Clone ID: MRT4577_138622C.1
cccacgcgtccgcccacgcgtccgcccacgctttcgaagaaatcagatgaagtgaccaagagcaatgtgactatataataataataaaattaacagaagaggtacatacagtttcactttaattttgaaatgcaacagcagcttgatgtctctattgaaccctagaaacaactgaaggagaaaatactcttccacaaggaataggattctcatttgtgctagcagaatcagagttaattgcatcattagttctaggaacctgctggggtgaactttaccacccagaagaggcataaccaatttcttagaaagaccaccactgttaatcttgtcatcaatggtcaatatatttcttttggacaagtcatttattataagt

SEQ ID NO: 42349 - DNA, 276 bp, Zea mays
  unsure (1)..(276): unsure at all n locations
  Clone ID: MRT4577_138623C.1
tttttnnatnttttttttttttattttttttttttccttcttcttttttttattcggcgcgtttttttttagaacaaggggggttttttttgctcccaataataaacctctcacatttttatacataccccgcccacaatattataccccttaaggttttggcaaaaataatgtcagtgcaaaacaaaaaattcaaatgcccttgtaacatgtttagagaaaaaaaaaaaacactttctggttaggggagcaaactttttctgaaagcaccccaat

SEQ ID NO: 42350 - DNA, 847 bp, Zea mays
  unsure (1)..(847): unsure at all n locations
  Clone ID: MRT4577_138624C.1
actttagtatctagcgcctcgtctaggcacatcacaagtcttttaccggcctctctctcatgattcctgggtggtcttttcattcttctcatccaaatctaccatagagatgcacagtgtaacaaacttaccaatatatgagaagaagcctcagttcttcgatttactcacagaagattcgtcgtcttctttctatcctgccacaggtactactacagatgcacctacaaagacaacatgaactgcccggccaccaagcagattcagcagaaagatcacagcgaccccccattgtaccaagtcacatactacaacgagcactcatgcaacagcgccttccttgccctcactcccacagagttccagctgcagaccgcatctggaaaggcagtctccatctgctttgattcatccggggctcaggagccgggagccaatgcgagctcgccttcttcgagtgcggcgccacgcgccacgccttcggagagcaagaacaagccccttgcgctgcgttcagaggcgctttcttcctgggcccccggcgttgtggagcaaaagacggcctgtgctgatctccagtcctgcagcaccgagtgccaagatgcatacatttcagaagacatagatgcagggagattcggttctatcagattcttccattttttgtaaatggatcagtggaagacaattgatcttacctcaaagaactaatatgatacacatgttttttcccatctacacgcatgctagagcaccagatacttgcatgtgggatgtggncaagattttcttagntcaattgaaatggaataccactgctaattcagaaggcagagttcatttctgc

SEQ ID NO: 42351 - DNA, 229 bp, Zea mays
  Clone ID: MRT4577_138625C.1
gcttctctgaatatcttctaaatcccattctcatgtgctcccattctcatctgagattgataatgttcaaaactcataaaaataatatgaagtgcatttgctaagtttagcattacattctcttgtacatcagctcctttgtgttatactttctcatatatttgctactgtgatgcattctcattgtgccgcatctgtatttgcattaactgccgcatctgtctagtag

SEQ ID NO: 42352 - DNA, 465 bp, Zea mays
  Clone ID: MRT4577_138626C.1
ggggaaaaagggacccctttttttggtatggagggacattttttttcccttttaaaaaaaaccatttaacttggttttgggagcccccccccctacatttatttaccccacggggggggggggaaacccaaaaaaaaacagttttttacaggggcaggaggggcaaaaaaaccggggttcctaaaacccccgttggggaccccccaacctttaaggggagctgggggggaactgaacggtttcaaccccccttccttttcttttaaaaaaaaaaaaggcaaaaaggaggggggccttggggaaaggggaccctattcacccccccttggggggcaaaaagaaacaaaagttctccataggggccccccctctaccaaaaaaggcccaaaggctgcctaaactgaaaaagcgggggggggaaccaccccccccttgggccccccttaaaaaggggggttccaaaaa

SEQ ID NO: 42353 - DNA, 1093 bp, Zea mays
  unsure (1)..(1093): unsure at all n locations
  Clone ID: MRT4577_138627C.1
aactcctctacctttcttttcctttcttcttcctcctccttcgtcttcctctcctctcctctcctctgcgcttcctttcttgctctgggactgggcaacaatgtcccccgtgccaagcccgcatcaatcacaacttctaggccatgaatcaaggtcagttttctgcttctttttatctttcttttctatatatgtgtgcggtcagttcaatccgagtaacctctcttgatttgtttcttctgaaatgaaacaaacaaaacttgcaggaaagagaagcgcatgaggaaggtggatacctttgcgccgcacaacgacggccaccaatggaggaagtacggcgagaagaagattaacaactgcaactttcccaggttcgcagcccacctttggtctcatcctcatcctcatttggtgatctgcatctgcataggttcccaaaaaaccattagtagtatctagcatccgtcttttcgtggcatatcacaaatctttcagccccctctctctgatagggagggcttttcattcttcacatccaaatctaccatagggatgcatagtgtaacaaacttaccaagatatgaagaagccatttactcacagattcgtcttcttctttctatcctgccacaggtactactacagatgcacctacaaagacaacatgaattgcccggccaccaagcagattcagcagaaagatcacagcgaccccccattgtaccaagtcacatactacaacgagcattcatgcaacagcgccttccttgccctcacccctacagagttccagctgcagaccgcatctgggaaggcagtctccatctgctttgattcatccggggctcaggagcccggagccaatgccagctcgccatcttcgagtgcggcgccacgcggcacgccttccgagagcaagaacaagccccttgcgctgcgttcagaggcgctttcttcctgggcccccggcgttgtggagcaaaagacggcctgtgctgatctccagtcctgcagcaccgagtgccaagatgcatacatttcagaagacatangatgcagggagattcggttctatcagattcttccatttttt

SEQ ID NO: 42354 - DNA, 414 bp, Zea mays
  Clone ID: MRT4577_138628C.1
gagttttttttttttttttttgtgagaagatggttggttggttaatttaccagcactaacaatgagacggtgtgtttaattaagcaagtactagtaggctagggtttgcagatgaccacgaagcacgggagcagcgccctcgggttcagcaggtacagctcctcgatgttggagtaggggccgaccttgccggcgagcgagtcgaagcccatcgtctgccccgcgaactccttgaggttgtccagcggcttgggcacgcggccggcgatcaccctgcacaccagcagcgccctgcgcgtggtgccactgacactgccagcgccagccccgtcggcgcccggcagcctcgatggactcgaaagcgcggccgctggtggacgtggtggacacgcccacgccggtcttgcctcgtgc

SEQ ID NO: 42355 - DNA, 648 bp, Zea mays
  Clone ID: MRT4577_138629C.1
cgggaatactgtaggtagatgcccacttcacagcgtctaaacggtcgacagcctgtttagacatcgtttaaatgctacacagtcatatgtagttttcatgtaatcgatcgtttactgtttatcctgtttaaatggctgttatgcctgttaagttggctgtttagctcatgcaatggctaaacgacaagtagccgactgtttaccttttaggataacactacttcacaggaaaccaaacatccactccgatctctggttttcttttcctttttggatgcccaagacagtgggtacgaagaggagaggagagaatgaggaagaccacaagaagctgtctgtccctcctgatcttctcttccactgctgccaccgttccaagaaccatctggaacttggtaatatcaggagtcaggacggagagctgaaagcaagggtcgagattagaatggggaaaagtgcatattatgactttctactgcatagtgaatatataaggactattagaggaaaagtatctaatgaaatgggtaaagatgttgccttttatgctggtttcccatgttatttagaccaatttaatattatatatttacaacttccttttcaacagtcaattatactccaccttttgtattctgattcctgagt

SEQ ID NO: 42356 - DNA, 430 bp, Zea mays
  Clone ID: MRT4577_13862C.1
ggggcaactgctacaagcaggtaactctttttattacaaaaaccccacctgaggggtcacaaaaaattccttttgacctggacccccggaaaaaacacacaccccaagtttaagcccgcccatcccccgtctaaaaaatttaaaacatgccaaaccccctggttttgccggatttttcttctaccacaaaaaaaggggggtggttcaaacccccatccggtgaaatttcccaaaaaccattttttttaaatttcggggagcaaaaaaaaccccccggttctattgccaaaaatgattggggccctttcaaaaaacccaaaaaaatccccgggctcaaaggcaattccaatgaaaaaaagtccatttggtccctcaaaaacccccaaaaaaaggccttatttctttgtaaacaaaccaaccaattgccccc

SEQ ID NO: 42357 - DNA, 222 bp, Zea mays
  Clone ID: MRT4577_138630C.1
gcaaagactagcaagtcgtatgtacattcgagcggataacaacagttatgacaaatgtgggccaaaattggacctgggtgatgctgaatatcttagggctcatggtgtgcaagagctcgatcatgcaatgcaacatcttgagcataaatatgaattcatgacatctgatcaccactatattagcggtaaacatgatgaggataaggctattgtgttccaaaa

SEQ ID NO: 42358 - DNA, 244 bp, Zea mays
  Clone ID: MRT4577_138631C.1
tcgggtcacgccggcgcgtggggagaggagcgccacatcatggtctgcaagatcgccgagaagtatctgtcggcgaaggcggcggcggcggtgcaggcgttgctgccggagtcggcggacggggagctgtctgcggtatgcgcgatggccgaccacgtgcgctggcactaccactgggccagctctctccactacgccaacaccccggcagtctccagcttcaagttgtctcgggactaccaca

SEQ ID NO: 42359 - DNA, 741 bp, Zea mays
  unsure (1)..(741): unsure at all n locations
  Clone ID: MRT4577_138632C.1
ccggccgggactgaccatcgttttaatccacgtcacctctttaatctaatacaacaactcaccaagccactcttttaagttggttaagtttcaaaacagcttcaccatgaaatatcagtctcttctccgtcattgactctggactcaggcgacatggatgctcccgtcatccagaaccaggacaagggcgctgtcgacgctgcctgtatgcaacgacccgacaggttcccgccgttcctgctgctgtccctgccgttccccaggatgacaacaacaccgtgcagcaagaacggttatcagagaagatacacgctccaccaagggtcactcaacgacctgngaacgccggttggtcaaaggatgctgatgcgttgaccgcttgacgaggaacacccgtccaggttggcaccatcaaggagaccatcagcaaggccgagtccggcgctcttgagaaaggcgctggcatcacccacatgcaccaataacggcgccatcatcaaccagctcactcacacgatgtcgatgaccagactcaaggatgttagacaaggtcgacatctctctccctgacgacaggatcattgtgaggccttgtgatcaaacttgtaaacgagatgcgatgctggcgtcaaggacatcctgagcactctcgactatacaagattcttcgggggctgtcctttaccctcatcttcccgtcttctcggtactctgatcaacctcgatgccaaactcatcggg

SEQ ID NO: 42360 - DNA, 577 bp, Zea mays
  Clone ID: MRT4577_138633C.1
cgccctccccgcgtccgcatccttgctcccctgtccggccgcccccccccccccccccccccccccccccccccccccccccccccccccccccccccccccccccccccccccccccccccccttttttgcaattaatcggccaaggccccccccctttaaattcctttttcttaaagatagcaaataggtttacctcccaaacagtcccagttttcaaaactcccaaggcagcgttcgtttacccccttgacagccttggcccaatcaccaacatttttgcccttattatccacccttgagggcagggtgtcacaaacccatcgccaattcggcatccccccttttatccttttgctagggggcaaaagctccttgggcttcctcctcccaagccaaacttgtgttttacttgcctcccatgaataccggacaggagccaaacccttttttacccccccccttatgaaagtcaaccatgggaaaccccaaccctagcatttttactgaaatgttcacctccctttttttaaatgtttatgtaatacaagtcttgcccaaccaaatcaattcaaat

SEQ ID NO: 42361 - DNA, 311 bp, Zea mays
  Clone ID: MRT4577_138635C.1
attcggctcgagcccagatcagactatgcggcctcttcgacggcgtgcccgacttcccgggcttatgcgccatgcattcctcaatctccgcgagaggaggacaagggctcctcttgccggcagagggtgtggagctactgctgggagcattggcgccagcggaaggttgctatccgcgcgcgttcaacttcggagactctctggctgacactggcaactacccgttcgtgtatggcaaacaggtcaccaagctccgtacaccatacagcgagaccttattccaccgggccaactggcgcgcctgcaactgg

SEQ ID NO: 42362 - DNA, 301 bp, Zea mays
  Clone ID: MRT4577_138636C.1
tccgtcctactcacctttcttctccccaccgctagcttctctaaggagtgaggagcagagtaatggatcttgaactgttgtggagtggtccacctgcactctcggtactgccatggatctgcggcggcctcgtggcctcggtgctgctctggcaagccgcccggctgctcgaccagctgtggtggcggccgaggcggctggagcgggcgctccgctcccagggcctccgcggcacgcggtaccgcttcctcctcggcgacgtcaacgactacgcccggcagaccaaggaggcgtcgtcggg

SEQ ID NO: 42363 - DNA, 1155 bp, Zea mays
  Clone ID: MRT4577_138637C.1
cgattcttgaccatcctgctgttctgccttctccgtccgcgccttcgagaaggccacagagcgaaggaattgcagagttttcttggcgcgaaagaaggggagagagagagagaaagacgaagatgtttatccagaaggcatggaggacggcggcgtttgggctctacggcttcaaccatttcacaaaatctggtttcctggagcatgcgaagaaattcagagaggaggatatgcagatccggttggatggaaaaaattgcctagtaactggagcgaattctggcattggttttgctacggctgagggcttggcttcacatggtgctaccgtctatatggtctgtcgtaacaaggagagaggggaggcagctctcaaccaaataagatccaaaactggcaatgcaaacgttcatctggagatatgtgacctttcatctatcaatcaagtaaaatcgtttgcaacaaagttcacttcgatggataaaccactccatgtcttggtaaacaatgctggcttattagagcacaagcatgagactacagcagaagggttggagctcaattttgctgtcaatgtagctgcaacatacactttaacagagctagttatgccgtcattggagaaagcggcaccagatgctcgtgtcatcacagttgcatcaggaggcatgtacaccgagccactgaacaaagacttacagttcaccgaaggcaccttcgatgggacgcaacagtatgctcgaaacaaaagagttcaggtggcactgactgaatggtgggctgagaaaagcggtgacaggggagtcggtttctacgccatgcatcctggatgggccgatacgcctggggtcgccaagagcttgcccggactgtcagagaggttgtctggaaacctgagaacaaatgacgaaggagctgatacagtggtttggttggcgttgcaacctaaggagaagttagcctcgggagccttttacttcgaccgtgctgaagcaccaaaacatttgaagtttgctgggactgcagattcgcacgctcagataaaccctatcgttgatagcattagatccatctgtggtctctctgttaatggttgagctgccaaagcaaaagtgatatacagctccatcgtcaatagcattagattcttttgtt

SEQ ID NO: 42364 - DNA, 247 bp, Zea mays
  Clone ID: MRT4577_138638C.1
cccaacaaggccacgatatccccggcaaatccaatacgccatttaaggacccccccaaggccaacatggccaagcaataagctaaaggtgggaatttgctccacaaagttttaccaccaggtgggagatatgccaagaaggagaccaaaccgatcattgtccagatttcgagcgtactggcctactatcacctccagggattattccaccggattttgagccccgggaatttccccttcaaaacagg

SEQ ID NO: 42365 - DNA, 281 bp, Zea mays
  Clone ID: MRT4577_138639C.1
agccgcgttcccagcagccgccaccgccgtcgccggggccgccggctgcttcgcactcggctacctcctgggcttcagccgcatcgcgcgccacggcggaggcccaagttcgggaccggcctccgatgacgattccgaggatgactcggggaaagatgatgacggaaactccggccgcagtcgcgcagcgaacaggacgagacggcagaagacggccgagctccggctgctctactgggcacggaacgtggtgaccgagtccgactcttgcagggaagcgg

SEQ ID NO: 42366 - DNA, 390 bp, Zea mays
  Clone ID: MRT4577_13863C.1
aaattgctgggacattaatgacaatccagactgcttactgccgcacagcagctgcacctgtctgcacaaaccttagagaaccgaatttaaaagcaaatactggtgccatcgtatattcgataagaagaaaccttattgaaaaatgactggcaggaaaacattacagtggacggctgcaattacagatgaagctccctaaaagaaagaaggaataccgaaatacatatgctggacaacaccggataggcggaagactgattattccctaaactctaaggtttcgaccattatacagactggctatgtgcaaaccacttggccataagggaggctaagcagatgtttctcttgacgaaacatgagctgatggattacgcatgaggatattac

SEQ ID NO: 42367 - DNA, 886 bp, Zea mays
  unsure (1)..(886): unsure at all n locations
  Clone ID: MRT4577_138640C.1
cggagaggctaggcggggacggcctgcccctgcgcccctgccatcttgcgcggcgcagcatcggccaccgaggcgcggcttctcgattcttgaccatcctgctgttctgccttctccgtccgcgccttcgagaaggccacagagcgaaggaattgcagagttttcttggcgcgaaagaaggagagagagagagagagagagagagagagagagagagagagagaggaagacgaagatgtttatccagaaggcatggaggacggcggcgtttgggctctacggcttcaaccatttcacaaaatctggtttcctggagcatgcgaagaaattcagagaggaggatatgcagatccggttggatggaaaaaattgcctagtaactggagcgaattctggcattggttttgctacggctgagggtttggcttcacatggtgctaccgtctatatggtctgtcgtaacaaggagagaggggaggcagctctcaaccaaataagatccaaaactggcaatgcaaatgttcatctggagatatgtgacctttcatctatcaatcaagtaaaatcgtttgcaacaaagttcacttcgatggataaaccactccatgtcttggtaaacaatgctggcttactagagcacaagcatgagattacagcagaagggttggagctcaattttgctgtcaatgtagctgcgacatacactttaacagagctagttatgccgtcattggagaaagcggcaccagatgctcgtgtcatcacagttgcatcaggaggcatgtacaccgagccactgaacaaagacttacagttcaccgaaggcaccttcgatgggacgcaacagtatgctcngaaacanagagttcaggtggcactgactgaa

SEQ ID NO: 42368 - DNA, 1662 bp, Zea mays
  Clone ID: MRT4577_138641C.1
ctgatgagtttattcttgacataataggtgcccttgaatatgatccaaaggttccagaagtgcaaaagcaccgtgcttttctaaaagatcatgtagttttcaaagaggccatacgtattgaaaatgtttctgttgtttcaaagattcatcaaacatacagaataggctatcttaaggatgttattctgccacgaatactggatgatgccactctagcaagttttaacacaatgatacattcaaataatgcttctgttatttccatgctaaaggatgacacaccctttataagacaactatttgctaggatgaggtcatcagatatttctatggaatcaaaacgagaattggttctgttcttgcatgaattttgcacacttagcaagagtctaccagttgttcagcaactgcgactgtttcgggatctttacaggtgaaggcgttttcgaaataatttctgatgtgttgcagagtcaagatagaaaaatcgtttcagctgggacagatatccttatactttttcttaatcaggaccctaacctattgaggtcatatattgtccaacaagaaggaaattctcttctaggacttctggttaaaggcatggtaactgacttcagtgaggaaatgcactgccagtttctagaaattctacgcatattgatggattcttttactacgtctggagcacatagagacgtagttattgagattttctacgaaagacatcttgactatttggttgatgtaatagcatcctcttgtcccccgaggagcttgtctcgatcatcatctaactcggtacatgttggtggaaatgctgaaggacactgtatcaagcctgagattttgttaaatgtttgtgaactgctgtgcttttgtgttgttcatcatccctacagaattaagtgtaattttcttatgaacaatgctatcgagaaaatccttacattgactcaacgaagggagaagtttttggttgtagcagctgttagatttatgcgtactattatatccagaaatgatgaccatctcattcgccatgttgtgaagttcaacttgctgaaaccaataattgatgtctttgttgacaatggggagagatataacatgctacattcaggagtactcgaattgttggaatacatacggaaggaaaatataaaagctctcactatctatgctattgagtctttctgggatgaacttgtcatctttgaacacttcggaagtattcaggccttcaaactcaagtatcaacagtacgtggagagtgctgaaccaatgttaaatgctagtgtgcctaacatgagaaagagggcagaacaaagaggtctagagaaggaagaggaagactacttcaataaggatagtgatgaagaagattcaggctccggccggcgggataaacatgcacagaaccagcatagcaagcctaagcccaaggtccctaatggaagtgaagggggtgacactgatggcgcctctagacctaaatctgctggacttgtggactatgacgatgatgcctctagccttttacgaatgcgaccgtccatgctcgccgagatcaagcttagggcatatttgggagtaaagtatttttatagtttcttgataatgctatgtttttaataatattttagtattttatatcataag

SEQ ID NO: 42369 - DNA, 2905 bp, Zea mays
  Clone ID: MRT4577_138642C.1
agctactgtttataatgctgcagttgacatgtgggcaatgggtgccattatcgcggagctattttccctccgacctcttttgcccgcaccatgcactactggcccacgcgtccggcggacttggcccgccgacccgctcctcgccccccccatcggccttcacggcgcccgcgcgtaaatcccccgtctcccccgcccgcggcggtcacccaccactgagccaatccgttttatggtttcatgttgttcgtcagaaggagttagaacgctaccagcagggatctgtaggacgcatccagggcgtcacgtgggcttgtatcccccaccccgcccccgggcgaacttcgagggctccggggctggctggttgcagcatggcccgatgtgcctttgatgcgatatggtttttacaaatccactgttcgttgtgtgcttggctagtcctgctctggtagttaccacagttgcctcagtgattacactataactgtgcagctgtagcacatttatttgagcatggtggatctgtttctctggcaacattccagtaatctttgtcttggtgctaatcagccagcagaagttaccatcaagacatctttggacacttggatctaacgcttagagctttgccttcgcatataggctctaggtttgggttttcgttttctgctagctttcttctactctaccactgtaagttttcagtctgatcggtccaaagtttggtgtgtattggttacgctgtccttcaccagccttcactttgcatggcgtgaccttagagaagacgtgttcaagattttgttgtcgcaaaagcatgggaatagcatacatagctttgagaggagtctccagtgactttggtgttgtaacatccaaagacactcctgttatacatatatgagtcctgttttttactatacaactgttctgaaataagggcagttctgtgcaccaccagcgaataaaatggagagatatacaattatcaacgaagttggtgatggaacatttgggagtgtttggcgtgcaaccaataaggaaagcggtgaagtggttgcgatcaagaagatgaagaaaaagtattattcttgggaagagtgcataaacctccgtgaagtgaagtccctgcgaaggatgaaccatccaaacattgtaaagctcaaagaagtcataagagagagtgatacgctgttctttgtttttgagtacatggaatgcagtctttatcagctgatgaagagcagagggaagcccttttcagagactgaaatccgaaactggtgctttcaaatatttcaagctctgagtcacatgcaccagcgtggatattttcaccgtgaccttaagcctgaaaatttgcttgttacaaaggaactcatcaagatagcggattttgggcttgctcgtgaaatttcttctgagccaccttatacggaatatgtgtccactcgttggtatcgtgcccctgaagttcttcttcaagctactgtttataatgctgcagttgacatgtgggcaatgggtgccattatcgcggagctattttcactgcgacctctttttcctggatcaagtgagccagatgaactttacaaaatctgtagcattattggcactccaaatcagcgtacttggcctgaaggactgcagctagcagcatctatgggttttcagttccctcagtgtgaaagtgtacatctttcggaagtggttcctttagcaagcaaagatgcaatcaatcttatctcgtggctttgctcatgggacccacgaagaaggccaacagcagtggaggttttgcagcatcccttctttcagccatgcttctatgtcccaccttcacttcgcttcaaatctactggatatgcatcaacgccaccatcagctggggctaaaggagctgttgatcagaagaacattaggagatactacatgggtactgtacccaatgcgaggccaacagttaattactcgtacttgagaaacaatgctcctgcaagagcagttggtgcacaaaggaaattggagttggattatcagctcccagagactaataaccataataaggtgacaaaggcagaagcgatgaaccagtcttggtccagaccagcagcagtaaggagcaatgcaggaaatcatcttgccaacgacctgaacccccgtgtacctgaccttgccgagaagctgtctcagttgtcaatgggccccaacagggtgtcgggtttgggttccgagaggtttgttagaacccatgagaacgctgccaagcgccccttgcccgtgggatccagggcgtggcatggtccagctgaccccttccggcgcccatacgagatgccaggtgatagaactctccttccaaggaatctcgttcgctgaggctgaagctgaagctcttcgcaagaaacatatccaacgctcgctgtcttcggagctactcttccccggctatttacctcgcaacaataaataaacaaccaaacttcgtttccagcagtgggtgttgctcagcattgtctgttaccgtgcttgtgcgtgacgaggataagaggcgtccgggtttgtgcaccccccccccccccccggggtcctcgagggctccagggctggttggttgcagcatggcccgatgtgtctccatgtgagatcgtttttttaattatgctgtgcgatgtgtgattggtaacactgcttcagttgttaccgctgcttgttcagtgggtttgtatgaactgtgacatgctccgctaaacgttattctaaatactggtatgcaaacatgtcgaaggtgaacaatcaatggtgtatgtagagtagacttaaatggtaactgccttgtttcattctttaaaaaacaactccagtcccaattcgcatggtaactgccctattttggtcc

SEQ ID NO: 42370 - DNA, 370 bp, Zea mays
  Clone ID: MRT4577_138643C.1
aataatttttttttttttttttttttttttttggtttttttttttcatatttcagcttattctccttccctagatgggggggggggggacaacagacacccaacccagcacccaacccattggaaaggaaaacaaaacacaacttaccccaaaaaaaaaagaaacagaaaaggaagccaaaccaaaactaaaatgaaaaacaggaagaagaaaccacaaatgaataacccaaaacataaagagcccaaaccggggagccaaatcagccacctgacccccccctagaagggagacacggacaagcccccccacagggagaaaaccatctatcagaggtgccccaaagcagcgccgaattaacggggagagg

SEQ ID NO: 42371 - DNA, 277 bp, Zea mays
  Clone ID: MRT4577_138644C.1
ctctgttttattattctcttgatgaacccgctgacagaggggcgatttcacactcgctttggacagagaggacaatgaccacattgactctgataaacatcatacaagactatatccacaaggcgatgttctaaacagtcattcgaggctatactatttgcaaatggtcttgctggacacaggggctgggctactagcaaattcatttgatgacaacacttgctttctagcctgaggaatcattagaatcctatgattacggggtaacaactacaga

SEQ ID NO: 42372 - DNA, 744 bp, Zea mays
  unsure (1)..(744): unsure at all n locations
  Clone ID: MRT4577_138645C.1
ctcgaggccggccgggaaagagtcgtcttacgcctaccacacgatgcgcgggtttctcacgctactcagcgttatgctgacctacaccactgcggtgtatgctaccgctctcacctacaaaatggatgcacacgaggtagcctgcttcttcgcaaccactgtgaacaaggggactaagctggccttttacttcgctatacaatccggtggttcgttcgatatcgattacaaagtcactggtcctggagataaagtcattatcgatggtacaaaggagcgtcagggtgactttgtcttcaccgcgaatgatgttggagagtacaagttctgtttcagcaacgagatgagcacatttgcggagaaggtggtggatttcgagattgccgtcgagaacgaagccgcccgcgccaagattccttccaagcagggctcctcccctgagcagacctccgtaatcgaagagtccattctcaagctttcatcacaactctcaacgatttcgcgcaaccaaaagtacttccgcacgcgcgagaaccgcaactttagcactgtcaagagcactgaaaagaggatattcaacttcagtctgatggagtccggcctgattgtgaccatggcagccctccaggtcttcattgtccgatttttcttccaaggtgccaggaaaggttacgtctgagcgttcctgcattgntttggtcagaggtgaagaaatcttttctttcagcatannatgcgagcact

SEQ ID NO: 42373 - DNA, 330 bp, Zea mays
  Clone ID: MRT4577_138646C.1
gtgatggctactggcagacacatcaggggctaccatatagccaacttggcaggggccctgatgcgttgttagtggaacaacatgttttaccattcgatctgcaagctgtggtaaacattgctgctttcttgagacaacagcacttgtggccattgtacgcacaggttgcgggaaacattaatgccttcttgcaacagcgacaattgctaccattctacccacagaatgtggcaaacattggtgacttcttacaacaacaacaattgctgccatttagccaacatgctttgacggatcctaccatactattgcaagcggccaccattggtg

SEQ ID NO: 42374 - DNA, 449 bp, Zea mays
  Clone ID: MRT4577_138647C.1
gcctccaaccccatttaacatttagggcccacaaaaacacacaaacggggggccaataaatacaaagaaaacaagggccatgtttgattggagttccttttcactaacagaaacaaaccattggggtaaaacaacacatgtttttcccaacactaacacttaaaccactcgacttttgagttttgacaactagttaaatgagggggataaaataaaacaacttatttgatttcccaaacgtaataaggggcgccacccacgggactttaaacagggcacaccagggacaccacatatttcccccataaaaaaaaagccatgaccaagtgcgggaccagcttaaagtacagttaatgtaagggagcatgttggttgtcaattcccccggttcataaaaaaccaacttggagggcacagctcctgtgccgggttcccatcctcatccttga

SEQ ID NO: 42375 - DNA, 540 bp, Zea mays
  Clone ID: MRT4577_138648C.1
agcactgcaagacgcgttagtatttctcatagacagaactgtacatacaccaagatttttggattttttaactcccccgtatcaaaaaaaaaagctcgctctctaactgactcatccgggccaccggccacaccgatcaccggaccgcccgctagctgtccgccgtttcccatgaaccacccaccgttgtcgagtccccgctgatctgggcaccactctctccacttccaccgttggccctggcggtgatgtcgagcatctgctcaaaggtgcccgcgtcgatggccttctcgacgtgatgcgtgagccccatgggtggccgcgcggtgaccacctgcagcaggagcacgccgagggagtagatgtccgacttgacgcccagcttgcccgtctgctggtactccgggtcgatgtagcagaaggtgcccgccgtcgccgtcagccggtactgcgtcacgttgtccgccaccgacggcggcaccaggcgtgccagcccgacgtcgctgatcttgctcacgtagttgcggtccagcaggatgt

SEQ ID NO: 42376 - DNA, 370 bp, Zea mays
  Clone ID: MRT4577_138649C.1
attcggctcgagagtagaattcacagtttttcaagtagaattcacagtttaattttgtctcaatacataaaatagtgttatattatatctgataataaagataatgttgattttgcggaaataacgaatgcccagcgtgtcgcacccattgtgcaagcagacgttctttgagggatgatcccaattatgatgcactgattgcagccctatatccagatattgataagtatgaggaagaggaatttgctttcagtgagtaggagaggattcagaataaaaaggtgacctcatctgcttttcggcgaacaactctttaaagaggaacaaaacaacaagtttttgaacgtaaacaaaacagtaagtttcatgt

SEQ ID NO: 42377 - DNA, 298 bp, Zea mays
  Clone ID: MRT4577_13864C.1
aagagctctaaggcagagagctttcctgacttagtgtttcgactatattaacctaactatctaaaactcaaaaaccatcacatcacatacatcaacccaccaatcgcttgataacctgtttgatatctcatcaaatccaaaaaccacaaaacagtcaataattatatgcaagtgccaactgaccacactgacttgcatcaccacctacagttttcttacaacaccccatgaaccatacctacccatctcttcaagcaagattttacttcgccaaacaacttcctggcaccctatatgt

SEQ ID NO: 42378 - DNA, 660 bp, Zea mays
  Clone ID: MRT4577_138650C.1
cgttcgccttcttcgtctccaatcctcttcctctctacccagtacccactacgctaacattgcggtacctccaccactcggaacttgcgcacctcatcgcgtcctccccctccccggagcgcgcgctcgacctcttcaacgcggcctcctcccagcgcggcttctcccagacgccggccatcttctcggcgctcctcgtccgcctcgcgcgccgccgcctccgagccctgccggttcctggagctgcagttgcttccgctcgtccgccgcctcccgcccgaccacgcgctcgccctcctccgcttgctgccgcgctgattcgtacgagtgacgactgacgagccgcgtgtcacacaaggcgcagtctgcctcgaccgaccgcctcgtctcctccgcggctgctgccacggtgccctcgacaggctccaagaacacaggcgagatgcgtctacaacatcctcatcaggcactgtgccaaaaacggcgagttggagcccgtcttcaaagtgctcgacgaaatgcgcgaggacacccgccgagcctggtcacatattaaacactgatcggtgggctctgccgtggggggtaagataatggaaggctctgagcttattggaggagattatcgccaaggaccgcatttgtccctgatcagctgct

SEQ ID NO: 42379 - DNA, 2762 bp, Zea mays
  unsure (1)..(2762): unsure at all n locations
  Clone ID: MRT4577_138651C.1
actccttagggcgattgggttcctcccggccggccgggagggcctgcaggacacaaaggttgaaggcaagggagagagaggaagaagaaaggcaggaggagaggcggaacgacccgtctccctccacctctctctgccttctcctcctgcgccgccatcctcacatcccgtcgtcgcaccacccactgaccggccggttgcacccttatagtaccggacggtggcgcgatgcaaggaggcccactcagcccggacgagtaccgggtggcgtcgccgccggcgctgctgcaccagccggcgcccgtcatcgtcgtggccatcgaccgggaccgcaacagccaactggccgcgaagtgggtggtggaccacctcctctccggcgcctctcagatcgtcctcctccacgtggccgcccactaccccgccaaccatgggttcgccatggccgagacgacgcagagcgcgctggaggctgaaatgaaggagatctttgtcccctacagaggattcttcaaccggaatggggtggatgtcttcgaggtagtgttggaagaggcagacgtgtccaaggccattctaggttacatcactgcaaacaagatccagagcattgcgctcggcggagccagcagaaatgcattcaccaaaaaaaaaaaaaaaaaatttgcggacgtgccgtcgaccctgatgaagtgcgctccagactactgcaacatctacgtcgtggccaagggcaagtccgtcaatgtcaggctcgccaagtgcggcgtcccgccgatgcacactggcgccgacatcgcttcggacaccgactcggtccgggaatccgggctgtacattcggcgtggctccaggggacacggacacctgccgcgggtgatgcctgacgccaggcgctccatggacgggcgcagcaccctgccggagctcaccacgcgcccaccgttccgcgagcgctcgctcccgtcctcggccaccaagaacgtcgtcgtcctgccgggaaaggactactccgaggcgccctcccgctccgcgaggcacgactcgttcggcggcgacctcgacttcggcccgagcacgcgcttctcctccatggacttcggcgacaacctcgacctcaccgccagccccgctcgggagcccatgtcaccggccaccggcgcgcaacgggatattgaggtcgagatgcggcgcctccggctggaactcaagcagaccatggacatgtacaacgcggcgtgcaaggaggccatcaacgccaagcagcgggccaaggagatgcagctgatgaagctggaggaggagcgtcggctggaggaggccaggcacgccgaggagactgctctggcactggccgagatggagaaggccaagtgccgcgcggccatggaggcagccgaggcggcgcagaggctggccgacctggaggcgcagcggcgccgcaacgccgaggtgcgcgcgcgccgggaggccgacgagaaggtgcgcgctctggatgccatctccaaccacgacttccggtaccgcaagtaccacatcgacgagatcgagatggccacggagcgcttctccgacgagctcaagatcggcgagggcggctacggccccgtctaccgcgcctccctggaccacacccccgtcgccatcaaggtgctccggcccgacgcgcaccaggggaggaagcagttcctgcaggaggtggaggtgctcagctgcatccgccaccccaacatggtgctcctcctcggcgcgtgcccggagtacggctgcctcgtgtacgagtacatggaccacggcagcctcgaggaccggctgttccgtcggggcggcacgccgccgctcccgtgggcgcagcggttccggatcgcggcggagatcgcgacggcgctgctgttcctgcaccaaacaaagccggagccgctggtgcaccgggacctgaagccggccaacatcctgctggaccgcaactacgtgagcaagatcagcgacgtcgggctggcacgcctggtgccgccgtcggtggcggacaacgtgacgcagtaccggctgacggcgacggcgggcaccttctgctacatcgacccggagtaccagcagacggggaagctgggcgtcaagtcggacatctactcgctcggcgtgctcctgctgcaggtggtcaccgcgcggccacccatggggctcacgcaccacgtcgagaaggccatcgacgcgggcaccttcgcgcagatgctcgacatcaccgtcaaggactggcccgtcgaggaggcgctcggctacgcaaagctcgcgctcaagtgcacggagatgcggcggagggaccggccggacctcgcaaccgtcgtactgccggagctcaaccggttaaggaacctcggccacgcgtacgaggcacgcatgagcgccgtcgggaccaacagtggaagtggcgaaagtaatgaccaggtcagcgggagctcgccgacggcgggtggttcatggagaacggcggagagctagcgggtggtacggcgtggccatgagtcagttagagagcgagcttgtgatggggagagttcttttgttggacggagagttcaaaatccaaaaatcttggtgtatgtacagttgtctatgaggaatactaacacgtcttgcagtgcttctgcctctcantccttttgagggtcgtcaaattaaatttaaaatttttctcattattctatataaaatttaattaatttttataaggtgggtgataattatatataaataattattgg

SEQ ID NO: 42380 - DNA, 734 bp, Zea mays
  unsure (1)..(734): unsure at all n locations
  Clone ID: MRT4577_138652C.1
ccggccgggcagggcctgcaggacacaaaggttgaaggcaagggagagagaggaagaagaaaggcaggaggagaggcggaacgacccgtctccctccacctctctctgccttctcctcctgcgccgccatcctcacatcccgtcgtcgcaccacccactgaccggccggttgcacccttatagtaccggacggtggcgcgatgcaaggaggcccactcagcccggacgagtaccgggtggcgtcgccgccggcgctgctgcaccagccggcgcccgtcatcgtcgtggccatcgaccgggaccgcaacagccaactggccgcgaagtgggtggtggaccacctcctctccggcgcctctcagatcgtcctcctccacgtggccgcccactaccccgccaaccgtacgtcgttcgtttcccccattggatgatgcagcaggacaggaggaggagaagctgagctctggcttccttgaactgaacgtatgcgcagatgggttcgccatggccgagacgacgcagagcgcgctggaggctgaaatgaaggagatctttgtcccctacagaggattcttcaaccggaatggggtggatgtcttcgaggtagtgttggaagaggcagacgtgtccaaggccattctaggttacatcactgcaaacaagatccagagcattgcgctcggcggagccagcagaaatgcattcaccanaaaaaaaaaaaaaaatttgcggcc

SEQ ID NO: 42381 - DNA, 1116 bp, Zea mays
  Clone ID: MRT4577_138653C.1
gcacgagggtggaggtgctgagctgcatccgccaccccaacatggtgctcctcctgggcgcctgccccgagtacggctgcctcgtgtacgagtacatggccaacggcagcctggacgactgcctgttccaccgcggcggcggcgggccggtgctcccgtggcagcaccggttccgcatcgcggcggagatcgcgacgggcctcctgttcctgcaccaggccaagccggagccgctggtgcaccgcgacctcaagccgggcaacatcctcctggaccgcaactacgtgagcaagatcagcgacgtcgggctggcgcgcctggtgccggcgtcggttgcggacaacgtgacgcagtgccacatgacgtcggcggcgggcaccttctgctacatcgacccggagtaccagcaggcgggcatgctgggggtgaagtcggacgtgtactcgctgggcgtgatgctgctgcagctggtcacggcgcgttcccccatggggctgacgcaccacgtcgggcgcgccctggagcgcggcaccttcgccgacctcctcgacccggccgtccacgactggccaatggacgaggcgcaccgcttcgccgaggtctccctccgctgctgcgagctccggcgcaaggaccgccccgacctcgccaccgtcgtgctccccgagctcaaccgcctgcgcgcgctcggcgaggacagcatggactcctgcacgaccatgaaaggaacctcggccacgcgtacgaggcacgcatgagcgttaagcccgccagggccaacggtggaagtggagagagtggtgcccagatcagcggggactcgacaacggtgggtggttcatgggaaacggcggacagctagcgggcggtccggtgatcggtgtggccggtggcccggatgagtcagttagagagcgagcttttttttttgatacgggggagttaaaaaatccaaaaatcttggtgtatgtacagttctgtctatgagaaatactaacgcgtcttgcagtgctgctgcctgctgcctcatccttttgagggtcgtccaaacagtagtgacaacaagcaaggcgaaagaagacaagaaacacacgcgtggactacacataatgaatg

SEQ ID NO: 42382 - DNA, 777 bp, Zea mays
  Clone ID: MRT4577_138654C.1
tcgcaaccgagacatttggaaaacagagcagagtaggtggtggtgatcgccagaggtagcagaggaagagatcatgttttcaactagtaaaagtagcggggagatggatggggtggacgggaatgatgacttgcacttgcacggcatggaatcaaaacgcatgcctaaatcgatcgccatggaaaatccacgagcttcgttcggatcggagcacgagaaggcggctgacagagcagcaaacacgcagaatgaggagacggcgcaagcaaggaggcggcggcggcggatggttggatcaggcccaggcgagctgcatggttcggaagcagccttattacagggaagaagaactggagagacactactactcaccttcgactggatcggtcttcatccttgacgtttgctgagcttgcgcggacgatgcagccagaagaagaagaagcagcagcagcagcgttgggagcgcggcggcggagccatggatgcaccggcgcgaagatggtccgggggtcgatccaggcctcatcgtctccttgcgtttgcgtccctgtctgctcgagcagcggctcgactcggtgccttgcggcctctccctttgaatacgacgtgtctcagctcggtgcgcagcgcagacacgagtatccgtactcgctcgctcaaccaccgaacgttgcaattgcaagtggtaccaccacctctatttttctatctacaatgctgttcggtcgaaaaaaaaaaaaaaaaattcgctgcgaattgttgtggttttaatct

SEQ ID NO: 42383 - DNA, 239 bp, Zea mays
  Clone ID: MRT4577_138655C.1
atttagtaatagttacacatgtatatggttaatacatatggaaattcaatatattttgtagttaacgtattctgaagtaacggatgtttctcgccaatcgtagtgacttcagctaacgaaatgttcttttgtagtaccacggtcctcggcctaacgaaggacgtgaaccttgtaagaggagagctctgaaacgcggtcacctttgtttagtggaagggaaagtgtgttcccggcatgag

SEQ ID NO: 42384 - DNA, 503 bp, Zea mays
  unsure (1)..(503): unsure at all n locations
  Clone ID: MRT4577_138656C.1
cagttttcatattaagtcagtttttttttttttttttctttgtttttttttttttttttttttttttttatttttttttttttttttttgaggcagccagcactgcaagacgcgttagtatttctcatagacagaactgtacatacaccaagatttttggattttttaactcccccgtatcaaaaaaaaagctcgctctctaactgactcatccgggccaccggccacaccgatcaccggaccgcccgctagctgtccgccgtttcccatgaaccacccaccgttgtcgagtccccgctgatctgggcaccactctctccacttccaccgttggccctggcggcgctcatgcgtgcctcgtacgcgtggccgaggttccttaaccggttgagctccggcagtatgactgtggcgaggtccggccggtccctccgccgcatctccgggcacttgagcgcgagcttggcgtanccgagcgcctcctcgacgggccagtccttgac

SEQ ID NO: 42385 - DNA, 151 bp, Zea mays
  Clone ID: MRT4577_138657C.1
aaataatattatccattggcctactaagagacaaaatatccaacaactaagtgtcacagagaagctgtcaaggcctaaggaggcccacggaagggctgcggcagagcaaccatggaccctccaaggggattaaaataagatcgttagagat

SEQ ID NO: 42386 - DNA, 380 bp, Zea mays
  Clone ID: MRT4577_138658C.1
cgccagtcctttgagatggtgcgagttattcgagataagattctgaaccacttgggtgccgatgaggtaccactggttgtggtgggaaacaagagcgacctgaagggtgaccaacgacaagtgacgctcgacgagggccgacaacttgcggaagagttccattgtgcctttaccgaggccagtgccttccttgacttcaatgttgccaaggcgttcgatttgattattggagagattgaaaagtctcagaacccatcacagcccgctgggaacaacaagtgtgcagtgatgtaatcacacccttgctcgatcgaccttcaacttcctatttgtcaccatgggaaggaatagacgcatgcgtgacacacgtgctggtcccg

SEQ ID NO: 42387 - DNA, 391 bp, Zea mays
  Clone ID: MRT4577_138659C.1
agtcggccggaccgaagggagttgatctagagaaaaccagaagcaaagaaatggatgatgaagacgagtgaccattatgatagctgagtggatctattaggaaagaatagggagaaacgtcaagacgatgagaactcaaaaggtacttttaagaaggagttgcgaacagaaccggcaaaggagataccaaaacatactccataagggggggagggggcggctcttgtctaaagaaaagataggacggcggacaaatgtgagatccatgatgagataaaaacaaatgaggaactcgatgaggcagaatcgtgcagaactgagaatggcatcggggccatacctggccgggcctattcaaacggaagagggggggcctatgctgcggaaaatt

SEQ ID NO: 42388 - DNA, 1357 bp, Zea mays
  Clone ID: MRT4577_13865C.1
accgcgtccccagcccaacccagagcattcttggtcccgatttcctcagctaggtgccgggttccccaggcacaagctacaaaccctaacccatccgggagcaccggaaattttggaggctgaaacggaaaggggagaaggcgatgacgacgagggagccgcgcgaggcgtcccggcgcgatgggcgcgactcgcacgggaggcgcccccactcctcgttcaggtcgcggagggacgatcccagcccaaggagaagagatgacaggaggcgtgaatcggacagggcgcaccacagaagtcgagatggagaatttttggaggtggtggaccatgatcagaagcggaatagagatgctgcgcagagcgctgaccctccgaatgctgagtcgaagtcagcgagtgatatgaagaatggcccctccaccaggcatgagagatcacctaggggaaccaaacgattttctgagtcgagtgaggcatggcggcctcggtctttctttcagactacctgtgcttctatgtacagcacaatgagcgtggaagtgctgggcaaggtggtcggcattatgaccgccaggctagtgactatggaaggcaaagggagcatctctctgatagagataaacagaagacagagagacacagtttgcagggaaagattgagctggaccagcaaaagaaggatggtgattcaacatggaagcatgatggatttttccagttggaggaagcagcaccccttgccaagaagaggccaccatttcaggagatgaagatacaagaatctgctgacactgtaacagaaccagattctagatcaaggaattatcaggcacggggatatggaaatcatcgacccttcctaaggccagatgatcgaggctttagaagggggtttcctgaccacaggagtgatggccagaggaatgggcatgatataaggggaagattttctgttaggggaggaatggacagagacaggtttaacaattcatatggtgggagaagcaacgcagagcaggcttctggtgatcaagaagaaaaatggaagcatgacctctatgatcagacaaacaggagcccgcctccaaagactgaggaagagcagattgccaaagttgaagcgctgttggcactgtagctgtcttatttatgtctggagttgttttttgtgatagattatcatgtacttggtttcagatgtgttgaatactgtcttttttattctatatattctgcatatctatgtggaattgtggattaaaccaccttatgaagctattccatttggactgataatattgtactagataatcatgagtttcataatgtagaaccatcaagcgaagtacaagcc

SEQ ID NO: 42389 - DNA, 749 bp, Zea mays
  unsure (1)..(749): unsure at all n locations
  Clone ID: MRT4577_138660C.1
gccggccgggccatgcgatcgaaagcagcaagaacacaggctacctcgatctctagctaccagtctcttcttcagttccttgagaggaggagagaagccaagaatacaatggaggggaagaagagtaggctcgcctgctgctgcctgctcatgttcctgctgctgtcagcgcagcagcagcaggtggcgggcctgtccaagttctgccgctgctaccggaactgctacaccgactgcaggaagtccacgggccgctacccctgcaacgccaactgctttcaggactgcatcaacgggatgctgccgccggctccggcggaggtcgtcgtccccgccgactgccgcgacatctgcctcatgggcttctgcggctccatggagctcgccggtgacgccttggctggggatgccgaggcgtgtgtggctgactgcaccaagaacctcggtgcctttgcaccaagtggagccaagacgatcaactgaagcatgcattatgcatctgagggagtggcttgagatcgacttgagagcaacagatagagttccatcagtgtaatgcaataattggatgtttaagcgatcctatatatataatatactccattctccgttcccatttataattcatttgcgctaagtttgaacggctcatcttattaaaaaatttatgtttattattatttttagttggcactcaatctatactattctattaagaacctaaaaaaaaaaaagaaaaaaaaaaaana

SEQ ID NO: 42390 - DNA, 247 bp, Zea mays
  Clone ID: MRT4577_138661C.1
gcggccggccgggacgggcacaagactttgttttgtatccgttggctagctacctacactcgctagttcactcatttagcggcgatgagtaacgtggtgtcacccatcaccttgggcgcactggcgcccagtgtgcgggtggcacttcgtcacctcacggggtggtgtggggggactcccgagcttggtagcttgccagcggctccattacttttttcccttccctgggcggcgtccgggttggggg

SEQ ID NO: 42391 - DNA, 308 bp, Zea mays
  Clone ID: MRT4577_138662C.1
agccttccaccaagtctgtggcctgcgtgccttgtagggggtcgtgctcagggctcccccgcgtcccgagatgccagtcaattttttctccgatcttactccgcatgagactgctcgtgcttttgtgtgggaaggctgacccgccttgtgggagaccctccttaactgtaggttccagtgatgtcggacggcaaaccactcaatcaaattggtcactgttgcatcaggatgttacctgtctactaatgaaaaggcacataatgtgccatgatctgtgatgtcgcatcagagtcaatgctaccatctac

SEQ ID NO: 42392 - DNA, 812 bp, Zea mays
  Clone ID: MRT4577_138663C.1
ccggccgttgggaacctcgaggccggccggggatcgacaagcagcaaaaacacaggctacctcgatctctagctatagctaccagtgtcttcttcagttccttgagaggaggagagaacccaagaatataatggaggggaagaagagcagcctcgcctgctgctgcctgctcatgttcctgctgctgtcagcgcagcagcagcaggtggcgggcctgtccaagttctgccgctgctaccggaactgctacaccgactgcaggaagtccacgggccgctacccctgcaacgccaactgctttcaggactgcatcaacgggatgctgccgccggctccggcggaggtcgtcgtccccgccgactgccgcgacatctgcctcatgggcttctgcggctccatggagatcgccggtgacgccgtggctggggatgccgaggcgtgtgtggctgactgcaccaagaacctcggtgcctttgcaccaagtgcagccaagacgatcaactgaagcatgcattagggcccgttcgcttgtacaggattaaaccggaattcgttccagctcatcaaaatctatataaattaaagaagtaatccggttaggaattaattcgaagctccaatccctaaaaaccgaatagggccttatgcatctgagagagtggcttgagatcgagttgagagcaacagatagagttccatcagtgtaatgcaataattggatgtttaagcgatcctatatataatgtactccctccgttccaatttataattaatttgcgctaaaaaaaaaaaaaaaaaagaaaaaagcggcc

SEQ ID NO: 42393 - DNA, 304 bp, Zea mays
  Clone ID: MRT4577_138664C.1
acccttcgcccacacttccgattttctgcagggataacatttgtggggggtggtgagccggccggccctataaaatcctgctacagcttcagccatgcccccaacccttttgaaggaggctttccctcacttcaaccaccggttatacatcataacctaccttcgtattgagcctacccaattgctagccacattcttccgacatatttttttttattcgaaccgagctaccttgtattgtcaccgatcgctcggtggattcttctccctccataggaaggaaggatggtctacgcgaatattc

SEQ ID NO: 42394 - DNA, 237 bp, Zea mays
  Clone ID: MRT4577_138665C.1
tcagggtgggcgctgctgcaatcttgccctcgcccacaccgacgcccgaggggcgaggacaagtacgaagaaccggaggcccgaagcgcggatggtggcggtgatcccgtcggtgacggggacttctcgagccgcctccgcctcggcaccgacggcaggggccatcggccccccggcagatccccactcaaatcctcccgggcgagtggggcaccgacctccgcgtgagggcgccat

SEQ ID NO: 42395 - DNA, 403 bp, Zea mays
  Clone ID: MRT4577_138666C.1
cacccggccggccacgcgagcacccgacactgcccgacctcaaccttccgtttaccgcccaccacgcccacttcaccagggccggggaaacacgccacccaccaagacaccatcgaggctcaatacaacaaaacgaaccgaccgagcccaggagtggaccgcgggacaacgccttccgccgaaaaagtccaacagatcctgctcgacacaggccacaccgtccatgcagggccaagcgaagcacaagcccaacatgaacgacgggccaccaccacctacacatgactccacaccaatagcaccaaagagaggcggcacccacacctgccgccccatcgcgcaccaagccaacaacgccgacgaggggaacctcgccgggggggaccacaacacgacgctcaag

SEQ ID NO: 42396 - DNA, 1119 bp, Zea mays
  Clone ID: MRT4577_138667C.1
atggcccttggcgcgagccagatgccaacagccctgtggatgtgggtggcagcgtggaggctcgtggccgccacacccgctgcagcgttacaggaggcgcatgcgcctagccgtggaggagcacgcggcggcacgcgccaggcgggagcgccggagggtgccgcccacgcgtccacgcgtgcccctcccccagcctgccacctcccgcacgccctcctggcccgcgcggccgcccgtcctctcggtctccgaccacgactgtgcgccttcctaagtaaccctagctcggcgccctccctccgcgacatccaagcccggcaatctcatcgtcgcgcttgcaccgttacgcagtgcgacctctgcgtcttcgaatccaggcctatctctggcaagaagtgcaagaaaccaggcccgaggaagattcataaggctgagagggagaagcttaaacgagaccacctaaatgatctctttgttgagctgggtaatatgctagaagcagatagacagaacaatgggaaagcatgcatactgactgacactactcggatactaagagacctgcttgttcaagtagactctcttcgaaaggaacatagcgacctacaaaacgaatctcattatgtaacaatggagagggatgagatgcaggatgaaaacggcgtgctccgcaaagaaatttcagagcttcaaaacgagttgacaatgcgggtttcaggcagtccagcaggttggggccatggcaccgccagatcagatccccctcttcctcactcaaccgcagtgttctcgtcggagcaggcgatgcaaccacccaccattgcaagcgttgtattcccgttgcagcagccactggcaccatcagcaatgaccaaaccacctcatgctgcaccaccactcgaactgaagctctttccagaagtggcatctgccgaaggccatgagccgtgtgaagaccacaaagctcccaaccatgtggcacgaccacaggcaaggtacccaacgcaatcagcctcatggcccgtaaacctgttctctggccttccacgaatggaagatgagcaatgcagtagcagcacaagcggcagcagcagagaggataacacagatatagaatga

SEQ ID NO: 42397 - DNA, 742 bp, Zea mays
  unsure (1)..(742): unsure at all n locations
  Clone ID: MRT4577_138668C.1
ttttttgtcacgggggggggggggggggggcctggtctggcacatactcaccgaagctgangtacagcatcgggggggggggatanngggggctggcactgctnnnctataattgtgaaaatttgagtgcaagattgatgtctagatttagggtggacaattaaannagaaaaaaaaaatttgnccnnnactggtcggcgctaacaaataaagtccgtaggtctnggnctcctaggntaacaaactagncctaagttnntcaccctnngcaatnncaagtatannnacgtatggcctgggtgtnncattgtntnnacgttagggcagtcnntacaatcannnacccacgcnnaggtccganggntacctggtgggcccggccctannaatctaccngnngccgtagtnnccccatttcgtgtnncggtcgcttgtacntnntatactgtnaagccccttggctntnncgtcgannccgcgacttagggtgcanntctcatcgannngccagtcatnnntagtatggggttgcaacnnngagccccnntacagcaaagcccctgtccnnaccgcttcnnttctcgcatttttgcaaacctcnttggtgtggnccttggccttctcatagnnttggcacttctgtgacntcttcccacaatatccttcggtaacgtcccttccgttggctcttctagtgtccactattctactctcacaatccntactgttgctcttgtcttac

SEQ ID NO: 42398 - DNA, 514 bp, Zea mays
  Clone ID: MRT4577_138669C.1
gaaaccccagggggggggccctgccctttaattaaaataggggagaggttttgttcctgcctaaattaaaaaaaaacaccctcggggccaagttccgggaaggccaaaggggccaaaaacccaaattacccctttggtttttcatttcccaaaataagggccctttttggtggtcgaaggccccttttgctctaaaaggcccttgggctgcccgtttaaaaccccccgggaaaaaccctttgttcccgttttttccaaaggtccaaaaaggggaaaaaaaaaccccattgaatcaccccccctcacttttcaaaaatttgggttgggatgccccccaccacccgatcaacttgcttgggtttgaaacccccctggatgagtttttaagtggtcaaaaacaccaaatttgaagggggcacatgccggaagggtaacaccgagggtttgccgaaaaaaccaataagcaacccttgcaaaattggggggtttgccaaatccctttaccccaacaaaa

SEQ ID NO: 42399 - DNA, 296 bp, Zea mays
  Clone ID: MRT4577_13866C.1
cacacacgtccgcccacgcgtccgcgtgagtccggcgcaatctggaacaagacatggaagaaaaatgagagcaaggaccttaaaactatttttattgtgtggccaggcactcatcgcatggatacatccatagctctccctggtgaggtgtatgaccgatgtccaaccgtgacaccaggtggatagataactgtatcgactcacggcatgaagatctaaaacattatacgacctgggatcttgagccactgagatccagagacaacgaaggactcactaggcccgacacagaaccc

SEQ ID NO: 42400 - DNA, 1227 bp, Zea mays
  Clone ID: MRT4577_138670C.1
cttttctgtttctttttctcctcctccagccgcccgtcctctcggtctccgaccacgactgtgcgccttcctaagtaaccctagctcggcgccctccctccgcgacatccaagcccggcaatctcatcgtcgcgcttgcaccgttacgcagtgcgacctctgcgtcttcgaatccaggtaaggtagagaggaggaggtttgtggcaggatttgaccagcccaatggttccatccgagatggggaccgtcgccaccgccgtcagcacgcctgctgcggacaagctgctccatgggcctatctctggcaagaagtgcaagaaaccaggccccaggaagattcataaggctgagagggagaagcttaaacgagaccacctaaacgatctctttgttgagctgggtaatatgctagaagcagatagacagaacaatgggaaagcatgcatactgactgacactactcggatactaagagacctgcttgttcaagtagactctcttcgaaaggaacatagcgacctacaaaacgaatctcattatgtaacaatggagagggatgagatgcaggatgaaaacggcgtgctccgcaaagaaatttcagagcttcaaaacgagttgacaatgcgggtttcaggcagtccagcaggttggggccatggcaccgccagatcagatccccctcttcctcactcaaccgcagtgttctcgtcggagcaggcgatgcaaccacccaccattgcaagcgttgtattcccgttgcagcagccactggcaccatcagcaatgaccaaaccacctcatgctgcaccaccactcgaactgaagctctttccagaagtggcatctgccgaaggccatgagccgtgtgaagaccacaaagctcccaaccatgtggcacgaccacaggcaaggtacccaacgcaatcagcctcatggcccgtaaacctgttctctggccttccacgaatggaagatgagcaatgcagtagcagcacaagcggcagcagcagagaggataacacagatatagaatgagtggatcagctcctacaatcaaagagtctctgttttgagtctagtggatgtaaatttgaatctcctttttggatttcagaacgatagattatactctgttggaaataggacccctcccattgcaagtctttgttggaatctctataaatgcgaatcaatcttactggcactttgcatgccgaaaaagcggcc

SEQ ID NO: 42401 - DNA, 764 bp, Zea mays
  Clone ID: MRT4577_138671C.1
gctcggcgccctccctccgcgacatccaagcccggcaatctcatcgtcgcgcttgcaccgttacgcagtgcgacctctgcgtcttcgaatccaggtaggtctctgcaggaaggtagagaggaggaggaggttcgcagtgcgacctctgcgtcttcatatccaggtctctgcaggaaggcagagaggaggaggaggaggtttgtggcaggatttgaccagcccaatggttccatccgagatggggagcgtcgccaccgccgtcagcacgcctgctgcggacaagctgctccatgggcctatctctggcaagaagtgcaagaaaccaggcccgaggaagattcataaggctgagagggagaagcttaaacgagaccacctaaatgatctctttgttgagctgggtaatatgctagaagcagataggcagaacaatgggaaagcatgcatactgactgacactactcggatactaagagacctgcttgttcaagtagactctcttcgaaaggaacatagcgacctacaaaacgaatctcattatgtaacaatggagagggatgagatgcaggatgaaaacggcgtgctccgcaaagaaatttcagagcttcaaaacgagttgacaatgcgggtttcaggcagtccagcaggttggggccatggcaccgccagatcagatccccctcttcctcactcaacggcagtgttctcgtcggagcaggcgatgcaaccacccaccattgcaagcgttgtattcccgttgcagc

SEQ ID NO: 42402 - DNA, 180 bp, Zea mays
  Clone ID: MRT4577_138672C.1
acactcttgccccagccgtccgacaaaacggctaccaaacacctgactctttgccggccgcgaaggtttagcattggcgggggcatcgccaccgctgccgcatacctcaaactgtgttattgtaccccacgaccagctgctctgcgtcgcaccgcgggtacctggacacctaccgtcacg

SEQ ID NO: 42403 - DNA, 495 bp, Zea mays
  Clone ID: MRT4577_138673C.1
aaaaaaagggggggcttggggtttaacaccccccccggggaatttacaagctaaagaagaacccaaaacccccaaacttttgttttgcccccagaaaaaacatgggattttataaacaaaaacaaagtggcccaaaaaaacccaggctgaacccaaaaaaaaattttaatttggcctggcaaaccaaaagcccgaattttaggaagggggctttcaaaatggggggttaatccaaaaaagttttgtttttgggattagccccccccccgggggattttgctaaaaaccttggaacccacccctttgtactgttgagggccctgggggggcccccttccaaggaaagggccccccttggccgggaacttgggaaaaaaaaagggccccggggggaacatcaggacggcattgtttgccaccggggaggaaaccacagttgtttccaactcgggggagaccccacggcccccggatcccccccaaaaattttttaaa

SEQ ID NO: 42404 - DNA, 205 bp, Zea mays
  Clone ID: MRT4577_138674C.1
ctcaaactaccagtgccgcgcctactctgttctcctctggctaatgctaatggcttgggggggacatgagagctggcctaggagctgtgtcaatcgtggttacgcggccagcattactgcactgatatctgctctgctgtcacgtgcgcatctatactcataatggacgctgaactctgaatatgacgtccgatatcctagaaat

SEQ ID NO: 42405 - DNA, 456 bp, Zea mays
  Clone ID: MRT4577_138675C.1
atctcaaagcatatgtcacctgactatctatctatggagagagagagaggaaagatagactagctaccatgagagtgcaggcagcaagaaggcagcaggaggtgtagttgatgctgctgcttctccagctggtgttagctccgacgacggctgacggaccgcctcctgcaggtggatacctccaccgtggatgtcctgaacatcatcgcgagggagtttgaccatccagtgagaggcatcctctgtggtgaaacctgtgtcttcctaccatgctatacggtagttcatgggttgccaatgcattgggcaaatctgcatgatgtgatatctggactagcgctatttgtaatttgtgttgggagaaacacaaggacgtgacggtggggttcaacttattgcatgagcatggcgatctaataagtaaagcataatagaaagggatatgtctggatgtgt

SEQ ID NO: 42406 - DNA, 581 bp, Zea mays
  Clone ID: MRT4577_138676C.1
atagcataatcacctgcctatctatctagcgagagagagagagggaagctagctagctagcatggagtgcggcagcaagaatgcagcaagcggagtgatggcgctgctgcttctccagctggagttagctccgacgactgcgacgacccgcctcctgcaggcgaatacctccaccgcggttgacctggacatcatcgctgagggagtttggccatcccgtgagaggcatcctctgaggggaaacctgtgtcttcctaccatgctatacggcagccatgggttgccaatgcattggccaaatctgcatgatgtgatatctggactaccgctatttgtaatttgtgttgagagaaacactaggacggtacggaggtgttcaacttattgcatgtggatggagatctaataagtaaagtactaataacaagggatatgttggatgtgtacccatcgcctgctccttacatcatttttgacatatatatactcccttcgatccagcaatgtaagacggtctctctctagatatacatacattgatgcagttgtatatagagaattacatacatctgttctatctt

SEQ ID NO: 42407 - DNA, 282 bp, Zea mays
  Clone ID: MRT4577_138677C.1
gctagaaccactcaccccatgatactcgcacgggaggcgggtcaccctctccgacgttgtgcgaccacaccaacactcgggtcacggtgggggttgcagaatctttgtcgggccgcgtggctcgtgccagggtcctcgccgggccgagcttgtagttgctgcgccccaaatttactcaccggaagcggggttcgtcgtggagtcgcccggtgacgcggactggtgccccgaacttgccctaaccctgattttatcgtacctttggacattcaccttatttga

SEQ ID NO: 42408 - DNA, 464 bp, Zea mays
  Clone ID: MRT4577_138678C.1
aatagcaaagataggcatctgcctatctatctagcgagagagagagaggaaacgtagctagctagcatggagggcgtcagtaagaaggcagcaggtggcgtgttggcgctgctgcttctccagctggtgttagctccgacgacggcgacggcccgcctcctgtaggcggatacctccaccgagggtggcctgaacatcatcgcgagggagtctggtcatccagagagaggcatcctctgtggagagacctgtgtcttcctaccatgctatacggcagccatggagttgccaatgcattgggcaaatctgcatgatgtgagatctggactagcgctatttgtaatttgagttgtgagagacacaaggacggtacggtgatgttcaacttattgcatgtgtatggcgagctaataagtaaagtataataagaagggcatatggtggatgtggaaaaaaaaacaaga

SEQ ID NO: 42409 - DNA, 533 bp, Zea mays
  Clone ID: MRT4577_138679C.1
aatatgaatccggcacgtcccctgcctatctatttagcgagaaaaaaagaggaaagctagctagctagcatggagtgcggcagcaaaaaggcagcaggcggtgtgttggcgctgctgcttctccagctggtgttagctccgacgacggcgacggcccgcctcctgcaggcggatacctcccccgtggttggcctggacatcatcgcgagggagtttggccatccagtgagaggcatcctctgtggtgaaacctgtgttttcctaccatgctatacggcagccatgggttgccaatgcattggccaaatttgcatgatgtgatatctggactagcgctatttgtaatttgtgttgggagaaacccaaggacggtacggtggtgttcaacttattgcatgtgtatggtgatctaataagtaaagtataataaaaagggatatgttggatgtgtaccaaaaaaaaaaaaaaaaaaaaaaaaaaaaaaaaaaaaaaaaaaaaaaaaaaaaacactcgggaccgggccgcggtaccca

SEQ ID NO: 42410 - DNA, 388 bp, Zea mays
  Clone ID: MRT4577_13867C.1
ctctggtatcattgactcgttcatataccatggacagaaggcgctcaagaagaaaatggagttaggcaaatacagatgatcaacttcaaccttgtactggccccattgtttccaaattttgtggcatgtaaggagggtatatgccagctaaatatgacgagatgccacttacgttgctgaggttgcaaggccatcaaactgatgttattgcacgttagctgatcagataacctgtaaaaagacaatgagtatagcctggtctggggaagtcctttgatgtttatcattgttgactgtcgttgaatggcctgaactggtgcggaggtggatagatcatagatcacagaatgtttctcatgaaagtttgttcaaagaaacagcttcactc

SEQ ID NO: 42411 - DNA, 204 bp, Zea mays
  Clone ID: MRT4577_138680C.1
ggtgggagcttgatttaattgccccatgatccaacccgaaaaaaaaaagggggacaagacaccgacttacaaggacctcaaacccggacaacaagggaacagggccagaaaaataatgtccagttgacaccaggacaacgtgaacacatgcgcccaaactaacacaggtacaaggcgctattgttacaaaaatccggactcgaa

SEQ ID NO: 42412 - DNA, 351 bp, Zea mays
  Clone ID: MRT4577_138681C.1
gggggggatgaccaggtgaacttttttttaccaaccactccgaaatgttcaaacaggggtgggcggtttttcactgcaacaaaaaatgagttgggaaattttaccccacccctgaagagggttcttctcgggaagaatgggaacagccctaccgctttttacaagggagggtaatgccatttttaaaggggactcaaagaccgaggctttgggggtgtcatgccatatttaagggccccgggtgaaccagattatttgtttggcccattaaggatcccaaaagaattacaccgaaaactttacccctttgtcatcaagggaggggcctttaaaaaaaagtggcttttcctt

SEQ ID NO: 42413 - DNA, 510 bp, Zea mays
  Clone ID: MRT4577_138682C.1
cctcgaggccggccgggccgggagctcagaaagcataggcacctgcctatctatctagcgagagagagagaggaaagctagctagctagcatggagcgcggcagcaagaacgcagtagagcggtgtgatgacgctgctgcttctccagctgatgttagctccgacgacggcgacggcccgcctcctgcatgcggatacctccaccgtggatggcctggaacatcatcgcgagggagtgtggccatccagtgacaggcatcctctgcggcgaaacctgctgtcttccataccatgctatacggcagccatgggttgccaatgcattggccaaatctgcatgatgtgatatctggactagcgctatttgtaatttgtgctgggagaaacacgaggacgcgacggtggggttcaacttattgcatgcggatgcggatctaataagtaaagtataataaaaacggatcatgatggatgtgcggaaaaaaaaaaaaaaaaaaggcccctaggggc

SEQ ID NO: 42414 - DNA, 480 bp, Zea mays
  Clone ID: MRT4577_138683C.1
ccggccgggccgggatagcatagatagtcacctggctatctatctagcgagagagagagaggaaagctagttagctagcatggatagcggcagcaagaacgcagcaggcggagtgttgccgctgctgcttctccaactgatgataactccgactactgcgacggaccgcctcctgcaggtagatacctccaccgtggttggcctggacatcatcgcgaggagagtttggacatccattgataggatcctctgtggtgaaacctgtgtcttcctaccatgctataccgaagccatgccttgccaatgcattggccaaatctgcatgatgtgatatctggactagcgctatttgtaatttgtgctgggagaaacacaaggacagtacggtggtgctcaacttattgcatgtgtatggtgatctaataagtaaagcataataaaaagggatatgttggatgtgtatcaaatgaacatagaaaa

SEQ ID NO: 42415 - DNA, 416 bp, Zea mays
  Clone ID: MRT4577_138684C.1
gcaaacttagcagacaatgttccccactaacacaatcaaaacaaggggaattctgtacaaaaaaaagtaaaactacccgggggggggggagaaaaaagtttcaaaaacttgtttcaacgggaacaggaaggggtgggggccgataactcctagtaatctacaagggaaccttgaccattggaaagccacgggggcaatcctccagctggaccaggtgggccctttttttggggggttttttcctggcgaaaattccccaccttatcgcccccttgatcttgggccagccaacaacagctttgccagacgaatgggttccctcagtttccaaccccaggttcggcaacggggagggcctgttggactggaagttgaaggtgtcctctggcaaactgccaaaagctccacccatgctg

SEQ ID NO: 42416 - DNA, 476 bp, Zea mays
  Clone ID: MRT4577_138685C.1
cattgggacctcgagccggcgggccggattccaaagagagccacctgcctatctatctagcgagagagagagaggaaactagctagctacgcatggagtgcggcagcaagaacgcagcaggcgatgtgttgacgctgctgcttctccagctggcgctagctccgacgacggcgacggcccgcctcctgcaggcgaatacctccaccgcggctggcctgctacatcatcgcgagggagtttgcccatccagcgagaggcatcctctgtggtgaaacctgtgtcttcctaccatgctatacggcagccatggggtgccaatgcattgaccaaatctgcatgatgtgatatctggactagcgctatttgcaatttgtgatgcagagaaacacaaggacggtacggtggagtccaacttattgcatgagtatggtgatctaataagtaaagcataataaaaacgcatatgttggatgagg

SEQ ID NO: 42417 - DNA, 3297 bp, Zea mays
  unsure (1)..(3297): unsure at all n locations
  Clone ID: MRT4577_138686C.1
agcagagcaaagcatagtcacctgcctatctatctagcgagagagagagaggaaagctagctagctagcatggagtgcggcagcaagaaggcagcaggcggtgtgttggcgctgctgcttctccagctggtgttagctccgacgacggcgacggcccgcctcctgcaggcggatacctccaccgtggttggcctggacatcatcgcgagggagtttggccatccagtgagaggcatcctctgtggtgaaacctgtgtcttcctaccatgctatacggcagccatgggttgccaatgcattggccaaatctgcatgatgtgatatctggactagcgctatttgtaatttgtgttgggagaaacacaaggacggtacggtggtgttcaacttattgcatgtgtatggtgatctaataagtaaagtataataaaaagggatatgttggatgtgtaaaaaaaaaaaaaaactctcgcctctctctccgtgcggtgactgactgggcaaccgccaccgccctccccnctccgtcgggtcttcgccggcgccaccagcgacgactgggcggtctgtgtccctcttcgccggagacgatcacgaactgaatagttgctttgcaggtggatgtcgattttttggttgacaagttgaaggttacgaactactttgatcctgaggtgaagaagtaatgatccgcccaggctcaagggactcgcaaaattatgataacaataatcaaagagttcatccgcaaccagttgatgagaacatgaatgagaacggggactcagtggacactatgatcgggaggatattcaacaacatatcctctttaaaatctgcatacattcagctgcaggaagcccacaccccatatgaccctgacaagatccaggaagctgataaacttgtcatagaggagcttacaaatctttcagagctcaagcatgctttccgagaaaaacaactgaggtggcccccccgcgtcgggccgggccggccttttcctttccttacctcactcgctctctcgcctctctctccgtgcggtgactgactgggcaaccgccaccgccctccccctccgtcgggtcttcgccggcgccaccagcgacgactgggcggtctgtgtccctcttcgccggagacgatcacccaccaggtggatgtcgattttttggttgacaagttgaaggttacgaactactttgatcctgaggtgaagaagtaatgatccgcccaggctcaagggactcgcaaaattatgataacaataatcaaagagttcatccgcaaccagttgatgagaacatgaatcagaacggggactcagtggacactatgatcgggaggatattcaacaacatatcctctttaaaatctgcatacattcagctgcaggaagcccacaccccatatgaccctgacaagatccaggaagctgataaacttgtcatagaggagcttacaaatctttcagagctcaagcatgcttacagagaaaaacatcctaagccaatagctgcatcccctcaagattcacgcttgctctctgaaatacaagagcagcagaatttgttgaagacctacgaggtcatggtaaagaagttccagtcccagatccagactagagacactgagataacccatttacagcagcaaattgatgaagctaaacttcggaaatcaaagctagagaagaaactgaaacagaggggcctacttaacagggagtcagaggaatctgacgaagaagagaactacttttccattgaattgacgccaagtttgtttacatctgctgtcgataatgcataccagtccatacatgaattttcaaagcctttgatcaacatgatgaaggctgcaggttgggatcttgatggggctgccaatgcgatcgaacctggtgtggtttacacaagaagggctcacaagaagtttgcttttgaatcctatatttgccaaagaatgttcagtgggttccaagaggagagcttttctatcaaggattctaacatcagtgtttccaatgaggctttcttccaccaattccttgcagtgcgagccatggatcctctggatgtcctgagccagaaccctgattcagtattcggaaagttctgtagaagtaagtaccttttgcttgtgcatcaaaaaatggaaggttctttcttcggcaacatggatcagaggaactacgtcatgagcggtggccatccaaggacacctttctaccaggcattcctaaagctagcaaagtccatatggttgctgcacaggttggcgtactccttcgacccaaaggcaaaggtgtttcaagtgaaaaaggggagtgaattttcggatatccacatggagagcgtcgtgaagaacatcatcctagaagaaggtgcggagaggccaaaagtcggcctgatggtgatgcctggtttcctgatcgggaccagcgtcatacagtcccgtgtgtacctttcagatgccaagtgtgctgactgactgaagattgcacaaggagcttgagggggtgcctttgctccttgggagagctaccagcagcataagtttatggtggactgttgtcttgtatgtaatgcgtgagacctgttgcttcaatgccgtgctacgtgattctgtccagtgggcttgtggtttccccatgttgcatttccatgtgttatacggctatgtaattctgcccagtgttttgcacacattatcagggtgattgattgatcgtgtaggctgcacttttcatctgaaatgtgtttgcccaatcaatcagatgattctgttggtgttccatgtcaagtgttgtagcttagtttctttgaacaaggtgtgtggaggattttgatggacaatgataaaactgatgacaatttagttgcttcatatggattccggccaaaaaaaaaaaaaaaaaaaagcggccgccgtgaaggtgttcgttgaggattacttcgacttcaagcacagctggctggggtgggtggcccccgtggtggtggcattcggggtgctctttgctaccctgtttgcctttgccatcatgaagcttaacttccagaagagataacgacgataggagatcggaaatcacctcctggataagtgattttgcattggttgggtcgtgcatgtagattgggcttgtgcatactctgctccttttttgggaaantgaaggttaatattttgtaaagaatagtttgcgcatctagtaaattctgtaagcgtgtagtcccttacaaaggatcagttggagaaggcgaggaaatacctcgtgcgttgctgttg

SEQ ID NO: 42418 - DNA, 2610 bp, Zea mays
  Clone ID: MRT4577_138687C.1
cgggcgtttggtcatcggcgggccccacggtgacgccggcctcaccggccgcaagatcatcatcgacacgtacggcggctgggagcccacggcggtggcgccttctccggcaaggaccccaccaaggtggaccgcagcggcgcctacgtggccaggcaggccgccaagagcatcgtggccagcggcctcgcccgccgctgcctcgtgcaggtgtcgtacgccatcggcgtgccggagcccctgtccgtgttcgtcaactcgtacggcaccggcacgatccccgacaaggcatcggcttaaggttgggagtgtcactgtggacatgaggactaccttcctctggctctgctgttacctgcaagcattgctgctgctggatgtgtgtgtttgatcagtgactggctgctgctccatagaagatgaacggagagaaggatgatgaagggctttggcaatcgccgctgcaactgcaacccatgccatgccggcttagtgattgggtataatttggcttggcagcagccagcattattatgtgctgatctgttatcttttactagtttggtcgtccgatatctttctttctttttccccccttttcgactctgtactgaaactgctgagagattcgcagtattgttgtatcgtattcatatgctactgttaaaaaaaaaaaagcagagcaaagcatagtcacctgcctatctatctagcgagagagagagaggaaagctagctagctagcatggcagtgcggcagcaagaaggcagcaggcggtgtgttggcgctgctgcttctccagctggtgttagctccgacgacggcgacggcccgcctcctgcaggcggatacctccaccgtggttggcctggacatcatcgcgagggagtttggccatccagtgagaggcatcctctgtggtgaaacctgtgtcttcctaccatgctatacggcagccatgggttgcccaatgcattggccaaatctgcatgatgtgatatctggactagcgctatttgtaatttgtgttgggagaaacacaaggacggtacggtggtgttcaacttattgcatgtgtatggtgatctaataagtaaagtataataaaaagggatatgttggatgtgtaccaaaaaaaaataaaacagaaaaagccaagaaagcaagcagagagccgagccgacagtccaacaagtggaggggagaactcgtcgcgtcgcctccgcctccgcctccgcctccggtggttagttcctctctcctcgtcagctcaccgcccgccccacagaactctgccccgtgctttgctaccggtgactgtagaagcagctagccatggcggcggcggccttcgatgcctacaccgacaagaacgccatcttccgccgcctcaaggccaagcccgagaacaagatgtgcttcgactgcaacgccaagaaccccacctgggcctccgtcacctacggcatcttcctctgcctcgactgctcggccgtccaccgcagccttggggtccacatcaccttcgtcaggtcaacgaacctcgactcatggactccagatcagctgaaaatgatggcgttcggaggcaacaaccgggcacatgctttcttcaagcagcatggatggaccgatggtggcaaggttgaggcgaaatacacatcaagagctgctgaactgtacaggcagatgctcaacaaggaggtcgctaagagtgccattaccgataatgccctgccgtcctcacctgtcactgcatctgaggcttccaagccatctgatgacttccctgaattcaagctctcagacgcaccagcaccgccggcggagaatctgaatgggaagcatgaacccaagtcccccaaagctgctccacgttcaccaaaagctgctactcatcccacctttgccacttccgtgaagaagcccattggcgcaaagaaggttggaggcaagactggagggctcgaggttcgtaggtcacacaaagccaaatgaagcctgtatgagcagaaaccagaagagccaaaacctgctgtacctgccttggctgcttcaactaaaaaaggtggtcaggccttgcattcacgttttgaatacgtggagaacgagccatcagcagcagttttgctatcctacctgcaccgcatcaccgacagttcttgcacagctacagctctgtagagggatagtagaggattcttatcatgcgttttgtattctgacctttgcttgttgtgagacccagtccacatgaagatgttttttttatttgttattgatactttcacgactttgaagcatacaattatatgcatcaaggttgtcaaagaaaggttcagcatgagaaagctgaccaaatgtagcgccagcgaaaaaaaaaaaaaaaaaagcgaccttggatggaatggaaaccacaatcaaggctgtagtagtgtgtagtaacgaggtacggagtatcgaggtagatacatcagatggtgtaagggagtacccagttgttagttcatggcttcaagcttagcctcccttcaatttgttcgatgatgtattacttcacaataaacattattatttagatgtatgaggtgagcacacttggtctttta

SEQ ID NO: 42419 - DNA, 310 bp, Zea mays
  Clone ID: MRT4577_138688C.1
cttgtcaagggggaacatatataggtttttggtctccgaaaaatttactttaaacaaagggcccccagaggcaccacatagcatttgcccataaaaattaggggacccaccggtttaagcatggcccttatcggaggaaagaaccctttttgggccccgatcaaactgccatttaagggccccgggggggcccttccccctaagggggggccaagcccgggggggggggttcgccctggcccttggggggggggagggccaccaggcccgaaaggggagggatcggcccaaccttgcctttggggcccca

SEQ ID NO: 42420 - DNA, 1238 bp, Zea mays
  Clone ID: MRT4577_138689C.1
cggacgcgtgttcggacgcgtgggcaggagaaggaatgggatgaacttcaagcaatggcaggagctttgtgttacaaattgatcactgtagatggtaatactgccatttggaagaaatctactttctttttctgttgtgatctgtttaatggatttggccttgatctttgtagcaccgactatgatccagatgaaggatggtacttcaagttgaataaatgtgtcagtaaaatttcagtggcggaagagatagctataggttccattctcaagtggccagataggctgtctaaaccttctgctagggcatcagttatcaacaatggagcaaacttgtttgaagtagatagtcagaagtgggttaggagagtgtcatattataagaaatcgcttggtgtgaagcttgggagcacaaacatacgcaatgtcatggacatgaatgcattctttggaggattcgcagccgctataatatctgatcctgtatgggttatgaatgttgttcctggtcagaagccattgacacttggagttatttatgataggggccttataggggtttatcatgactggtgtgaaccattctcaacgtatcctcgtacctatgatcttattcatgctgatgcaattgactccttgataagtggcccgatttcaggcactagcagatgtgacctgtttgatgtcatgttggagatggatcgcatactgcgcccagaaggaactgccgttatacgggcctcgccagacgtagtagccaaggcagcacagatcgctcagtcgattcggtggaaggcacaggtgcatgacagtgaaccagaatcaggcagtaccgagaaaatacttgtggctaccaaaacattttggaagctgccactaacaaaacaataggctaatgcgagtttgaactttgaacccttttcacttgcgctcccttaattttgtattcttttggggtgcgctgaagggatatagcaggctaatgggattgctggagtagtttagtcaaggtggtcattctttccttcatttctttatagcgcaaagttaggtgtggtgtgattctcgttgtggctccattcccttgattctgattgatgttgttatagcctatgaacattactttaagccatctggtttattcccgtggtggttacagcaccctatgatcaagagaccaaccgatctagctgtataagagatttttttagttcaaaaaaaaaaaaaaaaaaaaaaaa

SEQ ID NO: 42421 - DNA, 281 bp, Zea mays
  Clone ID: MRT4577_13868C.1
agcagtggtaacaacgcagagtacgcgggcaccgcgattctgttttattcttgatagataattagttgtacatgtttatatgttcctcctaaacttaacaatcaaatcaattgcaggattttgcagattcattaggaattccctttattgagacaagcgcaaaggaatccatcaacgtggaggaagctttcctgaccatgtcatcagaaatcaagaaaaggtatgggaaaaaaaaaaaaaaaaaaaaaaaaaaaaagtactctgcgttgttaccactgctt

SEQ ID NO: 42422 - DNA, 609 bp, Zea mays
  Clone ID: MRT4577_138690C.1
aaaaaaaacgggctcccagggaaaaggggggttttttaccctgtttaggcctgaagttttcgggtcccaaaagtttaaacagcattttttttagttgggccgacctttgggggggcctgaaaaaaaaggcccttcccaaaaggggccccggttttttcccgcctacggggctccccaggccccctccccccggggggaagggggcagggcccccccccaacaactgggggtgaatcatacccaggactggtttttctttggaaaaggagggggcaaccggccccccggtgtttgccattgaaaaaaaatgctttgtgggaaggttaacagggggcccccggggggggtttccccatgccaggaagcccaaatcactgttcacgggggggttcgggaaaaactttgagttgcaaatcactgggggaaaatacccttttggggacaaaaggaagttggaaaaaaacatgagtagggggcgaggaaggttttcccttcccagaaagcaaaactccgggaaggttttactaagcttcccccaaaacaaacctacaaatttttggaagggggggggcatcccccttttctcctttgggggaacaaccccatttt

SEQ ID NO: 42423 - DNA, 659 bp, Zea mays
  Clone ID: MRT4577_138691C.1
gggatctatgctgccgctgctgcaccaggcgaacacattctggactggaacgccgctgctgtgcgcctgggggcgcagtagtggcagacgccagtcgtcgtcacactcacaccccggccgctccacgagctggtggtagcagttgctcggggatctaggactggggcctgatgcaacagcgagtcagcgactgcgtccagccaagtacgtcccccgcctacgcagagaatattttttaacaagccaaaccatgattcgaagaatgaaaagctctaaaaagccctcgcaaacatgatgggagctattgaggagcattgtgccaccattgtagatgtggtgcatgctgcattcgaaccatgaaaactacaagagttcaatgagtttaaccattccttagtggagattgagtccctcgctagagaccttgatcagctagctcttgaatgcaagtgcgaggtcaggagcatggacgtacttcatgatatcgatgttgttgttcctaatgatttccttccaatcgactaggagcctctgaacgacgtggactacgtgggctactacaattctgatctcatagggggcgatagggacacaattagaactatgttgtttgaacaattagaactatgttgtttgctgaatatatgtcaactttttat

SEQ ID NO: 42424 - DNA, 520 bp, Zea mays
  unsure (1)..(520): unsure at all n locations
  Clone ID: MRT4577_138692C.1
gagcnggacgggccccgggcagcgcaggcagccggaccgcgggagncaccccccaggccccggctgcgaccgccaccccccccaaggggcaggngaggccaaggagcaacagccaccnncaggggaccgggcaagggcaggggggcaccaaatttttttttttttgcaagnggccgacccananccacgggggggggggggcagccggacgaaggaggacanncccgccgggggcngcagnnggancagggcagggcccancgggcaccgaggccgacaggaagagcgannnggcgccggagaacggcaagacgcccggngnancccgcgacgangaaaagagnaanggacgagngcagnngcccggaaaggcgacgcaaaagggggnngaggaggcgcngacgnncnnggcccgcgangcgccaccgggnccnngggnnaggaagnccaaaggagggaaaacanncaaaanacccagcagcanccngcngcagangcccggcaagagccgggncaccaa

SEQ ID NO: 42425 - DNA, 125 bp, Zea mays
  Clone ID: MRT4577_138693C.1
gtgcgacaggttacaataaaggggggtttattgggggggacactgtcccaatagtgggtataaaacggacctcttggttggggacatcagtaatcaacggtgggccgaaaacttgcaacccaggg

SEQ ID NO: 42426 - DNA, 249 bp, Zea mays
  Clone ID: MRT4577_138694C.1
ggcggctctctgttagagcagctctaccatacgcaggtccgcggcgcgtgatgctagatggagcaaaaataatcctctaacaaattcaagagggcggacaccgcttcatcacagcgtactgaaggggcgacacgtgttcgcccagctactggtatccaggggcgcggatcctcaagccgcggatcgagatggttggacagcgtgacagtatgcggtcgacagcagctccatattgggcggacagatcct

SEQ ID NO: 42427 - DNA, 265 bp, Zea mays
  Clone ID: MRT4577_138696C.1
aatataaatatataagtttgttgtttggtataaactccaagttctgaagaaaacaaacaccagaaaaaaacccagggatataaaaaagggacgcccggtcgcttaacaaacggggtttacccacaggggacgcccaaccccagttcttgcccaacaagaaggcaccggttttaaccaaaaaaatgggaccgggccctcacctgttgcaggcaaaggcattgaacttttcccaaaacggggcctccctcggaaccgtcaattccca

SEQ ID NO: 42428 - DNA, 335 bp, Zea mays
  Clone ID: MRT4577_138697C.1
ggacccatgggaaccaaattagcaaattgggatttgatatcatttttccttaaacactgtatagctgggggaattttacagggacatgcacatacctagcaagatacaaccactcattgaatgagtgggcatacctcaggaaatttattaaaacctggggggcctaaaaaaacaggttgcacatttatcgctccttagcttttcctttgggttaaaaaagggaccctggggggggatttttaggataagggcacttatttctgcttttttattcgctggagccagatgaatttgaagtggcctttggatccttattcggagtgattttcccgcca

SEQ ID NO: 42429 - DNA, 171 bp, Zea mays
  unsure (1)..(171): unsure at all n locations
  Clone ID: MRT4577_138698C.1
cccacgcatccgggacatacaacttgagctttaaaaaacaacgaccccgaacggaaatgttggactccaagagccaaactacancccaaagcnaccccacnaaaaatttcagaccatccaaagagacctgctgatgaacacccacaaccaccatttaacatgctaaggaac

SEQ ID NO: 42430 - DNA, 1889 bp, Zea mays
  Clone ID: MRT4577_138699C.1
ccctcgcgtccggcacccccgggcggcgccacgagggtccagacagaaagaaagaaaaggggcaggaagaaatcgagcctcactcaaacaatcggctcgccgcaacgggcccggctggttcttcttttaacgcaagaaagaaagaaagaaaaggggcaggaagaaatcgagcctcactcgatccatcgcctcgccgcagcacacacgaggccggcggcgccatggccatgaagctggacatgtccgcgctcgagaccaacttcgccaacctgaccgcctccgccggcgacgacacgtacttctccgccgaggcccccgacgtgccgtccatggtgctccccatctgcgacgacttcgacggcttccaggcggccaccaaggatatggtgaagaataagaaggggacgaccacgcttgccttcatcttcgacaagggcgtcatcgtcgccgctgattccagggccagcatgggcggttatatatcctcacaaaccgtgaggaaaattattgaaataaatccttacatgctggggacaatggctggaggtgctgctgattgccaattttggcataggaacctaggaaccaagtgtcgtctccatgagctttcaaacaagcgaaggatctctattgctggtgcttccaaactgttggctaacatcctttattcatatcgtgggatgggactgtcgattggtacaatgatcgctggatgggatgagaagggtcctggcttgtactatgttgacagtgagggtgcgcggctcgtggggaacaggttctctgttggctctggttcactgtatgcttatggtatcttggatgatggttaccgcttcagcatgtcagttgaggaagccgccgaattagcgcgacgggctatttatggggcaacattccgtgatgcagcaagtggtggttgtgttagtgtttaccacgttggccctgatggttggacgaagctttctggggatgatgtcggggagctgcactaccactactacccggttcagaaaactccggttgaacaggagatggccgatgcgcctactgcttctgcttaaacctgttgctgagaaaaccttgagcggagccgcatgtatccatgaaccatgaattgtagaagcgccatgtttatgaacgaacttggacatgtttgtctcacaacgttagatcactctttgtgttctgttgattgatatcttaaatttgcgcaactgttgagtccttttgagatttttttagatctgtgctatgttgactccagctgtctgcaatcagatctcgttctccgtacgtggacaggaaaaaaaaaaaaaaaaaaggcccctatggcacaatgatcgctggatgggatgagaagggtcctggcttgtactatgttgacagtgagggtgcccggctcgtggggaacaggttctctgttggctctggttcactgtatgcttatggtatcttggatgatggttaccgcttcagcatgtcagttgaggaagccgccgaattagcgcgacgggctatttatggggcaacattccgtgatgcagcaagtggtggttgtgttagtgtttaccacgttggccctgatggttggacgaagctttctggggatgatgtcggggagctgcactaccactactacccggttcagaaaactccggttgaacaggagatggccgatgcgcctactgcttttgcttaaacctgttgctgagaagaccttgagcggagccgcatgtatccatgaaccatgaattgtagaagcgccatgtttatgaacgaacttggacatgtttgtctcacatcgttagatcactctttgtgttctgttgattgatatcttaaaaaaaaaaaaaaaaaaaaaaaaaaaaaagaaaaattcgaggggg

SEQ ID NO: 42431 - DNA, 140 bp, Zea mays
  Clone ID: MRT4577_13869C.1
caccttattattttttatttaaacctaaatacagggcagtgactttccttttacaacctcctaactaaaacaactctctccttacccaactaaattacctttcataacatacatcttacttcagctagcatactaactaa

SEQ ID NO: 42432 - DNA, 148 bp, Zea mays
  Clone ID: MRT4577_1386C.1
ccgcatgaaactcgttcattgatggggtgaatttttttactgaaacagcacactcaaactctaaactaaactcattccctctaaatttagctaccccgcctctttcttgaatcccgattgtacatccttccataggagggagaaaaac

SEQ ID NO: 42433 - DNA, 567 bp, Zea mays
  Clone ID: MRT4577_138700C.1
gccgcccatcgcaaggaagctcacgctacagaggttccttaggaagaggaaggacaggatcgccggcgctgacggccgcggccacaatgaggatgctccgccgcggaagaagacagactccgctggcgccggcgccaacgaccccgccgaatacgttcctgatgaagcctcgtggctcaggctctgaaacccgctcttcactgcaaatttgcaggagaataatatgaatgagaagggcaagagtgctggcatgcatgccacacatcctctaaaatgatacaataatagtgccgtgtgtgcctgtcagaattcctaagaattcttaggcattgtttgaaagggctgtaacttttttttctgaaagcaccttgccgtgaagcttttagaacatctctaacaggagagatgtatagaactctagcgcaaaaaattgcttcaacgagagttctattttacaaaaattcatcaaaattataggactctgtcagatattgttaacattttatttcctaaataatatgatataggactcagttttgttggagccgtaaatatttttatggcctt

SEQ ID NO: 42434 - DNA, 1268 bp, Zea mays
  Clone ID: MRT4577_138701C.1
aggccggccgggacaacaggcacttgtgacgagcagcaaggaagcggcaggtatatctatctatatagtagagtaggctagcaggtaccgcgcagctagccatggctgcctctgcttcttgcctgcttagcctcttggtggtggtggtgctggcggcgctggcctcggcgcagctttcgtcgacgttctacgacacgtcgtgccccagcgcgctgtccaccatcagcagcggcgtgaccgcggcggtggcgcaggaggctcgcgtgggggcgtcgctgctcaggctgcacttccacgactgctttgtgcagggctgcgacgcgtccgttctgctgaacgacacgtccggggagcagaaccagattccgaaccagactctgaatcctaggggcttcgatgtctttgacagcatcaaggcgcaggtggaggcggtgtgcccggggatcgtctcctgcgccgacatcctcgccgtagccgccagggacggagtggtcgcgctcggcgggccttcgtggacagttgcactggggagaagggactccactgcttcgttcccggcacagacgagcgacctcccgcctcctacgtccagcctccagcagcttctgcgcgcgtatagcaaaaagaatctcaaccaaaccgacatggttgctctctcaggtgctcacacgatcggacaggcgcagtgcttgagcttcaacgacacatctacaacgacaccaacatcaaccccgccttcgcggtgtcgctgagggccaactgccccagggcaggcagcaccgcccttgcgccgctggacaccacgacgcccaacgcgttcgacaacgcctactacaccaacctgctgtcccagaaggggctcctgcactcggaccaggagctcttcaacagcggcagcaccgacagcacggtcaggagcttcgcgtccagcacgtcggccttcaacagcgccttcgccacggccatggtcaagatgggcaacctcagcccccagaccggaacccaggggcaaatcaggcgcagctgctggaagctcaactcgtaaactactacgcccaatatgcaatgcgttatggcaggcagatcagagccaatcaataaaaggcctcagctcgttctctagctgtatacgtgtgtgtgtgactggtgttggtcgagtaagtgtacgtactatacatggatggagcagagagagagatatatatacgatctggtggtggccaccttattattgcatgcaaaaaaaaaaactagttcctagtccgcga

SEQ ID NO: 42435 - DNA, 355 bp, Zea mays
  Clone ID: MRT4577_138702C.1
cgcgcagcaacgagaggtgacatggagccatcaaacaagcttgcttctgtgatttctcgtccgagcagagagagagagagagagagagagagagagggagggagcatggccgaccacaaggaggagcctgtgccggagtctgtgatggacaagatcaccgagaagttccacggcggggactcgtcgtcgtcgtcgtctgactcggacgacgagaagaaggggtcctcgtcggagtcggcggcggaagccatgaaggccatgatctaccgtcttccccgccgtgagaggacggtccagtccgtactgggcggcggcacgcctgccgatcttatcctatggaggaacaggaagatct

SEQ ID NO: 42436 - DNA, 322 bp, Zea mays
  Clone ID: MRT4577_138703C.1
accaatgctgacattaattccagtgctcgtgcactgtttgcatgtagttcttgaaaacctaatggctggaaaagacctatgctgcttaatgattcttgccatgcgcctaggaaggcgttaatggtgccacatactctatggcagtcatctcatgctagatttatactgatttgctcaatcgctataagtaattgcgtagcattttggaacctatgtgcaagagagacaaaacttgcatgagagttccaaagtttgttgtgactaacctatgtcggacccaacaagagttgggctactaaaacccaagcttaattaccttgca

SEQ ID NO: 42437 - DNA, 299 bp, Zea mays
  Clone ID: MRT4577_138704C.1
gccggccgggctacgaactgctatgggtgttttacgtcctgacttggtcttgaagtgtattgtaccagttgttatggctggtattttgggtatttatggtgttgttgtctctgttttattatctggtggacttgctatgaagcaaacactctttagcggctttgttcaaatggctgctggtctttcagttggtctttcttgtcttgctgctggtattgctattggtattaccggtgatgctggtgtacgtgctactgctcaacaacctagaatgtttgtcggcatgactttgattttga

SEQ ID NO: 42438 - DNA, 703 bp, Zea mays
  unsure (1)..(703): unsure at all n locations
  Clone ID: MRT4577_138705C.1
atttcctaaccccaatctcaggcgtcaccgccctaaatctattaaaagaaaatcccatctctccgccgccgcgatgtgctcgccgctatgacagccggacgtacgatcttctcgccggagggcagtctctaccaggcggagtacgctatggaggcgatcggcaacgacggctcagccctcgggatgctggtgggcgacgttgtagtgctgagcgtgggacaagaaggtgacctccatgctcgttgagacctcccggtccgtctataagatgtacaagatcgactcccacctgtcgtgcgctgtggccgggatctgtgtccgacgcctacatcctcatcatcaccgcccgtctccacgcccagagttacgcgttctcctatgagtagcccatccccgtcgagcagctcgtcgcagtgccctctgcgacaccaagtaggattacacccattttggtggactccgtccctttggtgtgtctcttcctattcgccggtagggacgagcaccacggtatccaggtctacatgagcgacccatctggcaactatgttgcttgtaaggacgccgctgttgcggtcaacagacaggccgcgcagtccatgctcgagcaggactacaaggacgccttgacccgcgatgaaggncgtcggtctcgagctcattntcgtcagcaagaccgtggactccaccagcttgactgccg

SEQ ID NO: 42439 - DNA, 960 bp, Zea mays
  Clone ID: MRT4577_138706C.1
ccggccgggtgtaatctagtgtggcaatacaagcgacgggcagctgaagatggtagcttgtcattctcccagctctcccaaagtgtcactcagtcagttgatgaccttggcctcgagaagttcggcctaaatgattcacagttgcatgcagtagctgactgtgtcttgtcagcaatagacaaccggttgccttccctaaaactaatatggggcccccctgggacaggcaaaacgaaaaccatctgcactatcctctgggcaatgctcatgaagggcttaaggacacttacctgtgcccctaccaacaccgctgtattggaagttgcatctcgaattgtcaggctcgttgagcatctccatggcagtgtctgctttctcaatgacattgtcctgtttggaagcaaagaaaagatgaaaatcggccgtgaggacgccctttccatggtattccttgactctcgcgctaaacgactgctgccgtgtttcatgccaaccacaggctggatgcattgtttgcgctcactaatggaccaccttgagagtcctattacccagtacaggttgcatcttgagaaattactcaaaaatgaaaagaaaaaggagagcaataaggggaggttctagagcaacgcagggtacgatcattagaataccgccattcaaagatttcttcaaaggttatttcaacaaggtgtcaaatctgctgagaaagtgcgttgagacaatgtacaatgatcatccacgaagtccagaaacaggacacagctttcagtgcatgctggaggtgctcgagttgattggaattcttcaggagctgataaactgcaaaaacgatgacatatggtcagctgaatttcatgattgcaagatagaagatgacggtgaccccattttgtggtctgagcagctagcccatgtgcggagtaacactagcaaaaagcacaaactaaagctagctag

SEQ ID NO: 42440 - DNA, 475 bp, Zea mays
  Clone ID: MRT4577_138707C.1
ttgacccttgaagacatctttcttctttttcaccacaaggtccttgatgagtggcaagggctcatcaagctgcggctgcgccccaacctccaagtgcggcaagaagtaccctgacctgtaagagacaagcaccgccacacaagccaccgtcagactcggcgtggccccggagaagaaggccgcgcccaaattcatagaggccgcaacggagtccagcgaggccagaccacggctgcagctgccgctggcaactgcaagtgcgacccatgtaactgctgatcacatccatcgaacaccatggatatgattattatccatatagctaaggtgagtgttcaacaatattaaccgaagctcagctagctgccatacatacgaattgcgtggtgtgtgtgaaagagatagaaacatagttcttcacctagctatccatctctgcatgttttgcgccagactttatactcatgtacggacg

SEQ ID NO: 42441 - DNA, 1370 bp, Zea mays
  Clone ID: MRT4577_138708C.1
ggaggacgcggaccgcaagcgcaaacgcatccggcatcccaaacccgctaacgcgaaaccccaacacgtcccggcggccgccgcggagaagaacgacggcggcgacggcgacggcgacgccactgatggagtccctggaggcccttgtggcgcacatccaaggcctctccggcagccccgaggagttggcgcacctccacagcctcctcaaacaggcggacggcgaacccctgcgcgcccacgccgctgctctggtccccttcctcgcgcacctcagcccagagacgcactccctcggctacctctacctcctggaggcgtgcgcgacctccagttccaatctgagcgacttcggcggcggggacttcctggtcaccatcggcggcttcctcaccgcgtgctcggcggaccagatacgcctggcgcccgacaaattcctgaatgtgtgtagggtgctgaaggaccaggtgatgcagcttaacatgcccatcagagggatcgccccgctgcgggcggccgtccctaagatccagtcctcgcccgagcagctgaccccagtccacgcagactaccttctcctgtgcctgctggcgaagcagtacaaggctggactcagtgtcctggaaggtgacatattcgaagttgatcaaccaaaggatctgttcctctactgctactacggagggatgatttacgttgggctcaagaagtttcctaaagctctggagcttcttcacaatgctgttactgccccaatgtcatcgttgaacgcgattgctgtagaagcttacaaaagtatatcctagtttcactcattatggacaggtcctacaaagtgttgagatggtggagcatattgactcgtctatccagaggttaacggcattgtccaagaagttggcttcaattgatgagaacatgtcatgcgaccctgcatatttgttgaagacgggaagagatcgtggaagatttgactacgatgacttcgactctgttccacacaagtatttttgagatgatccgagccctacgtgattctgaagtacgatcatcaacgtagcagccattttgtaaagttgtctttagttcgatcgattaatggcttttgaaaattttgaaaaataaaacttgtttaaagaatgggtctgctagcatatttctcctccaatttggagacaagatttcatttgtagatcattttgctcggtagagtttgagcggcatgcattgcaaactacttactaccaaaaaaaaaaaaaaaaaaaaaaaaaaaaaaaaaaaaaaaaaaaaaaaaaaaaaaaaaaaaaggaaaaaaaaaaaaaaaaaagggccctagggacgcgggcgctaaaaaaaaaaaaaggccccta

SEQ ID NO: 42442 - DNA, 1178 bp, Zea mays
  Clone ID: MRT4577_138709C.1
cggagagtgtacaggggagtgctccccaaatccaagcgggaggttgccgtcaagaaggtgtctcacgaatcgaggcagggcataaaggagttcgtcgctgaggtggtcagcatcggccgtctccgacaccggaacatcgtccagttgctcggctactgccggcggaaaggcgagcttctcctggtgtacgactacatgcccaacggcagccttgacaagtacctctacggcaaggacgacaaggccacggcgacgctggattgggcgcagaggttccggatcatcaaaggcgtggcgtcagggttgctgtacatccacgaggactgggagcaggtggtcatccaccgagacatcaaggccagcaacgtcttgctcgacagcgacatgaacggacggctgggggactttggtctcgcgaggctgtacgaccatggagccgacccgcaaacaacccatgtcgttggcaccatggggtacctcgcgccagagctggcgcggtcagggaaagcgtcccctctcaccgacgtgttcgccttcggggcattcatcctcgaagtcgtctgtggccggagacccgtggagcagagcatgaccgacagccggctcatgctggtggactgggtgctcgagcactggcagaacggaaccctcgccgacgtgatcgacgcgaagctcaaggggagttgcgacgaggaggaggccatgctggcgttgaagctagggctgctgtgctcgcacccgttgcccgctgcgaggcccagcatgcggcaggtcatgcagtatctcgacggcgacatgcccttccctgagctcacgccgtcgcacctcagctttagcatgctggccctcatgcggcgcgaagggttcgattcctttatcctgtcggcgtcgacgacgcagccgttgtcgtccacggcgatgagtatagggactatgactggcctctctgatgggagatgacgagcgcgctgtcttgctggagcatgtacattggatggcgccagtacgtaccagtagtatgctatgctgtagagttgccaattttacaatttcttgaagctggaggagcaactctagtactctaccaataacatgtaacatcccgccgattcccggacgggcgctattttctcgtgacaaaaatctagaatcatagaccatagacacaaatcttttat

SEQ ID NO: 42443 - DNA, 455 bp, Zea mays
  Clone ID: MRT4577_13870C.1
ccggccgtccagaaagtggagttcgcatcgcagcgatcggccgcaacatgagcggaccgcggagcacgccacctgatccagcggcagggagcgagggagcgattcgatcagaatcgacatggacggcggggagcacgaagcagtgaggagtcctcctctaagcggcgggagcgcctgctcgtcctccgctccgccgtaaacgtgacgccggcgggggctcctccgtcggaaggacgagtggagccttctctcggattgtgacctccggggtgacgagggcgtatcctggtggcagccagcttgccatgcaggagttcatgatactcccaactggtgcctcctcgtttaaggaggtcatgaagatgggagttgaggtgtaccacaacctgaagagcataatcaagaagaagtatggtcaggatgccacaaacgttgttggtgaaggtgcgtttgca

SEQ ID NO: 42444 - DNA, 749 bp, Zea mays
  Clone ID: MRT4577_138710C.1
aggtgacactatagaagagctatgacgtcgcatgcacgcgtacgtaagctcggaattcggctcgagcggcgacggcgacgccactgatggagtccctggaggcccttgtggcgcacatccaaggcctctccggcagccccgaggagttggcgcacctccacagcctcctcaaacaggcggacggtgaacccctgcgcgcccacgccgctgctctggtccccttcctcgcgcacctcagcccagagacgcactccctcggctacctctacctcctggaggcgtgcgcgacctccagttccaatctgagcgacttcggcggcggggacttcctggtcaccatcggcggcttcctcaccgcgtgctcggcggaccagatacgcctggcgcccgacaaattcctgaatgtgtgtagggtgctgaaggaccaggtgatgcagcttaacatgcccatcagagggatcgccccgctgcgggcggccgtccctaagatccagtcctcgcccgagcagctgaccccagtccacgcagactaccttatcctgtgcctgctggcgaagcagtacaaggctggactcagtgtcctggaaggtgacatattcgaagttgatcaaccaaaggatcttgttcctctactgctactacggagggatgatttacgttgggctcaagaagtttcctaaagctctggagcttcttcacaatgctgttactgccccaatgtcatcggtgaacgcaattgctgtagaagc

SEQ ID NO: 42445 - DNA, 495 bp, Zea mays
  Clone ID: MRT4577_138711C.1
agtacactagcgacatatcaacaccaaagggagccagagatccaagaccttattgccctcctgtgcttttcagcaagcgctggtacctaaaatatgattccataatgctaaaaagaatacctgtttccagtgacagtcttggaatttcaataccaaaatatacaatactacatggtacaagaggagatgcaagcaagcatattacggaaattaggattaaccctagaacaaccatatactctattgcaacagccatacatagagcatttgcatatccaaagaatcggggcacaacaactacaaaaacagaacgcgtaccaaacaacaactaagccacctaagcaaaccttactgtttaccttcatcaacaaaagagtttttcatataaaaaacaatctggggggaacactgatatgtacttgaaggcacaccagatactaccatgtaaccaactaggctggagccactatgcctggttactgcaacaacagactt

SEQ ID NO: 42446 - DNA, 1698 bp, Zea mays
  unsure (1)..(1698): unsure at all n locations
  Clone ID: MRT4577_138712C.1
cctcgaggccggccgggaagcccagagtcggtcgctgaaccgctagacgtgcccgcgccagcctcggagaagaacagtggccacgacggcggcggcggcggcggcgacgccactgatggagtccctggaggccctcgtggcgcacatccaggggctctccggcagccccgaggagctggcgcacctccacagcctcctcaagcaggcggacggcgaacccctgcgcgcccacgccgccgcgctggtccctttcctcgcgcacctcagtccagagacccactcactcggctacatctacctcctggatgcgtgcgcggcatccgcttccaatctgagcgacttcggcggcggggacttcctggtcaccatcgccggcttcctcaccgcgtgctcggcggaccagatacgcctggctcctgacaaattcctgcatgtgtgtaaggtgctcaaggatcaggttatgcagctcaacatgcccatcagagggatcgccccgttgcgggcggcggtccgtaagatccagtcctcgcccgagcagctgaccccggtccacgcggactaccttctcctgtgcttgctggcaaagcaatacaaggctggactcagcgtcctggaagatgacatattcgaagtggatcagccaaaggacctgttcctctactgctactacggagggatgatttacattgggctcaagaagtttcctaaagctttggagcttcttcacaatgctgttaccgccccaatgtcaacattgaacgcgattgctgtagaagcttacaagaagtatatcctagtttcactcattgtgaatggacaggtcccaccatttcctaagtatacatccatatcagctcaaaggagtatgagaaatcatgcccagatttatgctgagctatctacaagctatagcaacggtagcaaaactgatttagagacattcatccaatcaaattcagcagcatttcaatctgacaacaaccttgggctggtgaagcaagtgctctcctcgatgtacaaacggaacatccaaaggctgacccagacttacttgactctttcacttgaagatattgctaggtctgttcaacttgaaacaccaagggatgctgaaatgcatgtacttcgcatgatcgaagacggagagatccatgcaaccataaaccaaaaggatggaatggtcagctttcatgaagatcctgagcaatataaaagtgttgagatggtggagcatattgactcgtctatccagaggttaacggcattgtccaagaagttggcttcaattgatgagaacatgtcatgtgaccctgcatatttgttgaagacgggaagggatcgtggaagatttgactacgatgacttcgactctgttccacacaagtatttttgagatgatccgagccctacgtgattctgaagtacgatcatcaacgtagcagccattttgtaaagttgtctttagttcgatcgattaatggcttttgaaaattttgaaaaatcttgtttaaagaatgggtctgctagcatatttctcctccaatttggagacaagatttcatttgtagaacattttgttaagtagagtttgagcggcatgcattgcaaagcatctcccctactatctctgttctcgaaaggcttgcgtncaaagttcagctttgtccaaaaaaaaaaaaaaaaaaaaaaaaaaaaaaa

SEQ ID NO: 42447 - DNA, 738 bp, Zea mays
  unsure (1)..(738): unsure at all n locations
  Clone ID: MRT4577_138713C.1
gccggccgggccgggacaacacctcgctttttgtactcttccgtctttgccctcgcgttatcgcgctcgtctcgcctggcctagctagctgcctgcctgccttggcttgcttgctacgtcgtgtacacagcgagaggaaggacaggagcaagaaaagaaagaagagagagagagagagagagtcgtttcctttcctcgaacttattccatggagacctcttctcacaagcgggcgcgggaggcggtcgatctcgccgccgccgccgccgccgccggagaggccgtgtggccggagtccgacgcaaagaggctgcggccgcaggacctgctcgacatgctcgaggacgacaccgacgcggcggccgccggcgacctggcgtccgtcatgcggagcctggaggaggagatagccagcttcgacgaggccgcggaggcggcgccgtcgcagcagccggagctggggttcctgctcgaggcctcggacgacgagctgggcctgccgccggccggatccgccgccgcctcttcggaggaggccgggctcgccggcccgccggagcccgccgcccccgccgccgccgcgctctacggccagatctgggccttcgacgacgagatcgacggaggcttcggtggctactcgcccgaggctgccgccgccgccgccgcgccgcccgngtgggacgacgacgtcttcggcgccggcctgttcgcgttcggcgacgacgcgtgcgggcc

SEQ ID NO: 42448 - DNA, 416 bp, Zea mays
  unsure (1)..(416): unsure at all n locations
  Clone ID: MRT4577_138714C.1
gaccaatatcaggcaattctctttttttaaaacaccctgctaatgcacggtgcttgctggaaattaattgttattgacagaccccgggcctgcgggtaccacacggagggcgcgtttttgccccctctattatatgccaggactcagtatgtatcatgtagttgagggacgcgttgtacattccggccctaagcggtggcgcttaattttctggtgaaacgctggtcagtatttggtcacagcacgctgcaaaggtgcactggttgtcttctgatgaggactccttattagtttcacttgtacctcgtggcgaggaagaacaaccctgntgaggacatgctcatgctggcccatgccttgaagagccagtccaatgactttgtctacatatctgtctcggacatggtgaagcaccg

SEQ ID NO: 42449 - DNA, 305 bp, Zea mays
  unsure (1)..(305): unsure at all n locations
  Clone ID: MRT4577_138715C.1
cccgggctgccgcagtatttccggntgttgtagaattccgtgaggtttgggcggtcatccttgtataagagtttgtcgtgatccgcgactttgtcgacgactatccgtatgtggttttggacactgagttttcggtcgttgtgtgttgttcgtttggttcttacangtngtgtgggtgttttgttgttttcttctcttggtgctttgtggtcgtgctgcgggttattgtttttttttttgttttgttttttttgtttggttgtgtttgttttcttttttttctgtttttttttttttgttttttc

SEQ ID NO: 42450 - DNA, 374 bp, Zea mays
  Clone ID: MRT4577_138716C.1
ggcgattgggatcctcgaggccggccggggcattttatccttcctggtgctctgtcacctctctcgctctgggccgccgccgccgccctaagccacgtgctgaggctttcgttggtctcttcgccggcgacgagcacccaggtactccctcttcttctcttcccttcgtgctgtgcgaagtcctttgtggggcgacacgggcggagtccgcgctgccgccgcaagagttcgctcgcctcgctcctcccaacctcgccgtcgcctgggcgccggtccaaggatggcggcggcgatgcctctctgctttcctcgcgcggtctccccccaagcgtggttgtctcctcgtggctgcgccagctaagacgcttccctgg

SEQ ID NO: 42451 - DNA, 327 bp, Zea mays
  Clone ID: MRT4577_138717C.1
cctacagtctgcttaatcctcatttgcatgttgtaaaaaaataggtattgaggccttttgtcctgtaggtattatcagaaagttaacaaggccgttgggaaggatcacttccctttgcctttgttagagcgcagtgaaaaacaagattcgagagaatgacaaatgacagttgtgtccactttattgtagagaagacatgcttatatatatatatatgataggggtcatccccaaggggtgtgtctcttggggatgttcgtcgagcccgttggattggtcacaaaatattgtaacacccccatttgatcaatccaagtccatttgatc

SEQ ID NO: 42452 - DNA, 619 bp, Zea mays
  Clone ID: MRT4577_138718C.1
cccacgcgtccgcccacgcgtccgattgtgactgactgacccaccggcgccgttccattccagccatggagctgctcgccctgctcaccgtgctgctgctcgcgcacaccgcggcatacctggcgtggcaggccgtgtcacgccgccgccgcgcgcgctgctacctgctggactacgcgtgccacaagccctccgacgaccgcaaggtgaccaccgagacggcgggcgccgtcatcgagcgcaacaagcggctgggcctctccgagtaccgcttcctcctcaaggtgatcgtcaactccggcatcggcgagcacacctactgcccgcgcaacgtgctgcagggccgggaggagagccccacccacggcgacgcgctggaggagatggacgagttcttcgccgacgccgtggcggcggtgctcgccaggacgggcgtgcgcgcgcgcgacgtcgacctggtggtcctcaacgtgggctccttctccccggcgccgtccctggtgtccaggctcgtgcgccgcttcggcatgcgggacgacgtgatggcgtacaacctctccgggatgggctgcagcgcggggctcgtcgccgtggacctcgcgcgcggcgtgatgctgac

SEQ ID NO: 42453 - DNA, 433 bp, Zea mays
  Clone ID: MRT4577_138719C.1
ggcagtaactccgtcaacaacaccaacagcaaaaccttctcctccctagactggaaacaaatagggaccgtgggcctgggcgtcgggaagggcctggcctacctccaccacgagtgcctggagtggatcgtccactgcaacctgaagcccgagaacatcctgctggaccaggacctggagcccaagatcgccgacttcgggctggcgaagctgctcagcaggtccgggtccgggccggcccggaacgtgacgccgacgcgggcgcgaggcaccgtgggctacatcgccccggagtgggtgtccggcctgcctatcacggccaaggccgacgtgtacaggtacggcgtcgtgctccttgagctggtgtcggggacgcgggtcttcgaccctgttctcatgggccgaggaggacgactgggcccatgctcatgct

SEQ ID NO: 42454 - DNA, 592 bp, Zea mays
  Clone ID: MRT4577_13871C.1
ggcagaggctggcaagcacgaagaggagcaggctcgctacacatgccatgaagaatggttcttgataaggctgcagcgttagccgatcatggtgcacgggacccaaatgccttctaccatcaaaaactcaaaacttgacttgaatcaaccattgggaagcgcaagtgatggagttcatgaatcgacataactggacaaccgaagtgtttttatggcaattaaaagggttttcttgcttgcagaatgatgtggagaatgatggcctggggcaacagtgccatccataactcgaaaagtttgatcaggtctcaaattatcagtttgtaggataaagggccctcagttgatttggccaagaaataagctgcttctctgatagctggctttgcaacagtatccctcagatgcacagtaatgctttgtatagaacaataggacacgatagttatatacatgatacattgcctaattgacaaactcagatggttgccccatgctcctaagaaagttagacaagagaactgtgattttatgaatggttctgtccagattttggattgactgctttgaacatgccaaatgctttagcatg

SEQ ID NO: 42455 - DNA, 375 bp, Zea mays
  Clone ID: MRT4577_138720C.1
ctggtattggactaattttattacaggtacacacaaataaccacatagacaaacatttagatcggcttgtcctcaaaagcatctttgaacatctgatcttgaacagacttgaagactttcttacagctttttgtatcgataggacaagtcgtgtgagcataaaaggatgttcctgcaaaatatttcgcatattgctccttgataaaccttcaacccttctcgaaatcagacatttcggggacggcgggagaattggggaaacttggataatcggcaaagatcttttgaagagggacctttggaagccttttttgggagagaacggaccttgttcaagaaaaggatgaaaggaattgcccttgaaaaaagggggca

SEQ ID NO: 42456 - DNA, 277 bp, Zea mays
  Clone ID: MRT4577_138721C.1
tctcgggacgactttctcactagtcggaggccgcccttcatttagtgggtttttttgagcatgggggcatatataccacacaaacgttttccccacaaaccacaacccctatctaaccctatagcctgttctacctgatgacaacactatcagcgttcaacacacccttgaacatctaccatcgaccaagctaatactccaatgacgcctatgcccttattactgacacagcctaatttcattgaatagccgatcaaaactcatagttctctcccct

SEQ ID NO: 42457 - DNA, 1400 bp, Zea mays
  Clone ID: MRT4577_138722C.1
attgggtacctcgaggccggccggatcgggtgcacgcctccattagcctcccattgacgcggtccgcaactcctctaaacccttcctctccctccggcgccggcgccgacatggccgtccactacctcctccgccgcggggtctccggtggctcactgctccaccctatccgcggtctcttcctcgcctccaaggagcttgggaggcgtccgttgggctctgcggcggcgggagacgcagcggccgagctgaggggcgcgcgggaggacgtcaggcagctgctcaaggccacctcctgccatcccatcctggttcgattaggttggcatgatgctggtacatatgacaagaacattaccgagtggcccaagtgtggtggagctaatggtagcttgagatttgaagtcgagttgaagcatggggccaatgctggtcttgtgaatgctctgaagctgatccaacctatcaaggacaagttttcaggtgttacctatgcagatctgtttcagcttgccagcgccacagccattgaggaagcaggtggccccaaaattcctatgatctatggaagggttgatgttattgcccccgaacaatgcccaccagaggggaggcttcctgctgctggcccaccttcacccgcggaacatttgcgtgaagtattctacagaatgggcctgaacgacaaggaaatcgttgcactgtcaggagctcatacacttggacgtgcaagaccagagcgtagtggctggggtaaatcagaaacaaagtacactaaagatgggcctggtgcacctgggggacaatcttggacatctcaatggctcaagtttgacaacagctatttcaaggctatcgaagaaaggcgagatgaagacctcctagttctgcctactgatgctgtgctgtttgaggattcctcattcaagatctatgctacaaaatatgccaaggatcaggacgcatttttcgaggactacgctgaggctcatgccaaattgagcaatcttggggcaaagtttgacccgccaaagggtatctcactcgagtagttgtggatggaggtgactgaacaggaaggggtcatgtttctttgcgtgaccattttcgaaggttggcaaggaaaagttattggggttgaatgatagctccacaaattggattcaccgattaaaggattttttttcttagcgtgccctgtttttttagtagtatgctacactatgaataaagcaacacctgtcatttcaagataaatatttgttacactaactaactgaaagcatccgaatcctaagtggtttcggtgattaatgacgacataagattgttataactaacttatgctttattgagtcaatttaagttaggtcacaataataatgattatttggtcaatt

SEQ ID NO: 42458 - DNA, 661 bp, Zea mays
  unsure (1)..(661): unsure at all n locations
  Clone ID: MRT4577_138723C.1
ccggccgggccacagacacatactcacatgccgccaaataaacaagtgcacacaaataaatacctgattcgatagattagccaagagcaatggcctttaagtcatacatcttgcttgcgcacgcgggagctagacaacgctattcaacaggcgggtcgagcaccaccccgttcacgttacaaatagggacgggatcaaagactggacaatcggtatcgtcacccctaacgctgcacacacatttctgacgcaagagacaaggacacacggaggcgacgaattctactatacacttaatgagacagggcctgtactgcgacaccttgagaacactatgtacagccagagaccagcgatatagagtactcctcatgttgaatacacatagtgactgtcatagtatcatatgagataccgcagtggtgcgactacaatcgatcccctagcaatgntaatgacgcgaccacctacaagaccaccgctcaacattgagattacactgttatgactagataagtaagtcgagagagcttatatagccaccaagtgccgagcggctaatatttaattttttttctttgcctatatcgacgcaccacacgagccaagaaaaaagttatgcccaaaataaaaaaaataaaagcggatcctcgagctccag

SEQ ID NO: 42459 - DNA, 649 bp, Zea mays
  Clone ID: MRT4577_138724C.1
ctgagaactcgccttgcatgcacgcgcacacctctgcttgggtgtacgtgcacagcggcagcagcggactaggagctccatgcatctgtctctagggtgtagagatcctgctcattgtacggtagctgccaccgtctcatcgtcaaccatgtctgctgcttccaccgtggatcctcatcctcctcatcagcagcagcagtgcagcgataaggtgtcgtccatggagatggagatccccgccgaccttatcatccggatcggcgagtccgttttccctctccacaaggcggtgatggtgcccaagtgcggctacatccgccgggccgtcgaggcggtggcgaccaggcccagcagcaagggcggcgccgacgccgacgccgacccgccggccaccgtcgagctggacctctcggcgctgccgggcggcgccgacgcgttcgacaaggcggcgcgctactgctacggcgccaacttcgagatcacgccgcaaaacgcggcggcgctgcgctgcgccgcggcgttcctggacatgcgccacgcctcagcggacctggccgggcgcgtggacgagttcctggcgcgggcggcgctgcgcgcgctcccgggcgccgtggccgtgctccgctcctgcgaggcgcccggcctgcgc

SEQ ID NO: 42460 - DNA, 1572 bp, Zea mays
  Clone ID: MRT4577_138725C.1
tgggattaaagttggaaatttctgttacgtgaaggagggacttgttcttggtcacatcgaaccacgcgtccgcccactcgtccgggggcgtgttggtgcagaatctgaagacatgataaaaattgcagtagatggcctaggaaagaatggatttatcaactactatggtttgcagcggtttggaagtggttcaataccaacacatcttgttggggctgctttgcttagaggagagtggaaggttgctgtaaacttgattcttgatccaagggaaggagagcgtgatgacatcaatgaggtgcgcaaacgttacaaagaacatggtgacattgatatggcactgagaaacttccctcgacacctcgtagctgagagggccatacttcaatgtctgaagaaatgccctggtaaccatctacaagcactcaagggtataccaagaacactgagaatgatgtacgtacatagttaccaaagttatctgtggaatcatgctgccagtatgagagtggaaaagtatggcatctcacaggttgtagaaggtgacttagtgtataacaaagaatgcccttcagaagaatcaacttccgtagatattctggaaactgatgatgaccatacaaattcaattgaaatcgatctatgttctgaagcacaaccagaagaaagcatccagtctgcgaagatagttgattctggagattttactaaggggatatacacttttgatgatgttgtcctacctttgcctggttcacaagcattgtttcctgggaatgaaattgccgagatttaccatgaaatggctagaaaggatggcattagcttgacggagaatgctcatggtgtcaaggagttttcgattacaagcatgaaaggtggttaccgccgagtgttccagcggcctattggttttgagtgggaactcataacttacacagatgatacttcatctttagcagaaactgatttggatgttctgtccagaaccaagcctaaagaagcaaacgagcttatttctaagcaggaatcgcaggataagttggaaaaggctcctgatacctctgtgccaactaatgggaatagctcccaagaaaagcttattggcagcccagatatactaccaaagaaattggccttaaaattagcatttactttaccaacatcatgctacgctacaatggctatccgggagcttctgaagacttccacctcagttgcatatcagaaaacactcagctgctagattctgtttggaagacattccttcataggagtatctcttaattacatggctgctgcctgtcttcacggcagttagaatacctggaggactgatgaatccacaaacatgatgcattctgcacatgaggcataacaaacaatatgtcctaataagtgtttcttaggggaagaccgtgaggatgatgtattgggatatctattccgcgacatgctttgtataacataaactccatttgcaataatggaatcaacttgggttagcagtaaaaaaaatatacttgggatccaaaaaaaaaaaaaaaaactcgagactagttctcctcgtgc

SEQ ID NO: 42461 - DNA, 3276 bp, Zea mays
  Clone ID: MRT4577_138726C.1
gcacaacataagttcaagcaggccaatgtggtgcaccagccagcagctcgggacactaggcaaatgactgatgtgcaggaggatctgataaatggattagcatcgaatagttcgtgtgaacggccttcaattttccagaaatcttctttacagtatgctgatgatcctgatcaacaagagacgtttcggcctcttgctgcgaacaagggcagcatcaccacatctcttgagtacacatgcatctgatatgaatctagatgggccattagtcaattcaaggagaaacttgtccatatcaccacctcttgatgtgttctctaggaatgtgtcccccaagagagcactagagaggctgccaccatctcattctgtattgggacctgatcccagaaaattcactgatcgaaatggcaggttaagatggggtttggatgatggtgcacaacggcctacaatcagtatgcttgatgaagagtacaggaagcaaagtgcaagggaacttattgatgcatatgggaattgtcaaggacgagatgctgatgaacgacttcctaaagtgcagcgcctggatccaaatggtatggctagcagatctagtgcacgaaattggttaacttccgaggaagaagagtattcatgggaggatatgagtccaactttgactgatcgagtcagtagcagcatgccatcttttcctcctggaaccatgagaattggatttcctggggcaaatgcagggttactggaatctgatgttgggaggcacaatttcccaagccaagctactagattatcagttgatgtttcaccatttaatattgaagataggatttcagctgcaagtcatgttgacatttccacaaggagatatccaagcaattttggtgttcagaatggagctcttttggagtaccagaattctgaacatactctaaatcatgggagaattgctaccatgccagctccaccttggcaacagcctattggtcttccattgcgaatacaagcacctgaacatccttcagtacttggtagaataccacagcctgtcgacggtgaaatgccagtcaagaggttggacattagtggcacgtacaatggtttgaatgtagataaatccttggtgaagcataggtcatcacctgctcctgccccgacagaatggctcccccttcaccatgcccaatcacaaactttaccactaattatacctgataccaaacatgttagaagtgcatcggatagtttagaaattagttcttttgttagccaaggagctagttcatcagtatttgttccgcatcatcagtatgatgccttggaccggaaaacaggtacccgtaacttagctcaaccaccatatcagcaccaagatttgttgctaccaagccaacaaaatcaaggtacaattttgggaaaccaagttcatcctcatctgccccaacagttacatccccattcccatcctcaccatcaggagacttttagaagctttgcccctggcatgactgtatctccattccaaggacaaggaggcaatgcaaccatgacaccagtttccgttctgccaactttttctgtaccacctgctgtgccaccctatggcgtgctgtctgcacctgggtttcctatgccaccattaccgcccggaccaccacctgtcccactgcagatgggttcatcatcatcacaagttggtggccctcaaccatttgtctctggacttttgagtaaccttatgcggcatggtgtaatttcactggaaccacctagccaatcccaggattctgttggagttgacttcaatgtagacctcaaggtacggaatgagcctgtcatcaatgctttgtatcaggatctttcaaggcagtgtaaaacttgtggccttcgatttaaatgccaagaggagcatcgtgctcacatggactggcatgttacaaaaaataggaattcaaagaaccgtaagcaatcttcacgtaaatattttgtcacggtggaggaatggttaagagctgcagaaacagtaggaaacgatggagttcctgcttttgtgccctcagacccagtcccagatagaaaggaagagagagaaattgctgttcctgcggatgaggagcaaacagcctgtgcattatgtcaagagccatttgaagatttctacagtgatgagactgatgagtggatgtatagaggtgcggtctacatgaatgcaccagacggtaatattgatggtctggaaaggtcacggttgggacctattgtccatgctaaatgtcgatctgggcccagcaatacttagggtgggcatggctgggatgacttgatagcttttttttccgttgcggctgtaggcatgacctgtaaactactggagactcagaatttggtatggttagattttttcctatctatggcttcgttaacagccaatgcacagaatgttaatgtgacaatagtgcataactgtaaaatttttctgtaattcagtgattggaagttagtaatcggcacaacattcactattgtcatattgtgcttttgcccccgtcattttgtccttccatagttgcacagtgctgctttttcattacagccgtagtgtgatctatacttaagcttcatgtttagggtttctgcagcacagttgttgtcaggacagcggtttatggagccatggtctcactggacatgggaaacaatatatttcaatagtcctgctttcttcctcgttaatatcttgtgcaggatacataccagttctctatgttggttggtagctttggaagggaccgtgcaagatgaccaagagtgctggccactatttatgcctaagtattgaaagggactagatactgtcattaccttattgccaatttttttagtattttcctttgtaagttgagagcattgtttgtgactattattcttggttgcttgtatagttccatcttgctgatatgtttatactccaaaatgtgggtcagaatgtcttatcagactttattctttattctggttggtatatgctctggccaatgaaatttcgcaatgttttttgtccataacaaacatctatggactttaaggtggacataatgttttttagagctagtttgggaacctcattttcccaagggaaattgtatcttgaggttaacccccctgtaaatagaggatagtctccttgctagtatttggctgtatgcaacatgtttttggctacgattatatatgttatctgactaaataaaaatgctggatgtgagttgttgttcc

SEQ ID NO: 42462 - DNA, 504 bp, Zea mays
  unsure (1)..(504): unsure at all n locations
  Clone ID: MRT4577_138727C.1
gccggccgnggtcgcggaaaaaaaaaaaaaaaaaaaaaaaaaaataaaaaaaaaaaaaaaaaaaaaaaaaaaaaaaaaaaaaaaaaaaaaaaaaaaaaaaaaaaaaagatgccccccaaaaaaaaaaaaaaaaaaggatggctgcggccccaccaaacctgcgcgggaatctccggggatctcccccccctggtcgggggccaccggccaaagcccgtgaaaggggccggcttaaggaaaactaggcggaaaagggccctccctctaaaaagctcccccaggccaaaacattgtgggaattgccctccggggccggaaaaatttcggggatcaacgccgcagggctcgggtaagtcgctcgcccccgaggaaaaggacctaatcggccccagccccgaattttttgccagagccctgttcttttcccgaaaaaggaaccgcaagatgtatgaaaggtcatttaaggacccttctggtttctggtaaaaaattcccaaaaccttt

SEQ ID NO: 42463 - DNA, 243 bp, Zea mays
  Clone ID: MRT4577_138728C.1
tattattttttttttttttttttttttttttttttttttttttttaaaaagtgttggacaaactttgatctgctcagaagggacctaaaatttttaggaaaagaggggtgttttctttcacttgtttggacaagcaaacccacaggagacaacttcttttcaaacccgaattttttttttgaaccaaccagcaaccggcaggttggactccacatatcttggacacaattagggtgataaagt

SEQ ID NO: 42464 - DNA, 730 bp, Zea mays
  Clone ID: MRT4577_13872C.1
gttctgcgccgagactgaaaacggcatcagtagcagacgcaggcgaccacgaggagtgacggcatcagctgcggcagcgacgcccaacaacggcacctcatgggcgccgacgacgacgacgctgccgcctgccgctgtggcggcgcgagagagggaggcggagatcgagcaggccatgcgcgcccgcgtctcagacttcaagaagcaggccgactccttgacccttgaaggcgttagaagagcactgaaaaaggacctgggtttggagacatattcacttgatgcacataaaaacttcataaatcaatgtgtagacaaggtttttgctgaatcccatgatgaaaatgcaaatgataatgcttcagaggatcctgaagccaaagattatttatccaaagaagagaaagatgttggtaaacaaatgcctgtttcaaacaaaacgtccttcaatgctgatgtcgaaacatgtggcaagatagaaaaggatcctgaaggaggaagggatcaaacttccagcagtgatattagtgaagacgtgataaaagaagccattgaaaaaaggtcgtcttattttagaaagaactctgagtatgtgtcctcaccttctcattatatgtataattattagggatcgcaacgggtatataccgtcggtaatatcatttcgtacctgtaaaaaaatctacacattgggttacacatatctgcttgttggtacagagtcttaccc

SEQ ID NO: 42465 - DNA, 175 bp, Zea mays
  Clone ID: MRT4577_138730C.1
gaatcgccgacgcgaactttctattgttgtttcagtatattgaaaaaatttccgggaggtttcattacatatgttccacaacgggcgggcgaggggaggcggtatggaccgatcacggacggacagacctgctccaccattctgtggcggaggacttggttgcgggcgagcacct

SEQ ID NO: 42466 - DNA, 573 bp, Zea mays
  Clone ID: MRT4577_138731C.1
ctcttgttctcttcccctccatcgagcgtcctctcgcaagatacatctatgcaccttattcgccatgctggtgcccgcgccgcaccgatcacttatggcggagcatctcgcggacgagtctgtcgcaaggtcacccgacgctgtccctgttgtcgacgaagatcgggctggatgtctaccaactccagatgttgctctctgttcaaggcctactttgcgcggatgcccacaggagtcgatgtacgaccaatcatgcctcatcgccatcgtgatgcaagtcgacaccgttgacttcaccacatgtcctgaacactcatgcgcaggcacaatctctccctgcactctaagctcgaccagactatcgactattctgtcatcatacaaggaccatatagcactcatctcggcatgtatacatcccaacatgtcatgatgatcctcaaccagaaactgactgattagatgaacagatgagatcatccgcgtaggacaaagtataccaacattcctcaatcctatactactacctcttgctggtcatgatactcctgcgcagacctatccccgatatct

SEQ ID NO: 42467 - DNA, 198 bp, Zea mays
  Clone ID: MRT4577_138732C.1
ctcccccctaccctaccccccacacggccacacacacaccgtcgcgtccgacccccacgccgtcgactgctcgaccggtcggctccgatggggtacgtgctgtcggcggtgggcagggtgctggagcagcccacggcgtggggggcggcctgggagatggcactcctcgcggggcccctgtgggcggcggccctcctc

SEQ ID NO: 42468 - DNA, 372 bp, Zea mays
  Clone ID: MRT4577_138733C.1
cccacgcgtccgaggacgcgtggggtccgatcgatgcacctggggctctgcgctctcatgactgctggattagtaacaatcctatacacaccttctgagtatgagcatcagtcgcaatcaagctcatggctagacacaggggggatatgggaaaagaggagctctgatccctgatatgaatcttatgctaacattcagggggacgatgtatatgaaacaatccaaaatctgaatgcaggtgaacagaagctcattgtatggactcctgaatattaacaggactgagctcgacgctaggacacacatgctgccagaacgtgagtcctcaatcataaagctggagcatgccaaagaaagcattacctggcaaac

SEQ ID NO: 42469 - DNA, 332 bp, Zea mays
  Clone ID: MRT4577_138734C.1
cccccaaagggaaaccattttaaaaatccagcttgtaaatgtggcttttttgggcctccaagggctccatttttggttacaaaattttgcagttttttaacagggttttccatttgaagaattcaggggggccggtttttctgaccccttcttgaagaatggttcccgccaacaaagttggaatgttcctggcatgcattcaatctggagtttttgaagaagctcctggttttacacactttcattcaatttcccatttgaatgcagcacatgctggtttttttgaccacaaaggtccaggttttgcaaggaatcaacagcccccccaaagg

SEQ ID NO: 42470 - DNA, 182 bp, Zea mays
  Clone ID: MRT4577_138735C.1
aggccgccactactccgatctgagtacacagacacagctaatacctagccagcagcccaccacccagtaactacccgtacgcacgaacgtgcgcttttgatggcgaccccggcgccgcgcctcctccaccgtgagttctcccgcctcctccgcccccggagcgcgcgccacccgcgccgccc

SEQ ID NO: 42471 - DNA, 177 bp, Zea mays
  Clone ID: MRT4577_138736C.1
tttttttattttttttcaaaagtatatgtgggggaggtgaagatattaccagtaaatggacgaaaaacccaatataatataatttacggacaaaataattacaagggctgaggttaaagcgaaatagataaaattcccacaaattataatggtggacatatgtatacattatagagg

SEQ ID NO: 42472 - DNA, 585 bp, Zea mays
  Clone ID: MRT4577_138737C.1
tataataaattttggctctttgcatggtgaacttgccccaaaaaaacaaaataaattttttttttctttttttaaaaaaaaaaaaaaaaaaaaattttttaagagccttactccttttttcaaaaagggaaaaaaaaaacaaaaggccccgcaattttataaaatttgggggggggccttaatgtttgcccccaaccgggaaagaaaaaacaaggggggggaacgacaacgggggctttttccttaaagggtcccttttttccttccaagcctcccaaaaaaaaaacccatcccaaccttttcctgttggggggtccccccccccttgaactcttttttttttcccaccttgctgaactaaaacccccccggcttcccctccttgggggggcaaaccggcccccccccggacccaagggacttggccggacggcccaccttttttaacttttgggtaaccgttttctttcccccccctgccgggccccccaggagaagggttgtgggggggctccatgggggggcccccccttcccctttttccttgggacccaaaatttacggggtttagccggtttttttttt

SEQ ID NO: 42473 - DNA, 2675 bp, Zea mays
  Clone ID: MRT4577_138738C.1
atggcccattcgccggcgcccagcggcggcggcggcggggggccgctgccgctactggtgtcgctcaactgcctcgacgacctctcgctggagcaggaggggctggcgggcgtggccgcggtggagcacgtgccgctctccgccgtcgcctgcggccgcatcgaggccgcctccgcggtgctgctcccctccctcgccttcctcccgcgcgccgcgcagcgccggctgcggccctggcagctgctgctctgtctcggctccgcggaccgcgcggccgacgcggcggcggccgccgacctgggcctccgcctcgtccacgtcgacgccaaccgcgccgaggaggtcgccgacaccgtcatggcgctcatcctcggcctgctccgccggacccacctcctctcgtgccacgcctcgtcggtcccggccgccggctggctcggctccgtccagcccatgtgccgcggcatgcggcgctgccgcggtctcgtgctcggtatcattggccggtccgcggccgcccgctgcctcgccactcgtagtctcgcgtttcggatgagcgtgctctacttcgatccgcgctacgtgggactgttgtataggctaagtaattttagtactacaattactactaagggggtgtttggaaacacagtttttcaaaaccacggtatttcaaataccacagtatacaaatgccatgacatgatctcagttttcaataccacagttttagaataccacggttttgaatacatggaggtgtttgggaacaaagcaagtgggaaaacaaagcggccttctattgttttcccttctgcagcaaggagaatggacactctcaatgatttattagcagcgagtgaccttatttcgctgcattgcggattaacaaatgaaaccatgcatatacttaatgctgactgcctgcagcacataaaacctggagctttcatagtcaatactggtagttgccagcttatagatgactgtgctctcaaacagctcttgattgatggtaccatagctggttgcgcattggatggtgctgaaggtccacagtggatggaagcatgggtgcgggagatgccaaatgttttaattcttccgcggagtgcagactacagcgaagactacagattggtaggaagatggagtgcgtgtttgcaagcaatgcttttgatgtttgggagagctggatgctggacggttccttgctggagggtagcagaaataagtgaagctaaaaatgaagatgactatctaggcccacaggcgaaggatagccagtcacagatttttgatactgaaatagatgaaagccacataacgctggagtctgaaaagaaaagagccatatcccaccataaagagcctcaggcgtctggaaagtctgtaaacattggctcccgatctgaagggaggcgtagtcgttctggaaagaaagggaaaaagaggcctgcccatcgcagacctcaacagaaaccagatgacttatctgctgttgagagtgacagtaactattcctcccggagagatgatgacactgcaatgagtagcagggaccaggttgtaagttccagttcacgatttgcctctcctgaggacccaaaatacaagcataaatctctttctgaatccccgatggaaataacatccgagaagaaggtgcctgtactactcagtagaaagtaccctgataaactaaaagatggatttattgtagctttgagagcaagagataattcagggtaccatgttgcaagacagagagtagttggtggtggtggctggattcttgatgttgtctcaaatgctacaaacagggaccccgctgctcagttccttgttactttcaaaaacaagcggggatcctttgattaataggaagatggagtttgtgtttgcaagccattcttttgatgtttgggagagctggatgctggacggttccttgctggaggttatggtggttgaggtcgtgctcgctggcggtggtggatcaatgctagtccgcttggaggtcaaggtctcgacatgctcgaggggatggcctcacctggaggaggctagaggagtcatcatcggagccgagcgcgggaagcacgggaaaaggagcaccgtcaccgactcaccgtccgaagacgtgcggtcgcatgagatgagaaagatttcactgtttcacggatggaaagagatcggagactaatcaattgcagaaatccttcggctgtattggacatttgcattgagatcctcccagccccaagtgaaaaaaacggagtcactaggtggctagattccccccgctgggggctgtaaaaatgatttgagccatcattattgttcggttcggtttgcttcctccttttttgaaaaaaaattagcttccagtttttctattcctctgcttaagttcccaattttgtcctttctgatgtagggcccatgtaaagttgtagacatatatatcaatacatcatgtgtaacgtgttttttcagtttccccagtgtagctttgcctatttctcttgcctagggcatagagcccaaccaaaaacgtgttttactgtgtgtttcgttcccctcccccttaaaaaaaggagttgtgtgaaagctgaaacctgattggcccaccaattgtaaaacacccctgtgtaacgtggttttcagtttcc

SEQ ID NO: 42474 - DNA, 584 bp, Zea mays
  Clone ID: MRT4577_138739C.1
gggaaacaaacggccttctattgttttcccttctgcagcaagggagaatggacactctcaatgatttattagcagcgagtgaccttatttcgctgcattgcggattaacaaatgaaaccatgcatatacttaatgctgactgcctgcagcacataaaacctggagctttcatagtcaatactggtagttgccagcttatagatgactgtgctctcaaacagctcttgattgatggtaccatagctggttgcgcattggatggtgctgaaggtccacagtggatggaagcatgggtgcgggagatgccaaatgttttaattcttccgcggagtgcagactacagcgaagaagtgtggatggaaataagagagaaagcaataactatgttacagtcctttttcttcgatggtgttcttccaagtagtgcaatttctgatgaagatgaggaaataagtgaagctaaaaatgaagatgactatctaggcccacaggcaaaggatagccagtcacagatttttgatactgaaatagatgaaagccacataacgctggagtctgaaaagaaaagagccatatcccaccat

SEQ ID NO: 42475 - DNA, 381 bp, Zea mays
  Clone ID: MRT4577_13873C.1
cccacgctttcgctttgccttcaggggccacctccggacaacggcgtctgtggggtatggcacgacgaggcgccagcgcgcggcttcgacgtgaaccgggcgccgactgtggtggggagcgccctgccgctcggcgaagactaggaggagcccggcgccgcggcactgtcgtcttaacccaacgacagcgcgggctcattgccgatggacctggtaggaccacccgcccacacccagggcgccgccgcgcgggccggaggggaccggtcttctgttcccgccactgataaggacgacggggcggtcgcgcacactaaggatgcgcctgccccaggcgcactatactgtcctgggcgtcagcttgcaggaggacggaaccct

SEQ ID NO: 42476 - DNA, 266 bp, Zea mays
  Clone ID: MRT4577_138740C.1
agccagtccagccactatacccggagacgctcagctcatcggtggttaccagcagcaagaggctcgatagatcgccgatcgactcatcagtagtagtcgttgccggacacagtagccagtaggggcccggccgggggaacgccggcggtggtctgacagtgccacgagcccacgagagggagagaggcccgtcgctgtccgtgccgcaggacgctgccgctggatcagggcaccactacgatccgggctgcaactaccggcaggct

SEQ ID NO: 42477 - DNA, 767 bp, Zea mays
  unsure (1)..(767): unsure at all n locations
  Clone ID: MRT4577_138741C.1
gacgcctgcggctccggtccggaattcccgggtcgacccacgcgtccggctgcgatgagccggcgcggtcgcagtctccacggcgcaggcccacggtagcgcagccgctctgaggtcgaatggtatgtggttcatgtagaccacattttgtttccctctcacccattgatggacacttgggtagcttccatttttggctgttgtgaataatgctgctatgaacatgggtgtgcacagagctctctgagacgctgctttcagtccttctggtagatcttcatggaggagcacggagtgacccaaactgaacacatggctaccatagaagcccatgcagtggcccagcaagtccaacaggtccatgtagccacgtacactgagcacagtatgctaagtgctgatgaagactccccttcctcccccgaggacacttcttatgatgactcggacatcctcaactccacggcagctgatgaggtaactgcccatctggctgctgcaggtcctgtgggaatggccgctgctgctgctgtggcaacagggaagaaacggaaacggcctcatgtgtttgagtctaatccatctatccgaaagagacagcagacacgtttgcttcggaaactcagagccacgttggatgagtacacgacgcgagtgggacagcaagcgattgtactctgcatctcaccctccanacccaaccctgtcttcaaggtgtttggcgcagcacctttggagaaatgtgtgcgaaagtacaagagcatgat

SEQ ID NO: 42478 - DNA, 817 bp, Zea mays
  Clone ID: MRT4577_138742C.1
aacctcccaatccactcaaccttccagttcgtccgtaagcctcagcgccggaagtaccgcgatcgagcgagcgagtttcccgggcccacactgatggctctggttccctcgggctcaggcagcgcgccggtgatcgccgaggtggagatgaacggcggcgccgaccagagcgccaccaccgtgcgagccaccgtcgtgcaggcctccaccgtcttctacgacacccccgccactctcgataaagcagagagattaatagcagaggctgctggatatggttcacagttggtggtgttcccggaagcttttgttggtggttatcctcgtggatccacctttggatttgggatcagtattagtatcactaatccaaaagacaagggaaagggtgaattccagaagtattatgcagccgccatagacgtgcctggtccagaggtcacactcttagctgctatggctgggaaatataaggtctttctggtaatgggtgtgattgagagagaaggttacacactatattgttcagtgctcttctttgaccctctaggtcggtacctgggtaagcaccgcaagctcatgccgacggcattagaacggataatatggggatttggagatggatcaacaattccttgtttatgacactccacttggaaagattggagcccttatttgttgggaaaataagatgccactcttgaggacagcattgtatggtaaaggtatttgaatatactgcgctcccacggcggattcagggccagtgtgggtagcttccctgtaccacatctccttggaggggggaagctttttt

SEQ ID NO: 42479 - DNA, 740 bp, Zea mays
  Clone ID: MRT4577_138743C.1
ccggccggggctggccccgcatctggcccggattaaccgccttgggctccctccccagattgccccacccaccgtcagcctcgtcaggtatgtctcgtgttccctaaccttgacgcttctcccttctcggcgcctgcttcgttggttgccttcagcggacgccgccgattcggctctcctgttcggcgccctccccagattgccccacccaccgtcagcctcgtcagggtcctcccaggacaaaccatgctccggagacagaggcggcagagctggggcaggagcagagccatcacagaaattcttgtctccagattcttggtcaaaggaatgttggacacctgctagccaatgtgcagccgcgagaggtctcagacagataagatggtcgacggcatggacttcgaggagctctgcagcgacttcgaatgcataagcagcccctacgtggagtccataatgaggcaggtcgcgcgggacatctttgagcttcgcgaggataaccgcgcattcagctgctacgccgtccccgtgaagtatgaggctccttcctgatgataatttataatgataaatcgaggaaactccaataagtttccttcctttttttcctttcgtttttctcccttctctgatttttcactgtggagggactggacttccgacaaaggaaatcacaacattgtatatgattgacttgtaatatgttagaaaaaaaaaaaaaaaagcgcctgtacgtt

SEQ ID NO: 42480 - DNA, 916 bp, Zea mays
  Clone ID: MRT4577_138744C.1
aagtctgtaaacttggctcccgtctgaaggaggcgtagtcgttctggaagaagggaaaagtggcctgcccatcgcagacctcaacagaaaccagatgacttatctgctgttgagagtgacagtaactattcctcccggagagatgatgacactgcaatgagtagcagggaccaggttgtaagttccagttcacgatttgcctctcctgaggacccaaaatacaagcataaatctcttgctgaatcccctatggaaataacatccgagaagaaggtgcctgtactactcagtagaaagtaccctgataaattaaaagatggatttattgtagctttgagagcaagagataattcagggtaccatgttgcaagacagagagtagttggtggtggtggctggattcttgatgttgtctcaaatgctacaaacagggaccccgctgctcagttccttgttactttcaaaaacaaggatactatggggctccgatcctttgttgctggcggtaagctactacagattaataggaagatggagtttgtgtttgcaagccattcttttgatgtttgggagagctggatgctggacggttccttgctggagggtagcaagcttatcaattgcagaaatccttcggctgtattggacatctgcattgagatcctcgcagcaccaagtgaagaagacggagtcactaggtggctagattccccacgctggggactgtaaaaatgatctgagccatcattgttgttcggttcggtttgcttccttcttttttgaaaaaaaaattagcttccagtttttctattcctctgcttaagttcccaattttgtcctttctgatgtagggaccatgtagagttgtagacatatatatcaatacatcatgtgtaacagtgttttttcagttccc

SEQ ID NO: 42481 - DNA, 854 bp, Zea mays
  Clone ID: MRT4577_138745C.1
cgttcttctctccgtagtagctaacagtatagtgtgggcgtgtggccccgcatggagactttccctcctcgctggccccgcatctggcccggattaaccgccttcggctccctccccagattgccccacccaccgtcagcctcgtcagggtcctcccaggacaaaccatgctccggagacagaggcggcagagctggggcaggagcagagccatcacagaaattcttgtctccagccgcgagaggtctcagacagataagatggtcgacggcatggacttcgaggagctctgcagcgacttcgaatgcataagcagcccctacgtggagtccataatgaggcaggtcgcgcgggacatctttgagcttcgcgaggataaccgcgcattcagctgctacgccgtccccgtgaagtatgaggctccttcctgatgataatttataattataaatcgaggaaactccaataagtttccttcctttttttcctttcgtttttctcccttctctgatttttcactgtggagggactggacttccgacaaaggaaatcacaacattgtatatgattgacttgtaatatgttagtaaatatataccagaatacttcagcttccatagttccacttacccagttgtaacaatctagcctgtaatggcttgtaacagtacagtgagttgggacacctctgatgtttaaagctccaatggtcctgtgggagggaaatatttttgttttcaaagtgtttagccatggggtgccagggtttacgttctcccttggtttggttctccccttttctcctatctgtcaacacatagtcgtctattacttataaaaaaccccattttccc

SEQ ID NO: 42482 - DNA, 696 bp, Zea mays
  Clone ID: MRT4577_138746C.1
gcttgtttaccctgtagcccgtctggttccatcactagctaccaaccaactaatacaatggctcctaagttggttgtgcttgctactgcctacgtcatggtgttgctcctgatcatggggcatctgaccatggccgaggagtgcagccagtgcagccagaagtgtgtggatgactgccgctccggtgaatgcgaaatttgcaaaagcaatcctgaattttgcgacacatgcaatgccatggactggaaggtgtgcgcgacggagtgctactccagagactgcatcgtcgggcggtcaatcgggcaaccaactcagtgccctcttctgaccacaacgtgcagcgcctgcaacaagacatgcgctagcctctgcgacgacaccgaccaaagcttgtgcagcagcgactgcttaccgcctactggctcagctttgtcgactaagtgtgagtcgtgcaaggccagccaaattgcgagttgcacggccacttgtcaggccaacatttgtacctacatattgtcgtgccctcccgtggcacccccgtgaagacggagcaggccttctgtcgatctacaatttcacttcgtttcggccttcattaagtttctatttcccttcagtttggctcttgtttgcaattgtttccggttcggctcctataattaatgtggaataacgtgatgttatttgtacaacgac

SEQ ID NO: 42483 - DNA, 308 bp, Zea mays
  Clone ID: MRT4577_138747C.1
ctttattttttttttttttttttttttttttactacatcgaacttcgataacacattttgattgcattgacaggcatgaccggaacaacagtaatgagggataaatcatgcttctatacagtcaactaacagagaccaccatagttacagacacacaaatttcacggataaaaattttcccatgacagcagaatactaaacatagctcaacactagggcaccagcgacataaaaccacgccgtggttaaaaattaagtgggcctataaccgcccctctcatgcactctcctgagctgttcactagtag

SEQ ID NO: 42484 - DNA, 786 bp, Zea mays
  Clone ID: MRT4577_138748C.1
tccagtctcacccaagtctgcaccagcaggtcgcccatggccgcvccctcggctccctctctggtggtcgtcgggttcgaccactctccagtcgtcgcgacgccctggtggctgtrcgcacatyyyctgctcgactcccaagcgggctcyctgatccatgccctcccctcgtccagcaagacccagctctagcttttccccacgcgctagaactcccagctcgtctcctctactgcatcactcaatgagtcatcctcacctctccagccgaacgcatgarctcgccccagcccgatgcccatggtcgcgccaaggctgcttcgtgctctgtctccttcactgtkctcatttccggcatcgcgcgcttgccagtdccaatagccgcttcagccgatcacccgagctccctccatgttggtgcccctyctgcttagtcctcaccgtggatattgtyctgcacgcgtcggcatcgcgctcgcacctcgcyctcgtcccactcgctctcgtcgccgtcgccgtgaagactatwcagcaccgctgggtctcgatggtttgttggtctgcatggatggtggtttggtgaagagtggagtyagatagaagcagaaaatgaagttcgtgttaagctcgcctgggtgctcgacgaaacgccttctccacgaaagcatcgtcgttttcgagaactttcgcatcgatcggtaataatgtkctggctcgctactccygttaattaatctaatarattggatgaaataatatttgcaatgattttcttgtaaaaaaaaa

SEQ ID NO: 42485 - DNA, 379 bp, Zea mays
  Clone ID: MRT4577_138749C.1
gcgcgccgtagagccataaggcatctgagttgctccatagtagtacatgccaccatatgacggggagcggtgccggacctaaagccaggcagcggattcctactgagttcagggaagtgcagaacgactgtagtacctccgtagcgtatgccaagtctctggaacctgaaacagtgggttgagacttataatggtaagcatgcagcacattgcacacgcttgcttgctactctcctaagacttaactttgttaccggagtagctgtcgagactatggacatatatactcatatgtacatgcgaacagtcacctatggacatcgacatagaacatggtcatgctgttgtagacaagcaatggagccatgcactgacagta

SEQ ID NO: 42486 - DNA, 293 bp, Zea mays
  Clone ID: MRT4577_13874C.1
atagctatgtcgaggattcggcataagctttttttttttttttgttttttttagataaaaagctttattatttgaacaatacctaataattaaatcttaaagagggccaccaccaatgatgggttgttcgttatgaacactgttgggtttgttaaagcaagttggttgaatggtattaattgttgcacctgtaagagggtgctagcgtacaggcgctacgtgctggtaaaatggaaacaaacttgtggttgtgaaaagtaggtggctaggctcacaccaaatagctggttgaa

SEQ ID NO: 42487 - DNA, 175 bp, Zea mays
  unsure (1)..(175): unsure at all n locations
  Clone ID: MRT4577_138750C.1
acgcccacgcntcctcccactcntcctaccacttttccatncaangtcgctctgtgtcagctgcgacntctttgtacatcctcgggtccagcagacccatgcatcaaacatcatggactgccgatcgatggatgctgttacccccgtcaggctttattctaagttaatcttaatg

SEQ ID NO: 42488 - DNA, 523 bp, Zea mays
  Clone ID: MRT4577_138751C.1
ctcacgcttactctcattcgatctccattctaatggcacgacaacccgtacggataatctaatagagctagcttctactatactactcaggtactgatggatcctacttaagtattaccctgcggctgtggcttgggcaccctgaaccctttgaaactccttgacctcgacgacaacaacacacccgcgcatgccgattgcggcctcggcgggtgctgctcaaaaagcgccggccaagaattcctccatggcgcctgctagtaaggctagccaccctgcggctaccactaagttgccaaccaagcccgctactccttcgcatactgatcacaatgcacgccgaccatgcttatgagcatgatgaagctatctccggggggaacgtgaacaatactaaggtagaccgagatatctgcaatacctaggctttaggggtgacaatggcaataaataccaacgaagttattgaggcggatgctattgtgatggtgctggaactggtggatctggctgataaacggac

SEQ ID NO: 42489 - DNA, 284 bp, Zea mays
  Clone ID: MRT4577_138752C.1
cttccggctcccgccgctctcccgccgccatcactcgccgctctcgcgctgccaaccgttgccttcaggctccagccgccggcacggcactgcgtacggggggattcacttccatccgacaccatctggccttctcttccatctcgtggtgtttgttcgtgcgcgtggattgttttgtccgtgtctggtgcccgtgcaagagcccctaagctggtgcgtccgccatgtttccccccaaagggcccaaccactacgggcagccgccgccttacggcgagcagcag

SEQ ID NO: 42490 - DNA, 643 bp, Zea mays
  Clone ID: MRT4577_138753C.1
ccggccggaacccactgtcaattcatccgttcttccacttctgccaccaccgcctcgcctcggccggcatcccactcccacacgcactcccctctctcctgcctgctccgtcgcttctgcgtcgatccagaggacatcctgctcctcaaggacacgctcaagccatctaccgcgggactcccttgtcccatcggagacgaagccgatggcagccagagagccgcctcgcctcttgctgcccctactccacgcccgattcgtctgggaggagggcctttagccgacattccatggggtcagcgcgcgggggcccgtgtcggcctcgcctcgtggcggtcagtcgatggaggcgtcgcggacggctgcttcaacaacggctctacagatgttaggcgacagcttccattcatgatacttcgtccaaagttcaagaatcaagacacatattaccatttatgtgcatagctctacagatgttgtctgatagaaaaggctgtcgtcgactctttttttgcttctttgtatatgcaatgttggcttgtttcaaaagaaaaaactcaatcatcacaaaatagtatactatttacccattcccttatagtgtaagaaaagaaacaaaaaaaaaaaaaaaaaacccgcggcc

SEQ ID NO: 42491 - DNA, 409 bp, Zea mays
  Clone ID: MRT4577_138754C.1
aaaaagaaagggcggggccgctaaaaatatccagaaaaaaaaaacagaaaaacccacgggtacctggatatttttttaaaaacagctaatttgaaacccagggacctggaaacaaatgggtcacccaagcccccgaaactcaatccattacaccaaaatttttaacagccgatttgggcccatggcccaggcaaaaaaacaaaaaggtctgtgaaacccacctgccagaattggtcttttgggggggcggggggaaaacggttagggggaccccggttgccaaaattggaaccggacctcacgtccccgttttaaaagcgccaactggaacacgaaaaatttttggaccttgatggacggggggggcttccacaaacaggaccatttgaagcggaataaaaaggggacc

SEQ ID NO: 42492 - DNA, 636 bp, Zea mays
  Clone ID: MRT4577_138755C.1
ttatcagcgaccttgtgcacttgtctttatatatgctattcttcatagcgatcttcctgaactatggtgtcccactgcacttgattcgtgagctgtatgagaccttccgcaacttcagaattcgcatttcagattatgtgcgctacagaaaggtgacttccaacatgaatgaacgctttccagatgctacaccagatgagctcgatgcgagtgatgtcacatgtattatttgccgtgaagagatgaccacagcaaagaagctgctttgtgggcacttgttccatgtacattgtttgaggtcatggctacagcgccaacatacttgcccaacatgtagagctccaattatccccccagataatggacgtgcagcatcagcacaacagcatggagctcaacctggagttcagcctggcactggtactccaagttcaggaggagcaccaactgagaacgtgaacatgcgtcaattaaaacttgaggctgctgcttcagctgcttccttgtatgggagatcatttgcttatcctccagtgaacactttgaataggcactcaggacctctgcacgcaacaccaagtacctcacaatcaggagaagcaagtacttccactggccatccattagaacctcagc

SEQ ID NO: 42493 - DNA, 282 bp, Zea mays
  Clone ID: MRT4577_138756C.1
gagaaacgatcttttttttatttgagacttgaaaattattacagcaggtccaacaactacaaacaaagacgtaaagaattgaaggaacaaccagggtcggaaatggtggctaaaaaaccagagcaaacagggaaaacatatgggaaaagacattgacaacttaacgactcctatttgccattgagggactctttattaccccttgaggggcataaacggaagttcgaccccttaacatccacacaaaagcaaagtaactcttccagcctaatggagaaaccc

SEQ ID NO: 42494 - DNA, 303 bp, Zea mays
  unsure (1)..(303): unsure at all n locations
  Clone ID: MRT4577_138757C.1
tcgatgccgcttttttttatttccccaacatcccacaattggctggggtctaaataccatgggcggggctaacttnccanatttacctcctgttgctgtcttgcccctgggtactaaaaataatctgtctcgatgcctaaaatcgtgatgattgatatgaatgacagaatctgtcaaagattctcaatgatttaaagacaagtaaacttgttcaatattatcgattctccctggaggtgatacccttaacaaacctaataaaatatattacccacttcccccttttaaaattcattaattaac

SEQ ID NO: 42495 - DNA, 516 bp, Zea mays
  Clone ID: MRT4577_138758C.1
ggatttggaattcgaactgaaccttgactgtgctctattttcttctctaggcaaaacaccaaccgtctccgcttttctgaactgtttgatgttttgaatctatctgggtcttcaacttatttcagtgttatggatccctacactgatcaaactgtggatgagtctaaatttagtttaagtgtggcacttagaagtccaaaatctcattacttcatgtgtgcttgcctacatgactgcctcaacttggcatattgtaactcgtttagtcaaacatttgggcctatatttgcattttagtagttagggaacattatctagcaccatgatggaacactgtttagcaccagtagttccatgcaagctatatcagtttctttgctggagttcgcgtttaatagaggagttcaaaatttctagttgtactgataccatggaacactgcagtaattctgcatgtttctagtctcggttgcatgttttcacatgctggcgcctgaagtatcttactgattctga

SEQ ID NO: 42496 - DNA, 423 bp, Zea mays
  Clone ID: MRT4577_138759C.1
cccaaaaaaatattttccattcaatcagggccttagcatgattataaggccgtgtgtagaaatcatcgataagtcaataattggtccccgtaactagaaacgatgcctcttctttcgtctttcccaatttagaacccttttggcacatctacaaaaacttgctggcttggagaacggggaacggccaatttgcccgcaccttatgaatactacatggaaaatgctgcccgaaagcgaggcctgaagggggagtaaaatggaccggcctgtacacccaccccgctggtgctgacattggtactgccctgtatcacgcccgatttgctgtctcgacaacggaagcgacctgtgtaacaggcattgtctcaagggtggcaccatggggcctaagtacattttgtccagcgatcctttgaactgggg

SEQ ID NO: 42497 - DNA, 317 bp, Zea mays
  Clone ID: MRT4577_13875C.1
atgcgttcgcggactcgtgggctgacgcttgggcacacaggctaggtctatggaaggccaggtagctatcttaccgaccaacaaaatgcaagctgcgacacagaacaacgttgtctccaacttatatggctaaaaaagaaagctgaaatctaaaggtggattctattgacgttcgacacaacacaccaggttcaaccagtctagcgctgcaaggcgaaaattcacagatgcaaaaggagggagcacatggcttgtgattgcctagagcacctagactttcatgcagtaactatccgttgttactgttcgccatgggc

SEQ ID NO: 42498 - DNA, 226 bp, Zea mays
  Clone ID: MRT4577_138760C.1
gggttggggtttttttttttttctttttttcccaacccaaaaaaaaacatccttgggcccaataaattatttctaaaaagggggaatcaaaacaaaacaccagggacccatggatggtccggcccaaaaaaaaggaggggcgtccaaactttttttgggaacccggaaaaacacctttccaacgttggcaccggggaaaaaatcctaaaaaccctttgggcccccc

SEQ ID NO: 42499 - DNA, 400 bp, Zea mays
  Clone ID: MRT4577_138764C.1
tcacctgcagcctcccctgcgtgcaggcccacaagcgccgtaccgcctgcacgggcaagcgcccacgcacggaccccgtcccgctcgcccgattcgacgacaaccagctcatatccgattacaacttgctggaggaggtgaagcaggcccacgattccgcgcacaggctcatcggcggcttcggccgcaactacgggggacggggatcaggcggcgcccagctgcccagatggctgttctacctcagcaaggcggcgcaccgccgtggtgtcaagctctgctttctccccaggggcatggccaggagagagcagaatcgatcgcaacacaattacaggaaggattgcatattctggacacttgagtggaaattcaattcaactgatgttgtcctaactga

SEQ ID NO: 42500 - DNA, 1227 bp, Zea mays
  Clone ID: MRT4577_138765C.1
gccgggatcccttcgttcttctcgctcccgctcgggagggggaaggcaagctcggccagacctccctcttcaataagaacaagttgaagaaagatgtccacgtacctggtgtcctgctgcctccggccaccgtcagcgggggcggagatgcccaaggcggcttccgccgcctcctcctcttcattggccccgccgcccgacaccaagagagtcggccgaagagactttgtgctcaggagcagtgagattgccacgctcgccgccatcttccacttcagtggcagcaaaccaagctaccttggcgttcagaagagtcctccgtcccttgctctctgccctgcaaccaataactgtgtttccacatcagaggaaataagcgactcaaatcactatgctcccccatggaactacaatcccaaggatgggcggagcggtaaacccataaccaaagaggaggccatgaaagaactaattgaagtccatcatcttgtatttggttggaaccaggtcacgaagacaaagccggacaacttcactcctcgcatagtagagaaaaaagatgattatatccgagttgaatatgagagtcctatatttgggtttgtagatgatgtggagttctggttccctcctggcaacaagaccatggttcagtatcggtcggcgtctcgatcaggatttatcgatttcaatgccaacaagaagagagtaaaggagctgagattggctttggaaaagaagggctgggcttcagaaagcaacttctgaattgaagtgagaagggtggaagaggtgcaggtgcatgctactcagacgagccagcacaactgggaactgggattgggtactgcccacgcaaaggcaaaaaagtctctttgtgatggtccctcgttctcattcaggtcagcgattacctagtttgtgtactaggcagcgtaagctagctgctggtgggtggtggtggccatcatgaggattcaggatgcatgatgatcttccatgggtggtgccgggggcgcactaagggaaaaaaaaaaggatattacatggacagcaaccaccctggctagctaataccaagaaatcattcatatactcctagtctcctaccaagaaaaaagatatatttattatgcatcttcttgccatccgtgcatcctactacatgcatcggatctgtccttgcgataatgagatatgcatattcgttcgataaaaaaacaaaaa

SEQ ID NO: 42501 - DNA, 3486 bp, Zea mays
  Clone ID: MRT4577_138766C.1
ggggtaccctcccggccggcgcatcctcgccggtgctgctgcaattcacgccgcctccggccaaccacccgaaccctacctccgcccccgtcctcgccaccgtccatgtggcgtgcctcggccacccctccccctctcctcccgatccggagctaaggaaagccctcccgccgcggcgccggctccgcatctcgcattctcgccggtgctgctgcaattaacgccgcccccggccaaccgcccgaaacctacctccgccgccgtcgtcgccaccgtcaacatggcgagccaaggggagccctcggcctctgcttccgatccgaaggagaagaaggacttctcgacggcgatcctggagaggaaaaagtcaccgaaccgccttgtcgtcgacgaggccaccaacgacgataactccgtcgtcgcgctgcaccctgacaccatggagaggctgcagctcttccgcggcgacaccgtgctcctcaagggtaagaagaggaaagacactatttgcattgtccttgcggatgaaacctgtgaggagccaaaggttcggatgaacaaggttgtccgccagaacctaagggtgaggcttggtgatgtggtttctgtccaccagtgccaggatgtgaaatatgggaagcgtgtccacattcttccaattgatgatacagttgaaggcattacagggaacctgtttgatgccttcttgaaaccatatttcctagaagcatacaggcccgtgaggaaaggagaccttttccttgtcagaggaggaatgagaagtgtggaattcaaagtgatagagactgatcctgctgaatattgtatcgttgccccagatactgaaatattttgtgatggggagcctattaagagggaggatgaggagcgtcttgatgaagttggttatgatgatgttggtgggagttagaaagcaaatggcccaaatcagagagcttgttgagcttccactacgccatcctcagcttttcaaatctattggtgtcgaagccaccaaagggcatattgctgtatgggccacctggttctggaaagactcttattgctcgtgctgttgcaaatgagactggagcctttttcttgctgatcaatggtccagagattatgtcaaagctggcaggggagagtgaaagcaatctcagaaaggcatttgaagaagcagagaagaatgctccatctatcattttcattgatgaaattgattccattgcacccaagagagaaaagaccaatggagaagtagaacgtcgtattgtttcacagctactgactcttatggatggactgaaatctcgttcccatgttattgttatgggtgctacaaaccggccaaacagcattgatcctgctcttcgaagatttggaaggtttgatcgggaaattgacattggagttcctgatgaagttggccgtctcgaggttctccgcattcacactaagaacatgaagctagctgaagatgttaatttggaacttgctaagtaagatacccgggttcagtggagctgatattcctgctatccgtcacagtgggggcaaatcttcaatgcattcgtgagaagatggacatcatagatcttgaggatgagacaatcgatgcagagatattgaactcgatggctgttacaaatgaccatttcaagactgcgcttggaacaagcaacccatctgctcttcgtgaaactgttgttgaagtcccaaatgtctcttgggaggatattggtgggctggagaatgtcaagagggagctccaggagactgttcaatatcctgtggaacatccggagaagttcgagaagtttggcatgtctccatccaaaggagttctgttttatggtcctcctggttgtggtaaaaccttgttggcgaaggcaattgccaacgagtgccaggctaacttcatcagtgtcaagggtcctgaattgcttaccatgtggtttggtgagagtgaagccaacgtccgcgaaatttttgataaggctcgccaatctgctccttgtgtcctcttctttgatgagcttgactcaattgcgactcagagaggaagtagtgtgggtgatgctggaggcgcggctgatagagtgcttaatcagctactgaccgagatggatggcatgaacgccaagaaaactgtgtttattattggtgctacaaacaggcctgacatcattgatcctgctcttctgaggccagggcgtcttgaccagctgatctacattccactgcctgatgagcagtctaggctccagatcttcaaggcctgcctaaggaagtcccctgtggcaaaggatgtggacctgaatgctcttgctaagtacacgcaagggttcagtggagcagatatcacagaaatttgccagcgtgcgtgcaaatatgcaatcagagagaacattgagaaggatattgagagggaaaggcggagaaaggacaaccctgaggcgatggaggaagatgaagtggatgagatcgccgagatcagggcccctcacttcgaggagtcgatgaagtatgctcggcgtagtgtcagtgatgctgatatccgcaagtaccaggcgtttgcccagactttgcagcagtcccgggggtttggcagtgagttccgcttctcggatcagccggcgacagctggtgctgctgctgcagccgatccgtttgcttctgcgggtgctgcggctgatgacgacgatctatacagctagttgggttgctcaatatcagtcccgtcactcatctgtttaaaactgatcatactaaacacgcatgtcatgcaatgatatttatttgccgtacatttggacgtcgctgagatgatgcactctcggccttcggttaccttttcatgccatattctccatgccattgtctgggccatgacattttattaattattgtgaaatctatcatctctcatcaaaaaaaaaaaaaaaaaaaaaaaaaaaaaaaatttaatttggtccatctctttccaccctgtagaatggttggttcccaaaaatcttcattgttcttctcagatacctttttcttcgtacgagaccccacaaactgcgtcgaccccgacccggccaccacgccgccataccctcaagtacttgcatttgtttcatagaaacaatctactgttcctcgcaagacagaagtttattttgtattggacgcttcgggtgaactgtcgatccagattatgcgtggattgcagaatgggcctgcacgacgctcatgtgtaagccccacctgaggtagagttgatggcgtgtttattcaggttgaacttaactctactgtaattgttatgaaagataagcagttgctgactgcttccaaccatcgttctccaaggaacgtgccccttgcacgatctccacgtataacatggccaacggacgtgcaacccactcctctcagtgtctccacttgtatataaataccattgcaataaagaataaataacaaggattcatccac

SEQ ID NO: 42502 - DNA, 2752 bp, Zea mays
  Clone ID: MRT4577_138767C.1
cccacgctggcggccgggccgccgccctcccccgcagccgccccgcccttggcctcgcctttccttgcttccttctcgagcagagcaacagagcaggtgaggcagtcagcacgctcagccacacccacagagacgcggcacgcctccactcctcctccgactccgaggccagcacgccgcacgctccgcctcgcagtcgcagcccctagcctctcgcgcgtgcttcttcttcctcctcgctccgggggctcgatctggtaactctggtgggggacaatcaagaactgaacactcgacactggcacagagctctggcagcatgcggtggctcggtctatctgtcgatgtgttccgcagggggatctccttgaacctttactgccgtgtgattctgtaaatcgtctccgtggctaccggcttttccttcgcacgcctcctgattcatgagaggcttgtgaaggcactttacatcttccccacccagtcattaattggcgtcgctgttaggctgttgtggttgtttggccaaggcttttgaggagaacgggctggagtactgatggtgtggaaagcagccgctcagacgagattccgcgtgtttaagcatgagaacggaatcacagtgagggctattgcttgcttccagccgctgcaaaagctgtaggccgagtacttccgccatctcctcaagcccgtgacgtagctcccctctgctctccacctgctgctgaataaacttacagccttagttttttctccatagcaactgaagtgggagaacatcccagtcgttcatcgggactttctgctggtagttctgtccggtggttgttttaatttattcatcatgggggacaaggtgaatccctggtgccattggcctaatcctcaatggaaattcaacactgagagttctgccggcaatctgcacccacctgatgtcgggcttgctaatgccgattcggtggcattgcctgcataccaccttaacgcagcacctatgccatttttcgcagcatcgtcgattgctgagagacctcttccaatgggcccgagacacgtcacgacattggcaccaagtttcgaatcgcctgcaccgtgtccctcgcgtaagagaccttcagtcctctaccagaaggaaactcatggtcccaccgcagctcctttgcggaggagcaaggggccactggatcctgtgccggagctccaaggtagcaacgagaccaacgtaaccgacgttggagcagaagaaaccgagggtgttcacgaggacacagacgagatcgatgccctcctggactcctccgactcagacgaagggccgcacgaactcgacagggccaggaggcagcctgctgcagagaacgagacctcgagcgtcgagtcggtggccagtgccgcaggttctgcaccgccggccaagaagaggaggctcagctcttgcacggacaggtccgtcgtcgacaccgccagttcggcgaggcccgaccgttccgtcgagcagaagcctctcgcgagcgactgcgacgcgcagtcgtgctgcgtcggcgaggtggtggaaagcggccgccttaggttctctccgggggagggggagggggaggtggaggcagcagaaggcgacagccccgacgaccagaggcggaggagagagaggatccaagagaccgtggctgcgctgagaaacatcgtcccggggggcaccgccaaggacgccacggccgttctcgacgaagccatctgctacctgcagtatctgaagctgaaggtcaagacgctgggagctgcctccctctagcctcctggacagggagtcatctggctttctgctgttctacataagtatggagtgcaggcaggcattgggtaataaggtgaaagatgccggagaccatatcagaatttggcggtgcttcaggacacgcaccacaccaggggtgaaaacaacggggagaagggggaaaaaaaaggtccaatggtgcttgctttgctgcttccccgcccgtgtaccacccccaccacaaggctctcgaacgatgctgtgggcaacgactggcgtgcagcattgcgaagagcgtcttcaaccgaagcgaggcgggtatgttttccgtcgtccatttgtggcggagcaacatggaggccaaaagatccatccaccagtcaccaccacctaatatgctgctctccagtgacagtgagctgctagtgtaagcaccatctttctgtctgggagcatggatcttccaccctaagagctgtcggtgcctgcctgtatcactcgccgtcctcaaaaaggccctcacggcacgggttggtgcaacgtatgcgctatgcaaagctagaagacatcttttgctgaccgtgatccaaagcaaagagcggcactgaccaccaaaggcaaggaaagggggggagatgggctggagcctggagtccaacaaagtgctgtgtgcctgacgtggatgagctcaaactctgagccacaccaattgcgcgggcgggcgcctttcatcatctcacgctgctttgctttctctcaaatcccgctgcatgtgccaccacactagcgtacatacgtatgtatgcttgtgtaatcgctttgacacgcctttgtacgcggtgtaatcatgtatagtcctagctttaggacggtttctctgctggatccggatgaatgagccttgctcgtcaagtgtgcgtgcgtgcgtgcgtctaaagtcctgttctgttggcaatgattgtttggaggctg

SEQ ID NO: 42503 - DNA, 294 bp, Zea mays
  Clone ID: MRT4577_138768C.1
cttgtattggaactgttttgttttaaattaagtggggggggggggaaaaaactacttggagacgggggaggggggggaaacattaaaaggggcaaaaaaaagaaaggggaaagctaagtggtattggagggcgaaagggaaaaaaaaaaagagggagaatatgaacagaacaggggagaccaaataagagcttgagaaaaaaaaaaaacccctgaaaaaaagtggcggggggaaaggaatcctttaagaacccggggtggcaatcaaagcagggtagtgccaaacacctaggtc

SEQ ID NO: 42504 - DNA, 296 bp, Zea mays
  unsure (1)..(296): unsure at all n locations
  Clone ID: MRT4577_138769C.1
ggaccgagaaaacacaatcgagataactccgatgtctctgtctcctcgcgttccctctgtttcgattctgtcaccaccgttcagagacatccacgttctcatctgtttctgaatctcttcttagtcgatacactcgctcccaatctcacctgaataagaagaacatggcgattatggtgatggtgggattgggcctattggacttcctcgtcgctggggtttctntaatcattggtttgggcttcattgccttcattgcttccattctctgcgccactgcgtcttcaacaacgcca

SEQ ID NO: 42505 - DNA, 361 bp, Zea mays
  Clone ID: MRT4577_13876C.1
tcatttacgcgcgaatggcgccttcttgctcatctcccagtaccaactataattgactacgagaacggccgcggcgttgctgcaaccaacagcgattccctgtgcatggcgacgccccgcgccgaccctcttaactgggtcaaggcgggggatgagctgatggacagacacctgctacgaggtaaagcgaatggtggccgagtaccggcaacccttggtgaatatcgatggcgccagcctcatgatcgcgcaggaggccggcgatggacaccgttgctggtgagggcagtttcgagctggacgagggtgtccgtaatcgagctaaggtaatcagcaactggtatatgaccagtatgatgaa

SEQ ID NO: 42506 - DNA, 3265 bp, Zea mays
  Clone ID: MRT4577_138770C.1
aagtccagcgcgccctgatcttttcctccgcctgcgcgctgtctttatctcgcccgcgcggtcttcttcttcctgtcgcgctgagttctctgcgcgcaactctctctttccccaagctctgtctcacgccgcactcccctgctccagctcccacgcaccttgcgatcttctctgctccttctcgaagttcgcctagccggagcttcctcccagctcagattttcctgccgcgcctgctccctgatgcacgcacctccttcctcctcctctgtcgcgcctgctgcttgctcctctgctgcgcgcccgccgaggtccttctcatggcgctctgctccagctcccgcgcccggcctcagcccggtcgagctccctggtgccgcgtccctcagctcgccttcctgcagctcgtcgtcgggccgccctttcctctgctcagacctcgccatggagcttcctcgtcagcgcgcccatctctctctctcacagttccctggtgcttgcccctctttcccatctcctgctcctccatggcgctaagctccaccagtcgctggttcgaaacgccgtcaccgaccaccatcttccatggcgcccagctcggactgcccctgctccttgttcctccaactcgttcctgaccggactccctgcatcgcgcgctcctcctccctatccctagctcgctcgccctcggaaaaaaaatgtacctaggtcgaggatatttttatttccatacccgtcagctgaggttttgggtacccatcgcacacccctgctcacgaaaccgtaggcatcgccgcctccccatacctacgaaactagcatcccgcggcggcgatggccaccggcgacaacgacaagcccccgtcgcttgacgcagacgtcgacatggccgacctagcttccctcgacgccacggccgctacatccgccgccgcgggcggcgcgccttccacccgcttccgtcccaaggccaaggggaagcccaggccgaaggctgagcctcccagacccgtaccagttgccgtacccaagccggagccggagccagagccagaggcggttccgatgccggagcccgatgccaaccccgcgccgccaccggaggacacgatggaggtcgacggggcggtggacgctcctggacatggggagggggcggtggaggaggacttcgtgttgcgcgagatcgatgtgtacttcaaccccaagcccttcgaagacgacacccagctgtacattatgcagtaccccctgaggccatgttggcgcccatatgagttacatgagatatgtgaagaggttcgtgtgaagccattgagttcagaagttgaagttgatttgagtatcaatacacagagtgaaaattatgaccaagaggcacctttgaggctgacaaaacagacactatcgtcatccaaggcagttgatgttactaattacgcggttggagttcttaatggcaacttggtccatttgaatcatattgatgcagtggtgcaaatgcgaccatcaatgtcacatattatttctggccgagcacatactaggcaggcttcacaaccccgggaaatgaatgggggagctagtacctcgatggattcatctcataagggaaatgagcgccctgaagattccaaggaccgagcagaagattctgagccatggatttctctcatctaccaaccagcaggaagcaatactgcaactaagtaccatgataagatgatagcaaatgagggtgtgcctattgatttcacaatgagctcctcttgttatttgacgtccttgtgtcctggggcctctactagcagaaagcgtatcaacaaattccaagcaataagggagatgcttttgctaccactggaagaacgcctcaaaaaatggtttactgaggtttcaggagtaaatcgatttgatgctctgaaggaccttgctccaacctgttcagaggttgaaattttgaaaatgcttccagagtgtgcatatttggtgcgtggattgtgggtctgcaaaagttctttgttgtttgatggtgtatattctggtcccatggatagaattcttcttgagtttacaaaaagggatcccgtcccatcaaatattctggaaccatttatcaatctgattggcaatcgtgctatgagagactggatactgtctccattgtgtaaaagacgtcaaattctgaaggaccataaatttatatcggcagatttgtctttcataaaacgctatccgcatatagtcaatgaacaagagtgtgcttggtctgctcgggagaccactctccgtgagtccctagaaatgagcactactttggcaaagaagaccatgaattcaaccagacctaatgttgcttctaaagggcctcattcaaatatgagcaagggcagggatggcccatctcaaggaagtgatgaccttgcgcgatctgttttgggcactgttttcactgccaataaagttcgcagcatgcaggcagttgttagagacttgcgccagttggctgcaaaatatgcttccaatagaaaggatggatccaaactgcaagctctgtgcaatgctgcaaaaaattgtgcatcgctgcctcatgatgagctgaatcgaaaaatacatctagttgctgttcctgttcatagtgtttttgttgcaaagcatgaggataagcgagctctacgaaacatatttattttgctcttccgtcacaaagaacccaatggaacattgactaagcaggaagttgttgctgctgctgcgaaacatataaaaagagagattactgacagagagtaccatcaggttgtgacggagatctgcatttctacagaagatgggcacttgctgttgaaaaatggtgatgagccctgagttcgctatgatatgccctgtgaaggtccaccaaggtcgaatcgtctctgatgcgtagaatagggtcattcggagtttgggatttggccggtgagaatgagtattgatcaggcagttcaagatagctacagcaaactgttctaggtggctttgtcagccatttttggctcagcagtttttgctgggtgctaattgagcggtgtttttcggttagtcgtctttatttgtgtccattgaatccttgctggtctagcttggcgtaattcagttagggatgttattttgtcttttaagtgctgatattgtctgccttcagtaaagtaaagtggaaaccatgaaccaattcctcttttcttctgtctttggtttagagttcgataaattttttgctacc

SEQ ID NO: 42507 - DNA, 283 bp, Zea mays
  Clone ID: MRT4577_138771C.1
ggccgcaaatttttttttttttttttttcgagtatagagaacgtgatttagaggacgttgttggagagaaatgagatatagaggatgaaatcttttagaggagactgtaaaggacagatatagaggatgaatatagaggacgttgctggagacagcctaacactgaaccgttagatcgtagatccatggtcaacgagacgtccacgccaacactcgatctcggacgcatgcctgagaaccgacggttctacttttatttggggaaccggtgtactctgatcaa

SEQ ID NO: 42508 - DNA, 622 bp, Zea mays
  Clone ID: MRT4577_138772C.1
cgccttcctgcagctcgccgtcgggccgccctttcctctgctcggacctcgccatggagcttcctcgtcagcgcgcccatctctccctctcgcggttccctggtgcttgcccctccatggcaccggatcccctgcaagctgccgcgccgtcgccttgctgctcgcccctggcccctctgctcggatctccttctctggatgcgcgcgtgccgcttggcctccctggtactcgctctcccttagtgccctgccccttgtacggcgcgccttccacccggttccgtcccaaggccatggggaagcccaggccgaaggctgagcctcctagacccgtaccagtggtcgtacccaagccggagccagaaccagaggcggttccggtgctggagcctgatgccaaccccgcgccaccaccggaggacacgatggaggtcgacggggcggtggacgctcctggacacgggagggggcggtggaggaggacttcgtgttgcgcgagatcgatgtgtacttcaaccccaagccgttcgaaccaacacccagctgtacattatgcagtacccctgaggccatgttggcgcccatatgagttaaatgagatatgtgaagaggttcgtgtgaa

SEQ ID NO: 42509 - DNA, 418 bp, Zea mays
  Clone ID: MRT4577_138773C.1
ctcgtttgtcagacttcatctgcctttagtggttcaaagagttcccataaggagcaacaaaatccggagatcagtagtgcaagtgcaagctttcaacctgttccagcaacatcagttgatgattcagtatcaatgtcacaacatttgcctgcttcatttggtgatgcttcacggatcagcagcactgatattgttggtgcacctagtgtccaagagacaaatgacatgcaggttgatagtcatgttgctgaggactcagagccagaaaacgatgatctatatttatcaaattgtcgaatttctctggtgggttttgaagagaaagagttgttaaggcttgtcacgctgatacgtaatggaggtggatcccggcatattttgctaagtgagaagcttactcatattgttattggtacac

SEQ ID NO: 42510 - DNA, 758 bp, Zea mays
  Clone ID: MRT4577_138774C.1
gtaccggcgctctccctcgagtttttttttttttttttttttttttttttttttttttttttttttttttttttttttttttttttttttttttttttttttttttttttgaccacccccaccctaaaaaacatagccaaccccaattttttccctaaacaaaacccaaacgggggaaaacgggggcgggggaaacaaaccccccaagcccgggggccctcacagggaaaacaccccgaattccaaaaccccctactttttggccctgggaaaaaaccccccccgacccccaaacacatcccatttttcccttgggggaaaaaaaaaaacctttggaaaaattttttggaaccccaaaaccccgttctttttggaaaaaagggaccccaaatttccctttcggccccaaagaaaaagtttggattaatgggggcccccccccgggggggggaaacccaaccctaaaacccgtcccatgcttaaaccggggggaaaaaaaggccttggcccccgggccaaattccggggccccgggggaccccctttttttaaaggggccccccccggggggggcccccaccttttgtcccctttaggggggggtaatggccccccgggggaaaacagggccaaagcgggcccccgggggaaattgttttccgcccccattcccccccaatttacgagccggaaaaataaaggggaaacccgggggggccctagggggggccccacccccattaatgggggggggcccc

SEQ ID NO: 42511 - DNA, 292 bp, Zea mays
  Clone ID: MRT4577_138775C.1
accttccggctattttcccttaccaaaaaccactccgcgggggtttcaaacctcccagattgcttgaaacacagtcacaaccggttttcccaagagcgtatcaagagccggccctaccacttcgacgggatcccacccctgatgctcttgccagacggcgtcactaagaagagcgacgcactcgacgcagtatctcgatctgactagtacttcattcattgcctcgaagtacaacgctagtgcgatcatggaaactgacactggaccctcttatcaatcaactttgacatac

SEQ ID NO: 42512 - DNA, 423 bp, Zea mays
  Clone ID: MRT4577_138776C.1
gcgggaacttaggaaaagaaactttttaaaaatgaatgcaaaagaaataatacacgggaaaaattataaaaagaccattttttatcacccaccactcaaaaaagaatccccagagtttaaaccccccaccggccacacattactacataaaaagagatcgcaaacaaaaaagaacacttggttgaggctaccaactatgttcaaggtacatgcatccgcgacacacaagaataaaactgggcagaagaacgctaaaccccttatggcgactaaagacaggcacacctcgatagacctaaaaataccagtagaagtactttattaataggcccatgcaggcatatatggaccggacgcgcacaagacgccttatttaattaaactcgttgaacttaacgggggggctgaaattggacggcaggg

SEQ ID NO: 42513 - DNA, 284 bp, Zea mays
  Clone ID: MRT4577_138777C.1
atggaaacatcaacactgtatttaaaggtgtagtaacagcaagaacgccgcacatggcatctggcgcatacggtccataattcacacaactcaagggctgggtcagaccatggaggaagctgaacagaaatcaatgtctgcaaccacagaggggatcgcacaacgcataacgcatatactgctagatgaatggaccatggctgacgctattttaaggctgggcacggcaaccaagatttgatacataggggccatacgttgatagtccaagaaggtatcccatc

SEQ ID NO: 42514 - DNA, 1294 bp, Zea mays
  Clone ID: MRT4577_138778C.1
cgaaaaccctaaaccctcgctacccggcggcggctacaagctcttcgtcggttcagcaccatgaggccaccggctagaggaggacgtggtgggaggggtggcaggttcgatggcggcggccgtgggggcggcggcggcggccgtgggtttggcggtggtagaggcgggagaggggacaggggagggagaggtggcaggacccccagaggcggccgtggcggcggtggcaggggtggccgcggcggtggcatgaagggcgggagcaaggccgtcgtggtggcgcacaaacccccccggggtctttcatctccaagtccaaggaggaagcgctccgcaccaagaacatggtcccgggagagtccgtgtacggagagaagcgtgtctccgttcagaatgaggatggaacaaaagtcgaatacagggtgtggaaccccttccgttccaagctggctgctgctgtgcttggtggtgttgacaacatctggattgctcctggtacccgtgtgctgtatcttggtgctgcttctggcacaactgtatctcatgtgtctgatattgtagggccggatggtctggtctacgctgttgagttctctcacaggagtggaagagaccttgtcaacatggcaaagaagaggaccaatgtgatccccattattgaggatgccaggcatccggcaaggtaccggatgttggttggcatggttgatgttatcttctctgatgttgcacagccagaccaggctaggatcttagcacttaatgcttcatacttcttgaagaacggtggccactttgtcatttcaatcaaggctaactgcatcgactccaccctgcctgctgaggccgtgtttgcagcggaagtggagaagctcaaggcggatcagttcaagcccgcggagcaggtgacgttggagccctacgagcgtgaccatgcatgtgttgtgggtgggtacagggtgcccaagaagcagaaggccacctcttaggatcggaatccgtgctcgtcttgcctaccaaagatgcttcgttgtattgtggtttattaagaaactttgaaggattagtcaaagtatgtgaaccttctgcagtgaaggctggtttagcagcgacagctgttagggtctgatgcagtgtttgctggtttaacagcattattattattattgttgatgaaacatgggtttggtttcgttgatctcactaaaagtgtcaaaattttggatgcttgtggtgatctgtgctctcgcttcagtcgtgacaatgtgctgtaactgctgtgtgttcctgtctt

SEQ ID NO: 42515 - DNA, 388 bp, Zea mays
  Clone ID: MRT4577_138779C.1
gcaggaagctgtgagcaacccgttcctggtgaaggatcaccgtggagaagtgtacaagaagcaccatccacctgcattagccgacgacgtgtggcgcctggagaagatcgggaaagacggcgtgttccacaagaagctggctgacttcggaatccacactgtccaagacttcctcaggaacctggtgatggatcagtacggactgcgcagcttgcttggcagcggcatgtcgaacaagatgtgggaatccacggtggagcacgcccgggagtgcgtgctggacgacaggctctactcctactgcagcgggcacgggatcgtgctcctgttcaactgcgtctacgaagtcgtcggcgtggtcgtcgggagccactgcttcaccttggcc

SEQ ID NO: 42516 - DNA, 232 bp, Zea mays
  unsure (1)..(232): unsure at all n locations
  Clone ID: MRT4577_13877C.1
gacccacacgttcgttgcatttataaacacaccaaccttatctctctatcaactacctaacaacaaagggataccgagatattatacctccttgcacttcttacccactntttgagcgcaacaaatgccttcattattccacaattctcactttctcctattgccattatttcacagttcctcccaccatttacttttatgggctaccaacacctatcttttcatgccaaca

SEQ ID NO: 42517 - DNA, 231 bp, Zea mays
  Clone ID: MRT4577_138780C.1
atggatcctaagggtaaggggatggtggtcaatgacaaggagaaggagtccctcttcaacgagccaagagacgacaagcccactgactcaggctcgagtcacaagaatagggacgggaagaagaagaagcgcatcaagaagatcatctactatgacagcgatgcctcatcttttcaccaagggacgacgacgactgaaagggaattaggcttacacctagttcctaaataa

SEQ ID NO: 42518 - DNA, 817 bp, Zea mays
  unsure (1)..(817): unsure at all n locations
  Clone ID: MRT4577_138781C.1
agacatatcacataccacccttctctggtcttctgcttgcttgtgcccaggtagctaccagactcgacgctcgtgtcccagccatggtggccgttgaccaagcctgtaatcccaactccaagcgccgcctcttctccccgtggcaagctcgcccttgactctgaccatcggctcacagtcgccggttccatatgcgcccaggttctcctttcatcgtgccactcatcccccatggtcgtagcttgcccctgtgctcgacgccccctactcaggttctggagatttcaccctacaccaagcacttgacgccagctcccttgcctctccatcgctcaggccggcacctaggttctatctccccaacaccctcacactgtcccctgggtgcgttctctaatcctttgctcctcctcgctaactgttgttccgcttcgtgtccatcgacgccgcgcgaccctgtagctcgtgccacttggccaggatgccagaacgtcatgccccctgtgttggagctcgccctagacgctgccgtcatcttctgtcgtcgagtcaccatctccagcatccgcgcgccaatccgcgtcgtcctcagctcgtcgcacttccttcaacagtagctacgtcactaggcccttgacgtcgtgctgtgcaccaggacgatctgtgactcgcatgcgtgccctcagaccatcgncttctagcttatgttgtgcactgtcgacccacgctacgtccatgacgtgcttgtcgatcccgatgaccggtcttcaattgcgcactgctcgacaaaccgggcgttgccaccacctcaacctcg

SEQ ID NO: 42519 - DNA, 444 bp, Zea mays
  Clone ID: MRT4577_138782C.1
aaaaaaaaggaagggggttttaaacttaaaaaggcaggcacccgagggaacggcttttccggggggggggccgtttaaaaaaattttttctttaaaaaaggggcccatgggtttgggatccaggcaaaaggggttggccttccgacggggccttgccaatcctaggtggggagacccctgggcctttttgggggggggggggggtttggccttgaaaaagtgggccttttccgggtggagccttttttggagtttttccggccgctccctttcaatttttgggaggaaaaccctttcttgggggcgctcctcctggttgagcacgccccctttcccgtttttgaggagggcccggcccccctttcccggggggggcccaggggcccccaggcccccggggagggaaataaagggggccccaattccctttttggggggccccgg

SEQ ID NO: 42520 - DNA, 306 bp, Zea mays
  Clone ID: MRT4577_138783C.1
ctttaatgagctggatgaagtggcccagaaggctgcccaggctttgaaaagactgcacggcaccagttataaagtgggacccatctgttctgtcatctaccaggcgagtggtggaagcatcgactgggcttacgaccttggcatcaaatactcatttgcctttgaactgagggacacaggtttctatggcttcctcctgccagccaagcagatcttgccgacagcagaagagacctggcttggcctgaagaccatcatggagcacgtacgagacctaccctattagggatcggcagaatagaccga

SEQ ID NO: 42521 - DNA, 539 bp, Zea mays
  Clone ID: MRT4577_138784C.1
gggagggacccatgggggggactaaaatggtaacaaaatcaacttcaacaggttcctgtcacgtcagaggcccacaataaaagggacaaaaaaaaaaccatataccactcacagacaaaaacaggatcataaaggctatgctatacatgtttccccacctatgggaccctgcaagcctcattgtatgcacagggaaagccgcattttggaggggaaatttgcctaaaaaccccggaaacaattgggctgaccccatgtaaaacaagctggggtttgaatcgccacaacgtcccaggtaggactgccgggactgggcaaacaacccccctggggccacctttgcctttgactggaactggtggtgggaccaccgagggaccatgggaaacagggttggccctgacttttcacaccgccgaaggtacaaaccgtgctgggtggagcccccaagggagtagtagcttgaaaaaccctagccaaaatttgaaatgtagggcgaactgacgtggggactgggcgattcatgcccaaaaggggca

SEQ ID NO: 42522 - DNA, 229 bp, Zea mays
  Clone ID: MRT4577_138785C.1
cccacccaccaccatcctgatatgaacctgataggagttggtgccgacatctactacgccatcaacagtgggtaccagatcgaggggtccgatcttaggcatgctcttcttcgtcttctgagcgatcgattacctgaacccgctcctgaaggaccttatgggtcggtagaaccgcaccctgaccatcatgcatgtttggacgatcctgctggcctcgatattctccttg

SEQ ID NO: 42523 - DNA, 391 bp, Zea mays
  Clone ID: MRT4577_138786C.1
gactgtcattcattgcagcaaaagacagaatccttgcacctaaaaaaaacttcgttatataacgcttttgatggaatcatgtaacgcaattgcatttttttcttgtgcagggtgcacctattccaattgcgggacctcctttaggcacctatatttaccgtccacacttgttgcggtgaaccaagttccccacaattgctctccacttggcggggacaggagttcgaacgacgtacctgcgcgtgccagacacctttctcgtgggctctgccctgggagcaatgactgtggttcggccgatcgcgtgttcactggttcttcatgtccttcagggatgccccccgtggggcatgatcatctttccacttgaacctttggtacgcgcttcctt

SEQ ID NO: 42524 - DNA, 155 bp, Zea mays
  Clone ID: MRT4577_138787C.1
tggattgcggacgacctacattgactttgagcacatggctaaaactccataagcaccggaaccacttgttgcaactgctgcatttttgaccattgcaccatacgagatttattttgaaggcctcaccggtacacactttattgatgctttaacac

SEQ ID NO: 42525 - DNA, 431 bp, Zea mays
  Clone ID: MRT4577_138788C.1
ccctcctcctaggctctgcgtactccgagtccgctgcatcgcccgttgattcggcgcctccgttcagcagcccgcttccgccgccgccgccgccgccgccacacctggcgccgtgctccgcgcccgaatactgcggagggctcggcttctcgagcccctcatcttcttctgcggagccctgcgagctcagccgctcgccatgggacctcatcgccgagctctccgtctccgacccacaggtggaggatgacatcgtagacaagtacttcgtccatgtcgcaacgcgttcgagctggctcttctcagccaccgttccagccgcctccgccaagaagaagagtagtagcacgagtggggatagcaagcacaagcagcagctgcgccgagacgctgtgaataagtctgcaacgagtaaagagaaggttggcgag

SEQ ID NO: 42526 - DNA, 575 bp, Zea mays
  Clone ID: MRT4577_138789C.1
accacgcactgcacggatcgagtagcccaccaccccacccggagacgctaatcgaggtcatggagacgctcaccgatccttacctccgtgcccggtcgtcgccgaggactgcgagcagctccaccaggtccttccaacgatggggcaccaacgagaaaatggccatctccatcctggcccagcgcaacgccgcgcagtggcagagcgatgcggcgaggttatgcctaggggtacgggaaggagatgatcagcgctttcgcggacaagatcgacccaaagttctagaggctggtgatctggtggacgctggaccccgtgaagacggacctgcggctggtccacgaggaggcaaaaaaaaggcaccccagaagcccatcgagcatctcccgtgtgctccgtttactgaggcgaagaagctggataggggccgtctggcgactacgagtctcccgaggatgactggtataaggttgccgccgcgccgacatacctgtccgctcgatgggaggccgacgcagtgacgaccgacgacgggattaagttgcattacttgcgtgggcgttcctgtgctatgt

SEQ ID NO: 42527 - DNA, 267 bp, Zea mays
  Clone ID: MRT4577_13878C.1
cgcctcgcctcgtcttacaaggtaacattattctccagcatgattagaaacacttctatattggtcagcgagagccgctatactgcaatggtgatcgatcttctcacgagctagtcctgaattctggtgcggcactacgacagcgtggactatcatcagtagctagcagctgaaccgttcaacggcatactacgtcgtcttcaccgttaccaggtacctcatcgtggatgctgcaggcatccaggcagaaatggaccccggcaatct

SEQ ID NO: 42528 - DNA, 362 bp, Zea mays
  Clone ID: MRT4577_138790C.1
cttccgctcaccataacccctggttcaatggttctttctccccccctgtggctaatggtatgttggggttaaacactaaggtcggccggcatcttatggcttttcccgttgctgagcttccaggttcactgattccctcatgctactgcctattggcctgcttcatggtttccttatggatactgccattctttccatgggttgcatggccattgcttccctcgccatgcaccacaaggccagcatgtctatacgtacttgaatgtgctactgctgtcactttgtgtgcttgtaatttccagcctaatctcattttatattatgtatttctgtctatgtcgcttttccttgatgttgtgtac

SEQ ID NO: 42529 - DNA, 488 bp, Zea mays
  Clone ID: MRT4577_138791C.1
cattgggtacctcgaggccggccgggattcaccatcacctcctgactccgtgctagctgaggagcgacttgggctactctaccacgacgactacacttgatccacacatgtgatcccagatctccgccgcctcgacctctggtgccacttgctcacgggctacctcgcaaccagaccaccagccggccacctgtatctacacgctagggagggattggacaaacgtcgtacatacgaaaggcatccgatgcagactacatcagatccaccaccaacctgatcatgatgattacgagcacgatgatgttgatcgtgagactgataggggtgtcaccttcgatataacctctgtgcaactttgagacctcaaactataactgcaccactcctgactgcacaggacagaccccctccatctcaaactcgaccactggctgctctgaggctgcctgtgctacatctctatcatcgactcctccagtgctggc

SEQ ID NO: 42530 - DNA, 303 bp, Zea mays
  Clone ID: MRT4577_138792C.1
ataaaaaaaaaaaaaaaaaaaaaggcagacaaaaaaaaaagatttctttgggacggtcgctctcaatgaaccaaagtgacgaaacgcatacaggcaactaaattcaattcactagggcggcacctaactacagcgagcctagcaaaaccctacaacgacccaactgaaaaacccaggaggacacccaccttaagccagttggagcacttgccactttgcccaaaccgagcaacctgcacaacagctgcgcaagccgacttgccaaagagacgcgcactttatcggcgcattaagccccgccct

SEQ ID NO: 42531 - DNA, 298 bp, Zea mays
  Clone ID: MRT4577_138793C.1
aaaaccggggtaagttaataaaggggggggggtaaaacttcactaaaagtttgtttggatagaaggggtttggaggggattaaaagagaaataaactaatttttttaaaaatttttttgggtttttacaaaccttttttaaccaaaaaggccctaaaaattaaaccttacagaaaacagaaacttaccgcccaacttttttccggcttttttccaaactcacaggacccattccttggaaacagaacacagaggctgacacatacaaatccaaggttaagaaacttttatgggcccaa

SEQ ID NO: 42532 - DNA, 398 bp, Zea mays
  Clone ID: MRT4577_138794C.1
cgggggggtttttttggttttgggaagccatccatattgggggcccaaacttatcccaacggaggcatcttcccaggcacctgttaaggtttggtggcacacctccacctgggaataacagctttactttacaaacaattggttcaaggccagaaaatttccacggcccgtgaacaaatggcacgaaaccaacacttgaacaaaggatctggctttagggcaggtccatctgcacgctgatttctttgtccacaacttttgcgccacatgaccttgccaccgactggaacagattcttgatcttaggggcacagtgggtaaaaaaccggctccaaaagttgcaacccggcttctttttttatttaatggaagggattacgaaccccccaagggtgggg

SEQ ID NO: 42533 - DNA, 637 bp, Zea mays
  unsure (1)..(637): unsure at all n locations
  Clone ID: MRT4577_138795C.1
agccatcaacttgtcataattgttatgtgatgttgttcatggtcttcatcaatttgattttcaacaatcaacattatgagtttggtatcatcttaatggggagaagagattatagaggtggtgactttagagataggtttgataggaggcgctcacctcataggaggcattcccctgatggagattccaggggccatcgctcccttcgtgaccgacggccaaattcccaagaaagggaatctagctattcacggtctcccagtaggaagagtgaaatgaggcatgagaagaagcctgatgatggagaaactaactcatctaggagtctcagtgtctctgacaataatgatgatagaaaaaaggagacactgttaagtggtgatgataaagaggatcacgaaatacagctcaaacaaataagacaggacatggaacttttgcgtgatgataaatctctcttggagataattttggatgagaagaatgctgaagtgcgcaagatttctagcagattaaatgatcttgatctgcagctaaggaaggagaaagaggaatgccacaggatgacctcaaaattaaaaattccttaaagccatgctcgctntttgaaagcacagaagattgaaaagtccaagct

SEQ ID NO: 42534 - DNA, 387 bp, Zea mays
  unsure (1)..(387): unsure at all n locations
  Clone ID: MRT4577_138796C.1
tccgcggtacgcgtggtgtttccatctttcccgtggggatcccagttcgccgccgcaggtagtaagagctcggggcacttccagggtctcgcgtggaanatgccgtagcagatccacgagatcaaggatttcccttctcaccgcgaggtaggaaggatgcccggtctgtgaagatcaagaggagcaagggtgtggtggggttcatggtccgctgctccaagttcttgttcaccctctgcgtcttcgatgctgagaaggctaacacgttgaagcagtctctccccccaggcttgtgcgtccaggaggttttgttgggttcctgacatcgtcgggtcggacctttcgagcatctttatctttcgcatagcctgctgtttctgtggtttt

SEQ ID NO: 42535 - DNA, 619 bp, Zea mays
  unsure (1)..(619): unsure at all n locations
  Clone ID: MRT4577_138797C.1
ctggtcccctgcagtaccgtccgnattcccgggtgattttcaacaatcaacattatgagtttggtatcatcttaagggtatgtcagtggtttcataccatactttggtatctacccatggcattaatttttggctctactttgttgtggctaatgatattatcctggagacccttctacttattgtgcattgaattatcttgtagctcaaaggctgtgggagaagagattatagaggtggtgactttagagataggtttgataggaggcgctcacctcataggaggcattcccctgatggagattccaggggccatcgctcccttcgtgaccgacgaccaaattcccaagaaagggaatctagctattcacggtctcccagtaggaagagtgaaatgaggcatgagaagaagcctgatgatggagaaactaactcatctaggagtctcagtgtctctgacaataatgatgatagaaaaaaggagacactgttaagtggtgatgataaagaggatcacgaaatacagctcaaacaaataagacaggacatggnnaacttttgcgtgatgataaatctctcttggagataattttggatgagaagaatgctgaagtgcgca

SEQ ID NO: 42536 - DNA, 2899 bp, Zea mays
  Clone ID: MRT4577_138798C.1
taatgtacctctggacatcgtggttcaaatggaactttattttttctccatgattttatagtagcatgttctctatgttttgtattaagtgctcgtgtgttttattaaattcgggtttcgaattccccggtcttgctgcaggtccaaaataattctcacaagtggaagcttgttgcagtctgcagaattaggcggcattcttactggttgccttttgatttaactaccattcaaattagcagactcctgagcagatttattagattcaactgctgccagaggataagatgacttttatatagattcttcagttggcatttcaacgatttattgtgacctgtaatgcttgtccctacatcaagaaggtgggcatatcagtatcttggatgatgactccactgaatgatgtccataatacatttgatgtgctatggtcatgtgcttagcagctttaacggttaattgagccacatacccttgaatcctgcgcatcagttagatcattgggaagtgttattctcactggtaattgcaagttattgtaattcttgcaagtcgccgcggaagatatctggacaaatgatagtagatttatattgtgatattgggattatagaagacatcaacttgtcataattgttatgtgatgttgttcatggtcttcatcaatttgattttcaacaatcaacattatgagtttggtatcatcttaatgggtatgtcagtggtttcataccatactttggtatctacccatggcattaatttttggctctactttgttgtggctaatgatattatcctggagacccttctacttattgtgcattgaattatcttgtagctcaaaggctgtggtaaggttacaggcttatgggtgacctatccctattagttcatattgacacattttttgttcagtttcatttatccttttcttgtataaatttttctctatcctgacttctagggagaagagattatagaggtggtgactttagagataggtttgataggaggcgctcacctcataggaggcattcccctgatggagattccaggggccatcgctcccttcgtgaccgacggccaaattcccaagaaagggaatctagctattcacggtctcccagtaggaagagtgaaatgaggcatgagaagaagcctgatgatggagaaactaactcatctaggagtctcagtgtctctgacaataatgatgatagaaaaaaggagacactgttaagtggtgatgataaagaggatcacgaaatacagctcaaacgaataagacaggacatggaacttttgcgtgatgataaatctctcttggagataattttggatgagaagaatgctgaagtgcgcaagatttctagcagattaaatgatcttgatctgcagctaaggaaggagaaagaggaatgccacaggatgacctcaaaaattaaaaagttccttaaagcccatgctcgctttttgaaagcacaggaagaattgaaaaggtcacaagctcgttttgagagactcggtgatttacttgcttcagatattctgaaacgtggtgctaatgaagaagtttctagtatcaatgttgatgaagatccaaatgttccttatgaaaggagcccaaatgctgctatagctaagaagagatcaataccatactcaacaagtgaagaagcgaaagccgtgaagaaaagaagagagcgggactctgacacaactaggccagataaatataggtttgaaggtactattgcaggatttgaaaaactaagcaagggaaccgagccaacaaaatctttatatttgaagaagaaactgtgggaagatgaaaaggataagataggcaactttgtctcctcagccaacaccgacaaggtcaaagaatctccggtcaaacatgttttgccctccactggtatggctgctcatgctttagacgatctgtttgaagctgttgaactggaggatagacgtgacacatcaatagaaaatgatgctgatgacgaaactaggtcgcctgttatgcccccacaaccaccaccggtggttaatacttacgagcagtacgaggctgatgatgaggaagtcgacgtggaataagtagaatgccgagatggtactggaatgagctatatagctctcgcgcctgtgtaaagcattatgtaatatgtatttgatgctggagtttaccttgcatacaaagaatcgtcattaatgatccttggtggatgcggtttaagcactcaactcttttgttaatttgctgaaggcaacatgccctgttacctgtacctaatataccacgtggtggctagctagccagccttgtcagtgccctggtacttttgggtggtcttgctgtgctgttcgcggcacttgaaaactggtgttttgtaggactgatgttttgtattagtattatttgaatgactgtggtaagatgacggctgttagataggcaactttgtctcctcagccaacattgacaaggtcaaagaatctccggtcaaacatgttttgccctccactggtatggctgctcatgctttggacgatctgtttgaagctgttgaactggaggatagacgtgacacatcaatagaaaatgatgctgatgacgaaactaggtcgcctgttatgcccccacaaccaccaccggtggttaatacttacgagcagtacgaggctgatgatgaggaagtcgacgtggaataagtagaatgccgagatggtactggaatatgagctatagctctcgcgcctgtgtaaagcattatgtaatatgtatttgatgctggagtttaccttgcataaaaagaatcgtcattaatgatccttggtggatgcggtttaagcactcaactcttttgttaatttgctgaaggcaaca

SEQ ID NO: 42537 - DNA, 1406 bp, Zea mays
  Clone ID: MRT4577_138799C.1
ggggcatcgacggctcgacgcatcggctaccgcaacagcctcaaagctgcgtcggtcgccaccccctctagcagggcacacggagctcgatttcaccttgccgtgtgcgtcatgctatcacgcgccgaagccgatgccggcagtcgtcgccggcctggcactcgcggccactgcgagggtctcacccccgccacgaggagatgaccgccgtgcaggtacggtcgctgcacctcctccccgagccgccaggagctccgcgcaagagggccacaacggccgctcaaagagccagctgaacgacatgttgctgcatctgccgatcggcgccagctcgcgccccggcgggcagcacggtgcagccaccgaccgtgcagcgcgaagaaggtaatggttgctacagttcgatgtgatgaaattgcaaacgagaagtttggatgcataacctcagacacagaatggttggatgtggagagtgctgtccaatctggtccagtacctggttttggaaaaaaacttggcaatatcgtcgacgttcacttgcaagagtatgacaaagaagctgtctattttgatgaagctgtaagggaaaggaaaacgacagcatttggagtccagaatactgaatcttgtccaacctgcattccagaaaatgttgactcatctgcgtgtgaaggctctagaaaaatttaaaactggtcttaattcatctttggagagtggaaaaggattcgcagtatctgctcgagacaatactgaatgctctctcaaagaatttgaacaaggctgtgcagatgctataatcaagcaagcgaactgggactgctctaaaatgctagagaaagttcggcgtgatattgaagatcatgcactttcaattcgtgaaagcaagctatcagaaatgacaagacacgctaaggacaaactaagaaaagcactagctgaacctgtggagtctctatttgatgctgcagaccaaacaacctggacatcaataagaaacatttacaaacgcgagacagatgccatcctaccggagtttctgaataacctttgtgggtttgaaatggaatatgctccggcagaagaaatggtatccaaattaaaggattatgcccggagtgttgtggaaagtaaagctaaagaggaatctagcaaagtattgatccatatgaaggagaggttcacaacagagtttagccatgacaaggattcaattccaagggtctggacaggaaaggaagatgttcgtgcaatagcaaaggaagctcgatctgcggttctcaaacttctgtctgtaatggcggccattcgctgggatgacgagccagataggattgaaagcattctcacttcaacacttctggaaggctctgttgtatcaaagattgcaagtgctgcttctgctg

SEQ ID NO: 42538 - DNA, 250 bp, Zea mays
  unsure (1)..(250): unsure at all n locations
  Clone ID: MRT4577_13879C.1
gctccctgttgaccattgggtatctgaaccatcgagccatgcgctgccaagctgactngcctccacagtcntcgcgaacgccttggtgccaccttctcctcncatcccaatgaactgatngcactcttttccaggtatgttcaccagggcatgggantgcttcagcgccatcagctgcttgnggagtttgntgncccngntngnnagtgacangganannangcncccntcaagnacctntncgtgtggc

SEQ ID NO: 42539 - DNA, 698 bp, Zea mays
  Clone ID: MRT4577_1387C.1
cctcgaggccggccgggccggggtgttattgctgcggcgacagtgcccagataaaatcccctaaacctagcgccgccgccgccatgcttcgccgactcgacgccgtcgcccagcggaccttctcctcctcttcccgtacgccccgccgctggatgggtaggactacaccccgacgaccgcgagtacgacctggtgaccgatggtgatctagtagtacctcccgtggggagcgcgcctacgacatcttctctcgcttgctcgaggagaggatcgcatgcatccatgtgcccatcactgacgatactgcgtcccatcatgtcatcgcagctggtcattccttgaatcctagaaccccggcaagcccgaccacctctacatgcaactccccggagtggtgacgacactgtgaagctcttcatctaacacagcatggagaacatccgatcccgcgacaccacactctggatctgtatcggcgtctacatggtgtcactactcctcaacagctgggttatctccttagacgtgagacgactgtcaaacacgcgagtcatgagccaccaagcctccagagtcacgtgatcaaagtcgtctcacatcaccatccgcgactaggagatcctctgggcggatgaccgactcgacatcatctatgtcaagcacactaggctgtcatctgactcatcgagcacagtatg

SEQ ID NO: 42540 - DNA, 464 bp, Zea mays
  unsure (1)..(464): unsure at all n locations
  Clone ID: MRT4577_138800C.1
gtactcccttgacaagttcactagagaagcatttgagggaggagccatgtctgaggagaagcaccgccaccacctgttccaccaccgcaagcagagggaggaggagggcgcctcgagtgttcgactgacgaggagagagggaggagcgaccgacagagcgacgatgggggaagctcgggagctcggcgctgatcgtgcggcgtcgtgacgcctgcacgaggaagcacaagccaaggaaggacccggaggacgagcacgggcgacgggttcgaaggaggaggtggccgccgtcgccgccgtgggctccgcgggtttgcgcgcttccgacggacgaccgaggaggaaggaagggacgccgaaggaagcgacgcccgacgaactggatcgcgtgcgcgaggctggcctcgagcgangatgcgagcgagcgacgatgcgtgcggcgggttgggctgnttgtgcgatgc

SEQ ID NO: 42541 - DNA, 189 bp, Zea mays
  unsure (1)..(189): unsure at all n locations
  Clone ID: MRT4577_138801C.1
cgtccgcgtctacaaaggcttgacaggcactcgcagccccaggcagagagactccttccctgcgaaggcttctcctnnnnctagtgcccccccccgaccgtcaagataatttgtggaattctccacagttatggaaagccccagattgtatataaccacactgggcgttttataaataacaaatactgg

SEQ ID NO: 42542 - DNA, 470 bp, Zea mays
  unsure (1)..(470): unsure at all n locations
  Clone ID: MRT4577_138803C.1
tacaatggacatactgatgctncaatagccatgataagcagggctggactcacagataccacttctccttgccttggttgatgccttcatgttattttactccgaaacacacactcttccacggtggaaaaatttgggtgcagtttggctaggaatctatattgttttgacccaagttcaagttcagaagaactgacaacagcctggccagagcttgacttttcctttagcacacatactttcattgagagcatagttcctctgcgtaaagactactacttcaagcagatacagtgacagtggtgtgctgccccttgctttcaaggtggttctcagtttacatctttacattatcttttatcttatcgtttcttttttcttatatgaacgaccaagctgttacgtgttagtcagcttaagatggtgtgctgttctggattctaattagcgataataattgcaatttccag

SEQ ID NO: 42543 - DNA, 651 bp, Zea mays
  unsure (1)..(651): unsure at all n locations
  Clone ID: MRT4577_138804C.1
ttgggtacctcgaggccggccgggttttttgtatttgtaccttggactggaacagtaagctgggacattggactgtggggtctttggaagatgtctggcgagaacaaaactcatctggtagaaatagaagcaaccactgcagaatcaggaacttctctgcgcgctcctactatcgaggctggactggtaccagcgtgcaaagacacctgctatggagatctaaggctacagttgtgggaaaagaaatacgatggtagcaagggagaggtatgcttgcatcatcatgaagttgttggcacctgtttccttgagttctcatattaataagttcttgtttactgttacatcctgcatgatcatcatgttctttgctttgccctttcatgatcaatttggttgaccgcaaccaatttaagagcagtccaacttgtagaccaaattaatctaattctttatgttcatgatcagaaaaccccaagtatcttacactacattacccacatgttaaatcatttttgtcgcagatgatactcgacgccacaagcaacatggcagcactagaagttggcggaggcccctggttcaatgggtggaaagggacaactgttgtgaacgagggttgtaatacattgtgngcacgccagtcgatgt

SEQ ID NO: 42544 - DNA, 350 bp, Zea mays
  Clone ID: MRT4577_138805C.1
actcggacgcgagggccagcgcggcgagcggatcgtgctagtgcctggttccaagctagctagaaaatggccgtcgcggaagcaggcttctacaagccggttccttgcagctaatgctggacatgggcgcagactccaacgcccaagaccaggcgcggttccacgccgctcacagataagcgcaggccatggggtacgaggccatctctcagctactgtgagcgagaggtgcagaggtggcacacgaggctgcgtagacctccaacaatttctctcaatcgttcacatgcgtgcgactgatgcgctctcgatgatacgattgagagagactgtcggcccgacaacgacgc

SEQ ID NO: 42545 - DNA, 164 bp, Zea mays
  Clone ID: MRT4577_138806C.1
ttctgtatccatcattgctgtagtaagtaaatcaagcacattgattttccatgaaacaaagtgaatacagagtccttctttggcatcaaattaagttgtgtgtgcaatcagatatcctgttcttcatccacactttttagatttcatatgagactccgaccttt

SEQ ID NO: 42546 - DNA, 827 bp, Zea mays
  Clone ID: MRT4577_138807C.1
ttaccccatgtagtcgcacctcgcaaattatcttctcctctcctctcccacgcggtctcctcctcgcggtcgccgctcgggtcaggctggtatcccccctaagccagccgccggtctcgccggccttcgcggacccagcgcattgccgcccccgctttaaactagccccttaataagctgccgtctgcagcgtctccaaccgtcctccgagcaggggcagcacgaggaagtcctcctcccctttctccggctgccacttggacggcgagctgctggagcttttccacctccggcctgcggaaggattcaaacagtggacgggctacggcagcaaagatttggagagctgggggtgcgcactgggatggcgtttgcggtctccgacgagctgctgggcacattcgtgccgattgcggtgtactggctctattcggggctgtacatcgtgatggacaggatggagatcgacgactaccggctccaccccaaaggggaggaggaggtgaagaacgtcgtctccaagtggacggtcgtcaagggcgtcctcgtgcagcaggggtttcagattgccgtctcacttctcctgttcacgataattggtgatgacagtggtactgtgagaaagcagcctcccgccctggtgatagcactgcaatttatcatcgcaatgtttgttatggacacatggcagtacttcatgcacagatacatgcacatcaacaagttcttgtacaagcatatccactcgaagcatcacactcttgtggttccatacgcgtttggcgctctttacaaccatcccctcgagggcctcattttggacacta

SEQ ID NO: 42547 - DNA, 300 bp, Zea mays
  Clone ID: MRT4577_138808C.1
ctcctccgcgtacccccgccctctccggcggcccgcgtaaccacccgcgcagatggcgacggcggccacggcgtccgcgggccttcgcagccgcatcacccgcctccccaccgccgtgcggttccagcgccagcgggggctcaccaccaccgcgctcctgaagaccgccgacctccagcccaaggagcagggcaagcccgagacgctcgactaccgcgtgtttctcgtcgacggcgggggccggaaggtgtcgccgtggcacgacgtcccgctgcgcgccggggacggggtgttccactt

SEQ ID NO: 42548 - DNA, 341 bp, Zea mays
  Clone ID: MRT4577_138809C.1
ggggggaaaaaaaatttcatttccttcctcaggtgggggggacaaaccccaaaaaaagaaaagaaaagccgattggactttcccttggaaacacaggaccaaattattttttaaaaccttaacgaccaccacaaacgacgaccaagccccccccatggtaacttaacttaacttgggaggttttttaccaacccaacgaaatttgaaaacggggggcgggatcctttttcccatgaaaggaaaaaggcagggggcacttttgcccggatcgggaaaactaaagggggactccgacacacaaggagggggggggttttttaagcgagatcaaaaggggggga

SEQ ID NO: 42549 - DNA, 209 bp, Zea mays
  Clone ID: MRT4577_13880C.1
attcggcaggtcaaatggtcttgaactgctgagagcgagcataatcattggttctagtcttttggaatctggagaacgttcctttcttttgtgaaacacagcggtgcaaacccaactggaaagaagccgatgatgtaggctaactacgaacggccgattttacaaatggcaccatatcgactcctcgtaccaacccagaactggcagtc

SEQ ID NO: 42550 - DNA, 1805 bp, Zea mays
  Clone ID: MRT4577_138810C.1
cgtcatccgccagtcccactactacagtgcccgccgccgctgcgtacaccaccacctcctttcccaactcctccgcgtacccccgccctctccggcggcccgcgtaaccacccgcgcagatggcgacgccggcctccgcagccgcatcacccgcctccccaccgccgtgcggttccagcgccagcgggggctcaccaccaccgcgctcctgaagaccgccgacctccagcccaaggagcagggcaagcccgagacgctcgactaccgcgtgttcctcgtcgacggcgggggccggaaggtgtcgccgtggcacgacgtcccgctgcgcgccggggacggggtgttccacttcgtcgtcgagatacccaaggagagcagcgccaagatggaggtcgccaccgacgaggccttcacgcccatcaagcaggacaccaagaagggcaaccttcgatactacccgtacaacattaactggaactatgggttacttcctcaaacatgggaggacccaacttctgcaaattctgaggttgaaggagcatttggggataatgatcctgttgatgttgttgagataggtgaaagacgtgccaatgtcggggacgttcttaaggttaagccattggcagctttagcaatgattgatgagggagagcttgactggaaaattgtggccatttctttggatgacccgaaagcatctcttgtgaacgacgtggatgatgttgagaagcattttccggggacactgactgccatcagagactggttcagagactacaagatacctgatggaaagcctgccaacaaatttggtctcggcaacaagcccgcaagcaaggaatacgccctgaaggtcattcaagagaccaacgaatcatgggagaaattggtaaagagaaatattcccgctggagagctctcgttggcctgattttggcccatggaagccaccacattcttttgaactgctttcgtgagcatgtcgttttgtatgctgtgaccatgcttcttcgtttgcattccaaaccttttttacgaactgtttaacaaaaatgatcttgtcggataaataatgattctggtgcgagtttaccagaacggcaaggagtttctcaagtaaatgcagcgtatttttctatacaaaaaaaaaaaaaaaagcggccgcttttttttttttttttttcttttttttttatagaaacaagtttcactctaatacgatggtttagggttcttcatcacattgtcatagccacatctcaaaaactcaaaacttgagtacttgtaataacaaaagcctacagacataacgtaagataagtcttggacagcataagcgaatttgctaatggctgggtagcgagggtctcagtcgaacaggctgaagcccatgtcgtcatcagactcctccttgggctcttccttcttctcctctgcagcaggggcagcagcagctgcagcacccccagctggggcggaagcagcaactggagcagcgccaccaccagatcccacggagaggattagatcctcaacgctgcgcttctccaggagcttagcgaagagcgccggccagtaggactcgaccttgatgttggccgccttcacgatggtggcgatcttctcggcggtgatggcgatgccgtcgtcgctgaggatgagggcggcgtaggtgcaggcgagctcaccggaggcaatgggtgcgggcggcttcgtctaaccggacggatctgcgacctcagagggagtgaggcggcgaggaaggtggaggcgctggagggtggaggcttctcccggccagg

SEQ ID NO: 42551 - DNA, 1351 bp, Zea mays
  Clone ID: MRT4577_138811C.1
attgggtacctcgaggccggccgggatagtactatacgcgctccgtccaatccttggcctcgtcatccgcaagtcccactactacagtgcccgccgccgctgcgtccaccaccacctcctttcccaactcctccgcgtacccccgccctctccggcggcccgcgtaaccacccgcgcagatggcgacggcggccacggcgtccgctacggcggcgacccgcttcacgctcctagcgggcgccggcctccgcagccgcatcagccgcctccccaccgccgtgcggttccagcgccagcgggggctcaccaccaccgcgctcctgaagaccgccgacctccagcccaaggagcagggcaagcccgagacgctcgactaccgcgtgttcctcgtcgacggcgggggccggaaggtgtcgccgtggcacgacgtcccgctgcgcgccggggacggggtgttccacttcgtcgtcgagatacccaaggagagcagcgccaagatggaggtcgccaccgacgaggccttcacgcccatcaagcaggacaccaagaagggcaaccttcgatactacccgtacaacattaactggaactatgggttacttcctcaaacatgggaggacccaacttctgcaaattctgaggttgaaggagcatttggggataatgatcctgttgatgttgttgagataggtgaaagacgtgccaatgtcggggacgttcttaaggttaagccattggcagctttagcaatgattgatgagggagagcttgactggaaaattgtggccatttctttggatgacccgaaagcatctcttgtgaacgacgtggatgatgttgagaagcattttccggggacactgactgccatcagagactggttcagagactacaagatacctgatggaaagcctgccaacaaatttggtctcggcaacaagcccgcaagcaaggaatacgccctgaaggtcattcaagagaccaacgaatcatgggagaaattggtaaagagaaatattcccgctggagagctctcgttggcctgattttggcccatggaagccaccacattcttttgaactgctttcgtgagcatgtcgttttgtatgctgtgaccatgcttcttcgtttgcattccaaaccttttttacgaactgtttaacaaaaatgatcttgtcggataaataatgattctggtgcgagtttaccagaacggcaaggagtttctcaagtaaatgcagcgtatttttctatacatacaaatgtgtaatttataaagttggaacacaccattcaactgagcaaaagcagtttgaggtcgttaagcaaaaaaaaagaaaaaaaagcggcc

SEQ ID NO: 42552 - DNA, 362 bp, Zea mays
  Clone ID: MRT4577_138812C.1
ccaaattgcccttttttttttaaattttattggcacctttacaaaaatagtttttgttttcgggggcttacccaggtttgaaaattttcgtttatggtggaaaacccggcttggttgctttttaaacattacttgattgacccttgcgtggtgtttttttttaagtggaaacgtataaaatggtaaaaattcccttaaaggtttgcttaaaaggggtggggacttttcttttaaaggggcacaaggggggggaaaaggtttttttttttgggggttaaaaaatttggttttggcccaagggggagcaaaattggaaaagcccttgaccttaagcctttgggttccccttttaggtggaaaaa

SEQ ID NO: 42553 - DNA, 1494 bp, Zea mays
  unsure (1)..(1494): unsure at all n locations
  Clone ID: MRT4577_138813C.1
cattgggtacctcgagccggccgggaaaaaaatacgcgctccgtccaaatccttggcctcgtcatccgcaagtccgcaacccccactactacagtgcccgccgccgctgcgtccaccaccacctcctttcccaactcctccgcgtacccccgccctctccggcggcccgcgtaaccacccgcgcagatggcgacggcggccacggcgtccgcgacggcggcgacccgcttcacgctcctagcgggcgccggcctccgcagccgcatcagccgcctccccaccgccgtgcggttccagcgccagcgggggctcaccaccaccgcgctcctgaagaccgccgacctccagcccaaggagcagggcaagcccgagacgctcgactaccgcgtgttcctcgtcgacggcgggggccggaaggtgtcgccgtggcacgacgtcccgctgcgcgccggggacggggtgttccacttcgtcgtcgagatacccaaggagagcagcgccaagatggaggtcgccaccgacgaggccttcacgcccatcaagcaggacaccaagaagggcaaccttcgatactacccgtacaacattaactggaactatgggttacttcctcaaacatgggaggacccaacttctgcaaattctgaggttgaaggagcatttggggataatgatcctgttgatgttgttgagataggtgaaagacgtgccaatgtcggggatgttcttaaggttaagccattggcagctttagcaatgattgatgagggagagcttgactggaaaattgtggccatttctttggatgacccgaaagcatctcttgtgaacgacgtggatgatgttgagaagcattttccggggacactgactgccatcagagactggttcagagactacaagatacctgatggaaagcctgccaacagatttggtctcggcaacaagcccgcaagcaaggaatacgccctgaaggtcattcaagagaccaacgaatcatgggagaaattggtaaagaggaatattcccgctggagagctctcgttggcctgattttggcccatgggaagccaccacattcttttgaactgctttcgtgagcatgtcgttttgtatgctgtgaccatgcttcttcgtttgcattccaaacctttttacgaactgtttaacaaaaatgatcttgtcggatgaataatgattctggtgcgagtttaccagaacggcaaggagtgtttctcaagtaatggtcatgtctgtgcagcatatttttctatacatacaaatgtgtgatttctaaagttggaacttggaacacaccattcaactgagcaaaagcagtttgaggtcgttaagtaagtcttcccacaccgtgttttgtggtgttggattgctaggctttgtggtgttgaattgttatggtgtctttggtggatcgtgtgtaaaatagaggacgtgaaaataattatnnagtgnngtttnnnntnnnnnnnnaaa

SEQ ID NO: 42554 - DNA, 621 bp, Zea mays
  unsure (1)..(621): unsure at all n locations
  Clone ID: MRT4577_138814C.1
cctagttccgggtcttctggaatcagtacagctttttgagccacccatgagtcatgacagaaattattgcttgtttgtgctggttgtagtgccacttgcggcgcatctgcaagtcatgaggcatacacgctgatttgatgaaattgccccttgtattggttttggcgaactaaagagaactgcggttcagacatgccatatacttggagatgcattggtggttgattgtaaggttgcaagtgcatctcaaatttacaacaaaaatgggaaatcacgtgacttgattatcctccattcagccctatacataacgctatataatgtatatgccattgtacaacacgggctttgacagacaccagctaggctccaaaagggcatcccatgtagtagcttcacagtgtgttgctggatcacaaggaagtttagttatgtttcccaagcacagctggagaaagttagtttggcgtcagatgtattatgtatatttagttctgactaagctgtacaaagctagcagaagtgcgcaaatgtcctttctggatcgatctgcctgtaattntgaatctgcacatcgaagtaagcaggaatgtttcgtataaaaaaaaaaaaaaaanaaaa

SEQ ID NO: 42555 - DNA, 280 bp, Zea mays
  unsure (1)..(280): unsure at all n locations
  Clone ID: MRT4577_138815C.1
caagctgccccgcagtttctaatacgaaccttggcagaacgaagctgaagtagggggttgtgaaccccaaatggggaaaacgcgccggatcctggccctcggcctgctgttatcgctcttgtgcgctgtgccgccggcccggccggcgcaaaantgaggctgccagactaacttctgctgcagcaagttcggctactgcggcacgaccgacgactactgcggtgacgggtgccagacaggcccgtgccgctcgggcggcggctgataccgggggtggagg

SEQ ID NO: 42556 - DNA, 175 bp, Zea mays
  Clone ID: MRT4577_138816C.1
acccacgttttttacgagcgccagcccaccaccgccgaggacgggttattttagatgatttttcttttcgaccacgccgactgcaacaccaggatattggttttcgtgtacaagatcgacctgaggtacctcctcgacgtctgccgcagccgatgctaggggttaggattaggct

SEQ ID NO: 42557 - DNA, 187 bp, Zea mays
  Clone ID: MRT4577_138817C.1
agggggcacaagctgtggctcgtggggggctcttttttttttttttttttgggaggaacagaggtatggtattggccacagattacaacatgattggcattcatacgcagccgagcgacatgacgagtatacggcgattaattaataccagctatatatatagtagacatgtctggagtctggacta

SEQ ID NO: 42558 - DNA, 191 bp, Zea mays
  Clone ID: MRT4577_138818C.1
atggagaccaacaagccgcatagagggtcgtattccataacaacattaaaacggcaatggcgaccgagatgtgcctggttctgatgcttgtcgctctctctgcatgtcatgttcactcgacaatcgcggctcaatgctgacaggctcgtatatgcttcccttcttaccacataccatgcatcaatgatggc

SEQ ID NO: 42559 - DNA, 184 bp, Zea mays
  Clone ID: MRT4577_138819C.1
cggacgcgtgatcatacacgtgggcactgttttttcaccgttgttatcaccggcagtgggggcgcctaggcaggggcgggagactgtgccactccatgtcctaaaatgacctcaccgcgccagctcgtgcccaagaaggatgatgagtacacaaaagacgccaaagctatctgcgtccttgtcc

SEQ ID NO: 42560 - DNA, 611 bp, Zea mays
  Clone ID: MRT4577_13881C.1
ggcgggctccgacgtcttctgcggcatcgcgcagctggagttcttctacggggaggcccccgccgcgatgcgcagcatctgctcggccttctccttcctggcgctgtcgctggggttctacgtcaactcgctggtggtgacgctggtggcggccgtgacgaagcggcccgggtggctggcgacggacctcgacaccggccacctggactactacttctggctctggaccatcatcagcgtcgccaacctgctgctctacatggtgctcgccgcccggtacacgcccaagcaggtcgccgctgccgtggtggagccgatgcgtcccagcaacagtggcggcagcgacgaatgattaatttggcacatcgatcgactgcaacttgatccgcttactatacagtaaaaaaacgagatatggtcgagtaggatacactacactgtacacctaacactagtagtaaaatggatgctccccagtcaacatttctttcagatcgacctgttattttgtgtttagttcagctcctcatgtaaagtgctattgttggtaaaaaaaaatagagcgtcaaccaaacgaataaaaattagaagatgttaattttatgctgtat

SEQ ID NO: 42561 - DNA, 153 bp, Zea mays
  Clone ID: MRT4577_138820C.1
atgacgcacgctgcactcatacttgaactgcgaactctgctcgagtggagttctcctttatccaaattcaaagtcacatcggcgaaactctctgctatgtctggccgctgaatggaccggtaggctctggtcaagggcctgtgccaagcccga

SEQ ID NO: 42562 - DNA, 463 bp, Zea mays
  Clone ID: MRT4577_138821C.1
ggccttgttgacgcctggggggcgggggcgggcggagccggggcagccggggggggggggggggggggcggaaaaagggggaaaaaaggcgcgggaggggaggaggggaagcagggggggggggaacggggagaggcgccaacgccccccccccccgcccccccccccccccccggcccaggccccccccccccccccccccacggacccacccccccccccggggcaaaccccaaacccccccaaccccccaaaacaaaccagcccgaagcaggaagtggaaagcctgccacgcccaaagagagagctaactcacaagaaacgccctacgcgcactgccccccaaacagcccaagagacctacccgccacccgccaaaaagaacccgcaaaaaccaaaggagaggaggttcgcggaacgggcgcgcctccgcggggggacaaaaaaacccgaagggcgcggg

SEQ ID NO: 42563 - DNA, 958 bp, Zea mays
  Clone ID: MRT4577_138822C.1
aatagagcaaggtgagaacgaacaatgcatacgaacaaattaaccaaaacatttgtcgcaaatttatttgcgacgttatctccaaacaacttgagtgaagtatgcacacacgcattcgatcactcatgagggaccgccggcgccgaggatggccgcagcctgccccccgaacccctgcaggtcgacgacgccggcgaatcccggaggcggctgcacctgcacgccaacgccgccaaacgcgccgacgtcaaaggccacgccaccacccccggcaagctgggccggctgctgctgctgccggcccctgcgcccgacgagcagcgcgtcgcgcagcagccggtcggcgctggccgccacggcggcctgcacgcccgcaagcgcggcccagaacgcgaccaggtcgtcgtgccccatcgcgcccccgctcagttccgcgtcgatccacgccatcgccgggctccccgcctcgcgctccttccggatcgcctcgtccgcgcgctcctgcctcgccttcacggcgtccagctgcgcgcgcagctcgccgtgctggcggttcagctccgagaccgcgcggtcctcgccgccgctggcggagtggccggcaccggcaccggcaggcgagggggacgacgaggcgaggaagcgctcgacgacggactccacggacgggtggccgaaggagaaggccttgccggcgggggagaagacgacggcggccacgtcggcgccgcagaggatggacagctcgctggccttcttgaacagccccgcgcggcgcttcgagaagcacacctgccgcgcctcgtcgctctctatgcgccggatctcgatcttctgccgccccatgctcggccggcggggaggcgccattgctagctagagctgctgcgtacctgctatgcacgtcgccggccggtccgttaatcggaggaacacggacgcgtgggcggacgctggg

SEQ ID NO: 42564 - DNA, 392 bp, Zea mays
  Clone ID: MRT4577_138823C.1
taccggtcgagaattacgcggtccgattcttcctttttataatctgatctcatgtattttctctgcaacaagacagttttaccccttataaatctctcctctggccaacgtcccagcaacgagtgagcatccacccgacttagattagcagattcgtttcctctggttccttcatgaactcatgctgaaatggattgctaattaatgctattgtgggttgttcattactgattgatgagtactatacattacctgacatgccgtcacgacacaaatttccttgctttactcaattactcagtgtacaattggtgcatcaaaattcaaaatggacttgctgctgtgatttattcatgcttggatcgattcaggtggcataagtactaactttt

SEQ ID NO: 42565 - DNA, 619 bp, Zea mays
  unsure (1)..(619): unsure at all n locations
  Clone ID: MRT4577_138824C.1
caccaatatgtggncttgaacatgaatctcctgaagaaagaagactcagagactcattgcatcgagctatctgcaccactgcaacatctactgcagttgctaatgctgctacagttcccactgaagctactccgtttaccactgataatgcttcatttcctgcaaatcatggaccaatccatccaagcacggaagctccgcctcaaaacagtagtgtctttggtattgttctccgcgaagctccaaatcttgagccagaagtcaagcaatttatccaggagatggaacgcaaaggtgcattggtcactgttatgagaggaaaggcaattggtggagacccatggccaagcaacatcacgaccactatgcagtagttgtagagggagtagagattagggagcacaatgtcagtctgacataacaatgtgattgccacgtagtgctgttaccagtgaagcaactgcaaatgtgctgggccttttgaggcgagatagtcaggtagtggacatggatattagctcttgttcagttttttgtaaggtgcctcttaaaggacacctgcttgcaaggttcaggtgcatgtagtggtgttattatagtctaacgcaggtttggtcat

SEQ ID NO: 42566 - DNA, 254 bp, Zea mays
  Clone ID: MRT4577_138825C.1
gttgtgttaagaaaaagttacaggccattccgaacaaggtgaattttgacaaacaggcatagaggctatttgaccgggctaatgggaggttacatgagaacagtcgactggctgatacagaagccccacggattcgggaaattcctggttgagctaggtaccaacacaagctaaactttccaccgaagggaggactacgggcccaaggcggtggtgctgcctattagtctggggatcatttatggacagctggg

SEQ ID NO: 42567 - DNA, 453 bp, Zea mays
  Clone ID: MRT4577_138826C.1
tttttttttttttttagagacaaatgtcataaaacatcagagtaattattacatagcggaagacttattacaaaataaaggaataaatgtaaaacgaactaaggatcgtcggcgcagatgtcaactgagaaacgccacctagatcagatcatactcctcgccttgtggctcctcctgaactacctgctcttctcctttggtgggtgaggtagggaccctggcccacggcgcaccgaagctccgccgtggtggtcggccgcccatggtgaattccggtcttcccaagtggcagccgcagaattggtggtctccctagcttcgattcgacccggcgaacatcagggaggttctccactagcgatccatggcaccagaacttgtccacggcaccggtggtgaacgggaaggaggagggaacgagcagtaagcacgagcgggtcgtgggagggggat

SEQ ID NO: 42568 - DNA, 427 bp, Zea mays
  Clone ID: MRT4577_138827C.1
cggacgcgtgggaaaaaaactataaagaataaaaaaaaaaaaaacaaaaaaaaaaaagggaaaaaggtaaaaataaagaaggaaataagaaaaaaaaaaataaaaaaaggggcggccactttatatattccaagcttccttacgtttccatacaaagtcatatttctccaattggcccacctaaattcatttcattgtcccccattttacaactccggtactggtaaacccctgccgttccccaactaaatcgctttggaccacatacctttttcgcatgttgcctttataccttataggccccgaccaatagcccttctaaacatttccgcaccctttttgcaaattgttaccccccctttatcggctctttaaacccgccgggtgtgttttttacgcccaggtggaccggttaatttgccaaggc

SEQ ID NO: 42569 - DNA, 422 bp, Zea mays
  Clone ID: MRT4577_138828C.1
ggccgctttttcctttttttttttccttttttttttttttttttttttttttttttttttttttttttttcttccaaggaaaaaaatttattcccaaccttaatcaatcacatcctctcttactgctagtttacagcaataaaaaaggggatgaaaaattgcccccctccgcaaaactcataggtttttgccaattttacatattttctctgatagcctcccaagtcgaaaagcaggatgaccccccctcctccacggggttcctgcaggaatccctcatccccagggccttctccctcgccttcctccttttttcgcaaccgcccataagttccttcaccgctcgctccagctccgaggccccccagaaattgttcctcttcctgtcaacctccatcgccacggcgacccctacatcggcc

SEQ ID NO: 42570 - DNA, 220 bp, Zea mays
  unsure (1)..(220): unsure at all n locations
  Clone ID: MRT4577_138829C.1
gttgggccggcttcgtggtgagacgcgcaggcgtgngggaggaaacaggggaacgaccggtgtgggtgcgcgatttcagcggcatcgaagatgcagacgctcacactgctaaccttttcgtactcgtcttagacgccgaccacagcgggcagcttgccagccgcacccaggcggctatcgcgtggtcgctgcgttccgacggcctcggggggggggggga

SEQ ID NO: 42571 - DNA, 587 bp, Zea mays
  Clone ID: MRT4577_13882C.1
ttggtcctgtacatgcatcgatgtcaaaacgaaacgaaacggaagacgggagatctttcccggatcgcaccggcaactaacgaaagaattcttctttccctcctacaaaatttacatgacggtccaccgaaggagacgtaataataatttgatccctcacgaggggctggcgacggcgcagttcccgtacgccatgctccggctgacgtccgccggcgcggcggggtcgacgccgagctcgcgcgcccggttcacgtactccttcttgacgttgcccctctgcagctgcaggaggcggatgacgctgcggcgcgcgtcgtgccgaaacgggcgccccgtcccggtgaagccgtcgatgaggtgcaggtacgcctccaggtcgtggcggcaggcgggccccgcatccgggcggaggcacggcgagttcttgctgtcgatccggagctccgcgcccacgtgctggtactgctccttcttgttgggcagccgcggcgccaccccgggcaccttggtgaccacgtcgccggcgttgacgatgcggaggacgttgaccttgccgctgctggcgagcatatcgacgaacgcgg

SEQ ID NO: 42572 - DNA, 296 bp, Zea mays
  Clone ID: MRT4577_138830C.1
gggctgtggcgtgggggctgaggaggggctaaggcgggaggggcgcctcatcccttcaccctcccttttcgccatgtgggggccctgagcgccgccccagaagaggtcgagggaatgttgtgggctggggcacaccagcacggcagaaactggagaaagcgagagacgtcgccagggacccagggacctctccctccagttccccgggcccgcctggccctgatggccactcacgctatagcgcccactctgtcctgggccatcccgcgccacagtgtagcccccagcccgggcgc

SEQ ID NO: 42573 - DNA, 311 bp, Zea mays
  unsure (1)..(311): unsure at all n locations
  Clone ID: MRT4577_138831C.1
cggtgccgtgctcgaggacgtcgacggcggcggcggcggcatcgagcggcacggcgtcgtggaggtatncatnatcaaattctaccattctctatgaccatcaatctctattaaggaccatgacaaaatacacagataatattcatgcggaaggacttctccctgttttacacggacgggtacagtcgcatttcgcccttgtatttgaacatactcatgcgctcccttagaaataactttacataatcacagctttactacatcgttctacatgagaagctcaccgtaccactttactttccgtgctttct

SEQ ID NO: 42574 - DNA, 322 bp, Zea mays
  Clone ID: MRT4577_138832C.1
aggaaattgtcagtgcattaggctggtgacacggtgaggagctagcatgagcctgtccctcgacctgatgagctttcacaactaactttcacgcatggtctccgtaggcgtatgcttggaatatcataccctgagttgacatagatgcaaatgcgggcaatttttgaagctgttagatcactgacaaagcataagcgctgagaacacctgaatacgctatttggacaagtgttcgcatcgataacggttcatcttgttgtgacatcacaagatctgcagcatcagttgacgcttagccaccaagatatcgagaaagtgttcg

SEQ ID NO: 42575 - DNA, 2250 bp, Zea mays
  unsure (1)..(2250): unsure at all n locations
  Clone ID: MRT4577_138833C.1
ttttttttttttttttttttttttncacagctcaattttccgagttggcgttcaaaattgatgatttgacgaagtactgattcctagggcaagaaattttgggataagattacatggcatctacctgaatacagcagaacaaatggctcgctagtcactacagtatctaatgacaagatccacgataaattgcgggcatctcatccaaaatgcgacatgattacaatgatttacatcgctacaaatagaatgggcagcaatgtggctactaggtgagtcagccagcacgactgggattttgaagcaaaactgtccgggcttacaggcccagaggccgttccaccgttgctgccgttggcgccagtgcttccactgaaaatgcatgaaccatggcttggatcagtcgatgttatcatcgcggtgccattgaagttgcatgtaccaccactagactgtgttctatggtaataatcgttgaaagcataagaagcaacagctgcaatatcatctgatgcatagcatggttgcccaggttgaactgcactgcagtttgcagaaccagggccacatgcccaatccaaactatgcttcagtgcactatgggatgcacttgaatttgccacacaaaacaccccacgcaaagcaggtgattcaggaatagctgtggccacgtcctcaaatgatagagaatatatagtggttgcattgggaaacataatcccccaattttgctctgatacaggccctgaccgattatcctcattgaaaagttcaaagatgtaggtgcttggctgattattcggttggctgggagtaccagaattgttcagtacatgatgtatgaggtttgtattataggccaaagcattatcaacagtagcagccttctcacttggcccaccacgccatggccaaccagaagctgtgactaaaacaggaatgcccgtaaaattcattgcttgaattgagttgtaggtagcatcaattatagcatcaaacatattggtataaaagagattggtgttaggatctgagatttgactgttcggattaagtgagcggaatagtgcatactccaagggaaatacgccttgccctccgacatagccatagtatggttgggcattcagcataaacgaagatcccgtattcttgagaaactgaagatattgagacattattgagctccatgtcaaattgaaagtcgcagcagagggtggaaaggccttcgagatcacatccattgaatgaggacttgaaattttcacttgagtattgaggttcgcagccaacagtgctgactggaggaattgcagtgcaggtacgagaacaagtgctgcattgggaatggtagtaaggacctcattacccacagcaatatatgtgatgttagtcgccggaatgtaagcaccgacattcttattaatccaatcagcagctgtggaacgagattggcccacacgaagtagctgatcatttggaaccccaaccatcacttctattccagtatttgcaagggcagtcaacatctgatggtctgaatcaagcaggcgaacatgctgaatcttctttgctttgaggatagacactatatctgttgctggtggtatgttcgacatgtcattgccaatagtgataccaacaaatgcccctgaaacattgaaaaccatgagcataagaagggtaaacacgccatgtagtttctttgaccacatatccttgtgcccaaggatctgactaagctgtaagccagggacacttctcagaagctctcaagaaaagctgatttttgtccttatagaagagccatttcttcctcctcccttaccaaacacgcgcacgaactctcgctaggtcgccgcggagaaggagcgagaggacgaacagcggcggcggcggcggccgacgactatgggagggagcacgaactgggggaatggagactggactgctgccgcactccagtgagagggtgattggaaaaagggaaactctctcccctctcgcgcggcagcacgtagagaatccgaggaggctctctagcttccctctgttccgtgaaggtttaactcaaaacacttcatgattaagcgcctttaaagattaatttctccaagaggtgacgattagtagagaaatgcgagtgattgaacgggaacacagcgagatccaatagattcctggagcggacagggagtataatttaacagggaaaagaccgggaaaagtggagcttttatcttggatttg

SEQ ID NO: 42576 - DNA, 235 bp, Zea mays
  Clone ID: MRT4577_138834C.1
acgcaaaatctgagacaatgaatgatctagagtatgcaaaggacccaatcatcatggggggggcgcggaaggcggcagcgatctctctattaatgcaaataggctcccgcataccatgaggctgaacatgcccttgttgcctttacacagaatgagcttaccctgtacacaaggctaccattgtacccagtggggcggccctaggaatgttggcccatcttgctgacaaagacca

SEQ ID NO: 42577 - DNA, 428 bp, Zea mays
  Clone ID: MRT4577_138835C.1
acttatacactatataggaagctgtccctgagtccgatccttaatacgggcggcgccttgctttctcccttttacaatacctggacaaaaccttgttattcttctctggactcgttacatagcggggagcatgcaaagggaacaacatgggtaccaacacttaattcaaaggtaaaacggacactaccacggagacagaagcgatcgtgcacacaattctataaatagataagataactcgacccgaagacaggatgggcccacacattagtccttccagccgtcgtcgtcgacgacgtaatcgtcaccactatcctggacctgaccggcgtagacgtcaccggctccgtaatcgccgtcaccaccctcgagccgaccgccgtagccgccaccgccgccataaccgccgtcacggcgcccgccaccat

SEQ ID NO: 42578 - DNA, 177 bp, Zea mays
  Clone ID: MRT4577_138836C.1
accttttggtttttatctggaacatgtaaagggcagaaggagctttttaaaagcgaaaaacccaaccaaccccggggaacagcgaaggcccggaagcacacagaaggacaccaacaacgaagccgacaaaccggctacgcaacccaaagaaagaacgcacgggcagaacccatggaa

SEQ ID NO: 42579 - DNA, 238 bp, Zea mays
  Clone ID: MRT4577_138837C.1
ttcgaacccccgcagacgtacttcccgtgcgggactctttacatgggcggcgtctttcacacagtcacgtagtccatccctccacattactcaccacattgcgctacccaccgtgcgtcgtatatcgtcgtgaattgccataccacctaggcacctttaacctgccgtgactacccgggcgcgccaattgcgtgcgctatctcctattacttgcattgcgaatacttcgagctttaaa

SEQ ID NO: 42580 - DNA, 293 bp, Zea mays
  unsure (1)..(293): unsure at all n locations
  Clone ID: MRT4577_138838C.1
nnttnnnnntttttttttttttttttttttttttttttntnggaaatgaattacctcatgtttctttcatttctcttgaggacgaacagacctgtctactaattcaatgttacaatatactgtggtttcatggcgggagcaaaaagcctgagcgcctaataaagcctagatctttcctgtaaattcgaaaaaaaaagaaggttttttccttaatgccatcatcctcttattttaatgacagacattacaacccagatttttcttttgaaaacctaatctcccccttctttttt

SEQ ID NO: 42581 - DNA, 306 bp, Zea mays
  Clone ID: MRT4577_138839C.1
tcgtttaggtgcacgctctaccggatctgtgggggagtgttgcaaagatttggtggagcgctgaacctacgttagatgcacgagacctgcccctcggagaagaacatcctttagctggactgggggggaaatgcgtcgactactgtaaggactacagcgatgactggactactctatccgaaaagctggccttcaagaaggcggtatttaccaaaacccataaagagaatgctggaacggaagctgagattgtaatggttgacggttaaattgtggaatacaagaaaatccaagacctgcactttt

SEQ ID NO: 42582 - DNA, 217 bp, Zea mays
  Clone ID: MRT4577_13883C.1
gggggagtgataattatccacgtgtttcagttagaccttaaatttagttgctgagcagccagccctgcacatcgcggccggggggagaggtggggaacacacaactttcttgaactttattactggtacaggacatggtaaaatagagtgtcctggtaggatgagcgaagcacttacagcgagcttaaacgctctgtctctgtgctgttacttttgt

SEQ ID NO: 42583 - DNA, 397 bp, Zea mays
  Clone ID: MRT4577_138840C.1
aattcggcacgaggcgcatctcttcctactacaagtcagttcaagaaaataaacatgttgatctatctccaccaaggggcccagagctccatgtgcagtcccatggagctggtatagctcctgctctagctcgagcgctagctgaagattatgtccagtctgatcatctgcatgttgtggagcagactcaaacctcgatggctcccaagcgggaacagacacaatatcctgttatttgtattctggagcaccttccaaaagcaagtttgccatgattggaggaaggtaaaacttggggggtttggcttttgactggagaggatgatgcgtctctttaccgggcgggtcagaatgacggacgcgaacgctggaattggggtactgagtggtggggagg

SEQ ID NO: 42584 - DNA, 492 bp, Zea mays
  unsure (1)..(492): unsure at all n locations
  Clone ID: MRT4577_138841C.1
ngccgcccccgcccgaaccgaactcatctcctttccgtttgggcgccaaaacagcatccgccgcgcgacgcgtctcgtcagcgccgccagccccgtcagaatggctctcaagcatggagccacaaaaggaatgtgatgcacctgtcgtctactgagccatggatggtacaggtgacctcttcaaggacgcggccttcagatctaagtgtagttgtaggttggtttgtatacatacggtgtgagtgaggtgtgtgtgttgaggtgtttatgtacatgaacatgaactacaactgtacctagctgaggggcatcaaacaatgggacatgtaaaaaaagagtctngtagtggcatagagtgaagtagtgctcaagtgacagtacatggctngcagagagtagaccattagtagggagtccattgcaggtgcagtctcagttatttgttttggacttctgttgtgttgtgtatactgtaagtgtgagagtgagtcg

SEQ ID NO: 42585 - DNA, 328 bp, Zea mays
  unsure (1)..(328): unsure at all n locations
  Clone ID: MRT4577_138842C.1
aagggctttcagttcanacattnttttaagtgntgatgtgactttctgtttatcccaactcaaagcgctccttgtgttgtgaattatcagggtgattcatgggcatntggtannatatcttgcccgtcaaggtgtgcgttaacaaacattgtgttgatgaacccttaaagaccatacggagttgctcgaaaggggtgttattaaacatgttcagaacttgagagtgtaaaattgtagattttagaggagtaatatcattttctccttgcaagatgtggctacgataatctaaagccatcgcacggcaaattggccancggcggcggca

SEQ ID NO: 42586 - DNA, 250 bp, Zea mays
  Clone ID: MRT4577_138843C.1
cccacgcaaacgagcagagaaggaacgcagacggacaaaaacggaacccgccggaacggccacaaggcaaggggaaaaaccgcgggggcggccgaagaagcagcacaagcaacgcacagaaaaacgaaggaaaggagcccccgaaagagaggacaagcaccgaaaagcgagacccgaagaagggagggaaaggacacgggacagcgcggacagaacaatcaaggcgagaacgggacaaaccgaaacaaaa

SEQ ID NO: 42587 - DNA, 198 bp, Zea mays
  Clone ID: MRT4577_138844C.1
gtccgaacagtactaattaggcttgcgccaaaatagtgttcacagattacattctaacgaatgaaagtattaaaatgaataaaaaatgatgaaaacaagcgatttgaggctaatactcaaataccacagatatacactatgaggacgatctcacaggtacaagcaggcaaacaaaaatgtgcgaagaagaacaacggg

SEQ ID NO: 42588 - DNA, 439 bp, Zea mays
  Clone ID: MRT4577_138845C.1
gacattcacaaaggacggtcaaatcacaaaaggttcgtgcctgctacacctacattggttcctgtcgtgttgaatgaaccaggtacactgcttacactatgccgtgcatcaggctaggaatgggctggacatgctctaactgaaccaacacgcctggttctgtgaactattacgtgagataacaagaaaactattttatatacaagaatttctggctaactgatgcgcttgatgagaaacatttgtcctggaaatggggcgtggtctgctttgtcacttaattccagaatcatgcgcaaaagatctactttcatctctaaagtaatgtacctacagaaagactgtctaacatattactgttcgatgcagtgatctacattgcatgctcttagacgaaaatgcctgccgatgttacagcttcgctagaagaggttatttg

SEQ ID NO: 42589 - DNA, 213 bp, Zea mays
  Clone ID: MRT4577_138846C.1
ggacaaattggcggtgcctttgggagagacccatcgggggggaatataattgggagaggttgggatgacagacaactcccgcttgggggggtatattttgcaacgcctctccccgaaacaataaccggaaaaaaaataacccgggggcatgagcggggaaaaataaaaaggtgggggaggacatgtctgaatcttgaaatgtttcacgaaatg

SEQ ID NO: 42590 - DNA, 828 bp, Zea mays
  unsure (1)..(828): unsure at all n locations
  Clone ID: MRT4577_138847C.1
gggtacctcgaggccggccgggtgtttagattactggaggatctttgcatgtcagaagacaacagccaacaattaaaggatggagatggggaccgtgttacccaaggcctgggaactgtatggagccttatcttgggtcggcctccgcttcgccatgtttgcttggatattgctctgaagtgtgctgcccactctcaagatgaagtcaggggaaaagcagttagattggttgcaaaaaggctctatgatctaacatatgcaacagaaaaaatagagcagtttgccatagagagccttgtgggagttgctaatgagcatactgtggacacagatattaattcgaaatctttgaaagaatcgacagctgagattgaggtaggtagtcagggaacttcagtaagtggctcccagatcccagatactgagttctctgaaaatgggccattcaagacatcatcggtttctacaaaacagtcagcagtatctgtatctgaggcaaagcggcgtacttctttgttctttgcaccttgcaccaagagatctagtcttcttcaacatctgttcaatgcttatggaaggtccccaaaagttatcaagcagtgtatccattggcatatgcccaaccttataagaaatctgnggccctcgtgtcctgaattgctgaacattattcataatccacctgaaggcagtgaacatcttattaccttgacactgcaaacattgactgaaagatcaaatccctcagctgacctagttgctgctgttaaacattatataatacaagctgaaggatgcatctattctgattcccttactgcttcattc

SEQ ID NO: 42591 - DNA, 2354 bp, Zea mays
  Clone ID: MRT4577_138848C.1
tcagtctacaattaaaggatggagatggggaccgtgttacccaagggcgtggggactgtatggagccttatcttgggtcggcctccgcttcgccatgttctttttatgtggctggtacattggtctgttgggtttcaactctaatactccaacttgcttgggactataaggctttgttgttgttgttggtggtggtacgttggtccgtgctgcacttaccttctgttgtgtatttacagtgtgctgcccactctcaagatgaagtcaggggaaaagcagttagattggttgcaaaaaggctctatgatctaacatatgcaacagaaaaaatagagcagtttgccatagagagccttgtgggagttgctaatgagcatactgtggacacagatattaattcgaaatctttgaaagaatctacagctgagattgaggtaggtagtcagggaacttcagtaagtggctcccagatcccagatactgagttctctgaaaatgggccattcaagacatcatcggtttctacaaaacagtcagcagtatctgtatctgaggcaaagcggcgtacttctttgttctttgcactttgcaccaagagatctagtcttcttcaacatctgttcaatgcttatggaaggtccccaaaagttgtcaagcagtgtatccattggcatatgcccaaccttataagaaatctggggccctcgtgtcctgaattgctgaacattattcataatccacctgaaggcagtgaacatcttattaccttgacactgcaaacattgactgaagattcaaatccctcagctgacctagttgctgctgttaaacaattatataataccaagctgaaggatgcatctattctgattcccttactgccttcatttccaaaggaggaggtattgcctatatttcctaggctagttgatctcccgcttgagagattccaagacgtacttgctcggatattgcagggaactgctcatactggtccagcattgactcctgctgaagttctcattgcaattcatgatattaaccctgaaaaagataaagttgccctaaaaaaggtcacggatgcttgcacggcttgctttgagcaacgcacggtatttactcagcaggttttggagaagtcacttaatcaattggttgacagaataccaattcctcttctttttatgagaacagttattcaagcgcttgatgcttttcctgctttggttgattttgtcatgggaatactctccaggctcatcgataaacagatatggaaaatgccgaagctctgggttgggtttttaaaattgtcattccagactcagccacgttcttttgatgtcttattacagctacctccaccacaacttgaatttatgttgaataaatatcccaatcttcggacacctctttcttcctttgttaatcagcggaatatgcataacaccttgcccagacagattttgaacattctgggtatttttagtgaaacacagcaggcaccgatggcatttgtgacagctacattacaaacagcggatgcaaccacctctcttcctggtgcaactctgatgtgaatatactgtggaagccatcagatgcaagaaaggtcgatgcacatacagatctttgtagacattagtacgcagaacagacagatctgtgtcaatgaagattgccgcccctctgatgtatactattttgcaatgacgggttgattataagctactccgcatggagaaagagatgttgacagaagccaccgaggtgattgtatggcgtgagatcctgtctgtcctggagattggagagtttgctccagcggaacggaagtcatccaacttctatagtagctttactgctgtggcaaaatgtagtcccgtcgtcgtggtcctgggagtctggcccttgcaggcagagacgaagaagacgcaaggaggatgattacaggaaagtccatattaccccatcttaactgttttcctaagtcagattacagctgctgcattccttttatagggagcaggcatttgaccgatttagtctaaccattgttgtaacaacttctgtacattagttaattgagttttgctactagtgttagcaaacacataatcgctgtcgttagcaatttcctgcggtgacctggtaatcaaggaaaatattttacatcgggtcaatgcatcatatttgtttatttctttgatttcattttccggtaggtttcattggagtttgtaatgatccaaatgaccattagtaagttaataataagcattacgcgagctaaaaaaaaaaaaaaaaaaaaaaaaaaaaaaaaaaaaaggagggcggccgccgactagtagctc

SEQ ID NO: 42592 - DNA, 473 bp, Zea mays
  Clone ID: MRT4577_138849C.1
tgggaccctcgaggccggccgagacactaccacactactcgcacaaacatgtcgtcagcgccacccactgccgcaatatgggctcagacctcaagacatccgaaaaatcgaaagcgaagccctgctgcgtctgtaccgaccagaaagcgaagcgcgacgaatgcatgctgttctccacctcatacgacgcgaataaggaatgcgccaacctcgtcgacgactacaggcgatgcatggccggctatggcttcaagatataacgccaatgcactcttatggcgactgagttaacgagtgggaaaacatggacaacacaagtatatgggtggcgttgaatattagacggcatcgtttctttgctgtacagcatgtatcaacagaattggaatcttcgctccaaacgtctagccgaggtatctcaaagaaatactgaaatcctcccacaagcgaaaaaaaaaaaaaaaaaagcggac

SEQ ID NO: 42593 - DNA, 110 bp, Zea mays
  unsure (1)..(110): unsure at all n locations
  Clone ID: MRT4577_13884C.1
gcctcagtctcatgttacttactttaagcacagcattgatgatttacgtaccttcaagctgatgggacacctatttgacgantgcaggaacacgcgagaagcattggtta

SEQ ID NO: 42594 - DNA, 519 bp, Zea mays
  Clone ID: MRT4577_138850C.1
atgtggaggccaaaggtcgttgaaataaatcaaatggccacagaggacaagacagtaggtttgcaactccctacaggtatggcggacaatctggctattaaagctggaccatccatggatgtcgtggatagtccgacccttgagtccagaccgtccgccctgcgccagagcacctccaatgatgcgccaatacctatggaggaagatgacctgatggaagaagacttggtcgactatgaaactacgccagaacactcaggggtgaccataaatttaatgccttactcattgtacagaaaattaggaaagcaagacgacgaacttttcaagaccaacatgatgctcagcggtgttgggactaatagttcgatcaaagccaagggagtcacgtcctttgatttaaccatcaggaccaaggcccttgctgctgcattcttcgttgctgatgtagaaggaaattatagtctaatcttaggcagagattggattcatgataatcaatgtataccttctacttga

SEQ ID NO: 42595 - DNA, 390 bp, Zea mays
  Clone ID: MRT4577_138851C.1
cggacgcgtgggcaaacacgttgatagaaacaaaaaagaacaccactatagaaaagaaggccgacactggggacgaacaaaacctaccaagaaacatgctggcaccagtacgtaagaacggcttcatcagtcatcaagaaccgatcatgcaagggtggggaggtttttacctacaagactggtaagcatggtcacgcaaaatgccattttgtcgccatagacatattcaatgggaaatagcttgaagatattgaaacttaatcacacaactgtgacattccgcatgtgaaccggactgagtatgagctgatagatatttatgaggatggaatagtgagccttcttacttcagatggcaacactaaggatgatcttagactcccaactgat

SEQ ID NO: 42596 - DNA, 107 bp, Zea mays
  Clone ID: MRT4577_138852C.1
accacccttggcttaaatcagcattagaaaattctccatgtttcctgttattctgtcactagtcgggaaatggatgaattccgtggtgcgatcgatctctctttccg

SEQ ID NO: 42597 - DNA, 316 bp, Zea mays
  Clone ID: MRT4577_138853C.1
catggttgtgttttttgacttttttataatctagcatttgtatttgtcattggtttttggttgggggaaaacaaaaaaaaccgcactccttcccaacaaacgggccagaggggtaaaaagtattagcctggtgtacccacccccaaaaccagggggcctccctgggggtctccctcactgccccataaaaaacctggaaaaaaaaaaaggcacctgtatcaataaagggttccacccccggggaaacgtttgcaggggaagggggggcctccccacaccaaaattttccagttgaaaaaacccacacctgaggggc

SEQ ID NO: 42598 - DNA, 268 bp, Zea mays
  Clone ID: MRT4577_138854C.1
ccggcacagcctgctgcccctgcatccctgctcgttggcgtttccctcgatccctcccccctgccgctgccctgccccaacactggctggctgcccaccatccttcctctgcggagctcgcgtgactcccctcgctctcgctttcgcgctgcgtccgcggcggcatcattgggtgtccgtgtctggactggagaccgggtccgtcctccgtcggatagagaggggggcggagccttcggctttcttggctgctgggttctcgaccact

SEQ ID NO: 42599 - DNA, 281 bp, Zea mays
  Clone ID: MRT4577_138855C.1
gcaatcctctgaagtctgaaggatgacagcacagagagacattttctctgtaaaaaaagaaaatgtttgacggataaaataagacggcagcctagactgccaggtcaaatcctttgatttgccacctgattcagcgatgctctactgctgtaggtcgctggcttctagcctcgtgcggtcgtgcccacgcaggttagttccaaaaaaaaagaggaaattcgctgacggtctataacaggtactctactgctccgtctaaaaaacgaaattgttgctggagg

SEQ ID NO: 42600 - DNA, 796 bp, Zea mays
  unsure (1)..(796): unsure at all n locations
  Clone ID: MRT4577_138856C.1
nnnnnnnnnnnnnnnnnnnnnnnnnnnnnnnnnnctttttttttttttctttttttttttttttttttttttggccagaaaatagttaaatcgggaaaaaaaaacacgatctcttgggcatgtccaacgaggaaggatatgtcattcaaaactgttattagctgcagcaatgccagcggcaaaacaggtgaccaagcaaaccaagcaggacgaggtagaagaagatatctctcacaaaccagcagagagaccaaccgtaacgctggcatgcgcctgcgagctggacgacgaaatcacatgacccacgacgagcgcaggaacagcgccggcgtggccgtgctctccgtcctgggggcgtacacgagcgccggctgcagcctcgcgcccttacccaggttgaagttgaggaacccttccagctccaggtgctggtgctgctgctgctgcagctgactcctccccctccccctcgtcgtcgtcgtcgtcgtctctccggccgtgccgccgctaaccttgacgccccacccgagctcgttgtcggggacgtcggacagggagaagccccagcgcagcggtccgtggctggacctggacctgtccatctgaacccccccttctgtcttgagagtctcgtacagctcgcagtccaccatcaccgccatggcgccgccggcccgactgtcgaacttcacgctcagctcggtgtgtccttctgtgccgcctccggcggcggggtgttctggtcttaggctgccccggggatggcgaggattccaacaggttgagcagggacgac

SEQ ID NO: 42601 - DNA, 170 bp, Zea mays
  Clone ID: MRT4577_138857C.1
ttatgcttttcgttctactcagagattgtggagcgcaatgctatcttaattggactatgacatgaatagttgatccaaggtctctgctgaagtagattattcaaggtaagaggtttctttccatgctgtcaatatacacaatggatcttattcttgatgtgtagccaatt

SEQ ID NO: 42602 - DNA, 754 bp, Zea mays
  Clone ID: MRT4577_138858C.1
gggatgaaccagaaccctgtcatttgtgctaatgatcaccatcagtaaactatcagcgacatctaaacaatagaattggaattacatctcatttcaatactatagctgatttggtattgaatccaattcaattccatgtcctccaatatcaacatccaaatggagcattagcttcttctaaaggtaagaattaaaaccaccaactgatggatcgtccaacaacgatttccttctaccctgttttcgctctggtctagggtaaaatttctgaagattgtacaaggacactgtgtgtgtgttggggaggggatgaaccagaaccctgtcatttgtgctaatgatcggccatcagtaacctatcagcctagtggattttgccttcgcccctttgttgccccaaccattttcctaaccccttgctacaaaaaaacgaagaattatcccgatcaaaatgcgctgctgtaccgagagccagactatttatttgcctcaaccgtggaagggttctcctcgaacgagtcgatcaggcccttgagcatcttcagaacttcgtcggggtcttccaggtagtacttggccaggcttggcttcttgccgacggtgcaagcgaatatctcggcagcctctgggaacgcggacttgctggaaggagcactgatagcctcgaacatgtcttcgtcagacccatcgtcgccaacacataggatgaaatctggcatccttccgcgggcccccaagctgcaatgagtccctg

SEQ ID NO: 42603 - DNA, 298 bp, Zea mays
  Clone ID: MRT4577_138859C.1
actgtcctccgccctctgacagccctcactgcttcttctcctccgacgcaccggaaggtgctgcggcgctgactacgtcagctatccacccttctggcgaatcgactttctgaacacagctgcgccatgagccatgcgcgactacgactcagccaggccggcgtctgtaacataatgggcgacgacggagacaggtcatggctaagcgctactctgcatatactgaaactggacgagtcaacagaagatgtcctgaggatgagacgtatggccctgcagactgaggacaccgggtgat

SEQ ID NO: 42604 - DNA, 626 bp, Zea mays
  Clone ID: MRT4577_13885C.1
tattctctgttcatcgaactccatctatcatcttccccacgaacgcttgtctccggaaccgaaattcaaatgcccatgggggactccatcctaatgccactcgcacccccagaactaccgccccgattccctcgaactagcctcgtgctatatcgaatcctcgtggcactgatactttagagacatggctgatgtagctatgacgcagccgccttcgcgagcgatgatcgaggatgttgtgttcatcgagtaccgctgtgatcacgaggcaacgaaacatgtcttacataccattgtgtacatttatctccacaatgttatatggtttgttctgaagtctgataatgcatactgctacgattatgatcaataacttagacgtgttctgcctattgatcatgcaattgagcacggcattgtcggcaactgcccctacatgcctcaaatctccagatcactgcttctattatgagcttcaagtgccacctgtgggagcaccctatactgatgtgcgacgctcctctgaatcccatcgcctcacgttccacacgacccacattatgttcgagacattcgactggcctgcaatgtctgatgacatacataattctcattacctgtactgc

SEQ ID NO: 42605 - DNA, 419 bp, Zea mays
  Clone ID: MRT4577_138860C.1
cgtaccatggacggcttcagcaggatgccctcgaacatgacgttgtgctaggtcgtgcacacaagcaacttcctctccggggcgatcctgccgtgcctgtccacgaggatgtctctctcgatcagtcagatgtagatgtaccccatgaactcaatcttcttcatcagcgacgggacccgccccagctgcgcttctttctcgcacatccgctgcataacgaccacctgcatcgctaggcgagggcaggcagtcgaacaaaacaaagtccaagaaggtctggttcttcgtgcgggggaaggccacctggcttagtgcgataggtaagccccccaaggtcaggaagcccatgatgcgcgaaggaatgcacgtactaaactaccgacactgattaaactaccgaccatccccccgtagaacga

SEQ ID NO: 42606 - DNA, 1939 bp, Zea mays
  Clone ID: MRT4577_138861C.1
cattgggtccctcgaggccggccgggacaaatactagcaaggtcatctcaatcacaggccacagctattagcttttagccgctggcagacaaattcgacagagcagctcgcctgctggccgcaatccgtccgacatggcattgctgccgggggcggcgcggcgcctcctctgcagcctcttcctctgtctctggctgtccacgctcgcgcgtgccgcgacgcgccgctacgagtgggaggtcagctaccagttcaaatcgccggactgcgtgcggaagctctccgccaccatcaacgggcagacgcccggcccgaccatccgcgccacgcagggcgacaccgtggaggtgaaggtcaggaactcgctgctgacggagaacctggcgatccactggcacggcatccggcagatcggcacgccgtgggcggacggcacggagggggtgacgcagtgcccgatcctccccggggacaccctcacctacgccttcgtggtggaccgcccggggacgtacatgtaccacgcgcactacggcatgcagcgctcggcggggctgtacggagtcgtcgtcgtcgtcgtcgcggcggcgcccggagccaaggccgacgacgcggagccgttcgcctacgacgacgagcaccacgtgctgctcaacgactggtggcacaacagcacctacgagctggccgtcgggctcgcgtccgtgccaatggtctgggtcggggagccgcactcgctcctcatcaatggccgtgggaggttcaattgctcggcggcggccgtgccggggacctgcaacgccaccagcccggagtgtgacacgccggtgttcgccgtcgtgccgggacagacctaccggtttcgcatcgccagcgtcgcatccttgtccgctctcaactttgagatcgagggccacgaaatgacggtggtggaggcggacgggcactacgtgaagccgttcgtggtgaagaacatcaacatctactccggcgagacctactccgtgctgatcaaggcagaccaagaccccaaccgcaactactggctcgcctccaacgtcgtcagccgccagcctgccacgcccaccggcactgccattctcagctacagcggtgaccgcgcaccgccatcgacgaccccgcccacgggcccggcctggaacgacaccatgtaccggttccagcaaagcgtggcgacggtggcgcacccggcctacgtcgagcctccgccgccgcgcgccgaccgcaccatcctcctgctgaacacacagaacaagatcgacgcgcacaccaagtgggcgctcaacggcgtgtccttcacgctgccgcacacgccctacctggtggccatgaagcgggggctcctggacaccttcgaccagcggccaccgccggagacgtacgcctaccaggggtacgacgtgtacgctccgccgcagaacccgaacgcgacgaccagcgacgggctgtaccgcctgcggttcggctccgtcgtcgacgtggtgctgcagaacgccaacatgctggcgcccaacaagagcgagacgcacccgtggcacctgcacggccacgacttctgggtgctgggctacggtatcggccgcttcgacccggcggtgcacccggcgtcgtacaaccttaaggacccggtactgaagaacacggtggcggtgcatccatatggctggacggcgctgcggttcaaggccgacaaccctggagtgtgggcgttccattgccacatcgaggcccatttcttcatgggaatggggatcgtcttcgaggaaggcattcaacgtgtcgccagtctcccgccggagatcatgggatgcggggaaactaacggtggacaccgatgattatatcatgtattgtagctatgagtgtagtaaacactttctttcctctaatgatatcgtttgtcaaatgttcagtgctc

SEQ ID NO: 42607 - DNA, 370 bp, Zea mays
  Clone ID: MRT4577_138862C.1
caacaacgaccgcgaagacatagattggtggttcaaggccctgttcctggtccactttggagacatgtgttggccttgggtgggcatctattctaatcgacaataggtgctaatgacggaaaacggaccatggcatatgtatgggcccttgttactgcggttttcccatattaatggagaaatcttgagccttatggtggaggaccaccaccatgcatgtatgcaactgctagtgcccgttatgatggtctactttagctatgtggtggaagggatgccaatagcgcgcccctattaagtgcatatgttcttgctaagcatagaaatgatcgctgggaggaaactatggcccttggagtgaatccattat

SEQ ID NO: 42608 - DNA, 529 bp, Zea mays
  Clone ID: MRT4577_138863C.1
cacaaatccaacaaaatctaatatgtactcgcacaaaaacaattagccatatatattttttaatttaggtcatcaacactatgcactaaggaacactatgcaagcactgacggggctgggcgggaggaacctagcgaggcgccacccatcgtgtttcctctgaggctctacgatcgtcgttgtcttgttgcatgcactgaggctgaacgtgctgctgctgctcctctgcctgtgcgcgttccccgccccggcgcggtcgcagaacacgacaatggccatggccgtgccggcgtccgtcgaggggttcaactgcaccgccaaccgcacgtacccataccaggcgtacgcactctaccgcgccggcttcgcgggtgtgccgctcgatctcgcggccatcggtgactcgtcacctacgtcatgcaccccggggacacacacgatgcggcggccgcctgtgcatgcactgaggctgagcgtgctgctactgctcctatgcctgtgcgcgttccccgccccgacgcggtcgtag

SEQ ID NO: 42609 - DNA, 695 bp, Zea mays
  Clone ID: MRT4577_138864C.1
cattgggtacctcgaggccggccggggtatcgatgcgccgttcggcgagcaacagcgcgaccgtcactacagacagagcgcgcttcaaggactttttttttttgagataacaaggagaagaggaggagatggcttgcatcaatctcctgagttgaatgctagagtagatctgtcgacagccgatttgaccccaccgacgagatggacgtgagccttatcgtgcaaagctacacgaggactgccgtacccagaggtgcatccgctgaaatatatgaggactcgcacttgatgacacggaagatctgattatcttgttgagatagttcttatcgctggcatcaaagtatgcaacattattgtacctccgattgtttgaaaggagcccagtgagcatctggacatatgacaacttcctgagcgcaacagcttgacgcaacctccaatgtgtgatgctgtagactgcagaagattgcagcaaatgccatccttgggggaacacttgctgtgtgcatggctggaactatggagaataagattcctcattaccagctcctcccaaatctagttgaaaacaaaactctgctgctccctgtacctgcctatactgtgattaatggagggtcacatgctgtaaaccatcttgccctgcaggagctgatgatgctcccaactgcagactcctcgctcaatgagga

SEQ ID NO: 42610 - DNA, 2355 bp, Zea mays
  Clone ID: MRT4577_138865C.1
ggtaccctcgaggccggccggcaagcctaacttcatttctattctcctccccagccgccaggaagcaccggcgcctggccaacgccgcgcctcccttttcccttctctgtcttctgttttcgttctgtcagccgcgcagaacttcagccgccagggaactctggttcctggccgaccgagcccttcaactgggctgtgcgccacagagcccgagctaaccttttgttgtctctctctcttttttttcgaaatctgttccgatttctgttcgtgatctgatcggttgtagtgatttctgccgagctcttagggataaaatccctttcattatttcactgtttttttaaaataacgaactcggttcatcagggcttctggaactcgattcgagttggggattctgtcctaactcctactccgagatcctctttctgtttggaactacaggagaaaacgacccccttcctccaatcgtatagagttcttgatatttttttataccaccgaacagatcgagcctcggatttgttaaacccgagctctattatttttctgcgaatgaaatttctgtacctttgactgacaaccagtacatggattatattgataatgctctgtacacataatctgtacgtgttttctgttttattgactgtttctgggttgtaaatttaaataaaattccgagctactgtgatctctttttgtccctgttgacatatgtaccgattagggttaggtcgtaaaccctaaccctaaacagtggtgagagctctctctggtttgaggccgagacacactgtgtcgcttaccgacccgagagcattgacactttctatctattctaatctactctgttctcgggtgataaacgaaaaaaaaagttcaatcatgttgatccgagacttttctgtgatctcataaaactgatgtggattaggagatctagggttcttaggacggctttgataccattgttagaatctatactgtctaggatcgattcctaagtccctataataccaatccgtaactgaaagtaaaaccttgatgacgtgtagatctgatctactgatctattgagaggaacggggaaacacacctttgttgttgttgctatcttcataccgtcgccctgtagagaagcaacagggcattgggatccaagccgctgtaggttgtcgcgtttccaaacactccgacgcctaggcgatgggggcctctgaggactagggttttagggcgaggtactagcgttagtctttcctgcgaccccttagtcctatatatagcgtcgtgtgtctgggggctccaaccgaggttagcgtgggccctcccaatcaagggcccatttaaagagatagatagttgggtttagcccaatccggtcacagttgaccagctgtagaggacacacccaacacttcctcctccagccttcggatgtgggcctcgagaactagctcgatctcgtctgcaagtgcaactcatctgcagtgctcctccctaatgcctacaggtgaggtgtggtacgaggggggcgttggaccctccctgcaacgccgtaggctacatcgaccgcagagtcctgggcatcaaccacatgtaccagaagccggcatggagaaggcacagggcctgcactgatgactccccacacgaggggcctttcagagaggatgccccagcgtggtgtgtcgcgccattcgagcctgaagggatactgagctcactgtctgctgtgctgagtacggtcgtcggtgttcactacgggcatgtgcttgtccacatgaagagccatacggacaggcttaggcagtgggttaccatgggcgtagctcttctcgttctcggaatcattctgcacttctcgcatgcgatcccgctcaacaagcagctctacacgttcagctacatctgcgtcactgccggcgccgctggggtcgtcttctcagcgctctacttcttggtcgacgtcgtgagcctgcgctacgccttcgcgccgctgcggtgggtcggcatgaacgcgatgctggtgtacgtgatggccgcggaaggcgtcttcgagggcttcctcaacgggtggtactacgagagcaccaacaacactctggtttactgggtgaggaagcacgtgttcgtcaaggtgtggcactccaccagggtgggcatcctcctctacgtcctcttcgcgcagatcctcttctgggcgctcgtctccggcgtcctccaccgcgctcgcctctactggaagctctagcgagcgaacggtggcatagcatgcttttgtcttttgaactgcacatgatacacacgacacctcaaactcgaaccccaagttagtttgaagaactc

SEQ ID NO: 42611 - DNA, 160 bp, Zea mays
  Clone ID: MRT4577_138866C.1
ccaataacgactgggatctaacaatacccaaacggacattataacaatgatagccgatgacaccaaacattggaaacagcaattctaggaacaagctaggcgccctttgctaggccggcagagggtgacccacacaacaaacacacccaacaccagtagg

SEQ ID NO: 42612 - DNA, 408 bp, Zea mays
  unsure (1)..(408): unsure at all n locations
  Clone ID: MRT4577_138867C.1
cacccgaacggaagcaacggaacacggaggcgagcaaagaagcagaacgcgggggacccgncgggggccaaaggagcgaggcgggggagcaaccaaagggaaagaggcgccacacgcaaaaacaaagaacaaggccagcaacaggcaaagcaagccaaagcacgcaacacgcggcgcaagcaagaacancacacgcaaccaggacgcaaaccagaaaccgaggggacaacacaccaaggaggagccaaagccaagacaacgagaggccgaacaagggccgggaaaccaaaaaaaggggcagcgacgcgggcacgaagcaaaagaggaggcccgaaggggaggacgacccaaacaagaagaagaaaggaacaggggccaaaaaaagagaaccaacaccacaaaggcaag

SEQ ID NO: 42613 - DNA, 875 bp, Zea mays
  Clone ID: MRT4577_138868C.1
gatggtaaaacagatacttttttagagttagggtttaataacctaaccctagtcggttttaatctgggtcaacaaaagagaacagtggctcgagatccacgatccacgccaagaaacagtcaataaacagaaaccacgtacagattatgtgcacagagcactatcaatataatccatgtactggttgtcagtcaaaggtacagaaatttcattcacagaaaaataatagagctcgggttcaacaaatccgatgctcgatatgtgcggtggtataaataaaaaataataataatatcatgaactctatacgattggaggaagggggtcgttttctcttgtagttccaaacagaaagaggatctcggagtacgagttagtacagaatccccaactcgaatcgagttccagaaaccatgatgaaccgagttcattttttttcaaaaaaaacagtaaaataatgaaagggattttatccctgagagctcggcagaaatcactacaaccgatcagatcaggtataagaaaactaagaacagtttaggggttctgtgaaccctaagcacacgaacagaaaccggaacagatttcaaaaaaaaaggagagagagagaaaagagaggtcagccaagagaaactagcggccagctgctagaacaaaaaaaaacagaaagagagaaagagtatctagcggccagatgcaagaaagaaaaaaaaaggaaaaaaggaatgaagaaggagtaaaggggcgaacggcgaaaaggaacaagaagaatagaatagctcggtcggcccaagctcctggcgaccggttcttagggtgagcggctggaacaggaggaaatgaaactagcccggccggcctcgagggtcccaatg

SEQ ID NO: 42614 - DNA, 1119 bp, Zea mays
  Clone ID: MRT4577_138869C.1
acaccgtcttctcctccctccgtctgaaagctcgaaattcctcttcttttttttctctctctctctctcactggctttctttcatggcttccaagaaggcgtccgatctactactactactcaatgctgccaccactggttctatccgtacggtcgtgcgccagctgttctcccggctggtcttttcgctgcagatggagtgctccctgtccatggagatagtttccttctggctgtggctggaaggcaatggccaccccgatttcctcgcgagcgtagagtcgcttgacaaccaccgtctccgggggatcgccttcgccgggaagatgttcatcgaaggtctgcgccgtaggtccagcggcggccacttgaacagccgcggatctgtggaggaggaggaggaggaagaagaaggctatttccaggaagaagccatggaaggtatcgtcttctacctcaacaacttctgctacgaggctctggaagacattctagagattgcggaggccaaggaacgtgtcgtctaccaccgtgcccgtggcaaccaagttcagcagcagcagcagcagagcagcaagggtaaagctcccatgatgatgagcacgaaggatctcttgtctaagatcaaggcctcctttactactgctgctcggagcagccatgaggaaggctcgacgagttctagaagcatgccatcgcccaagaaacagatcctcagagacatagagaacccaatcgaccagtgcctgtcaacgacgacgttccctttggcgacccttttcgattccctgaagctgagggacgatgatccagaagccgatccagctatcatcaaggtgcagcgacgacgacagcccagtattgtacttgtaccacgtgacgagagaactctcttcgtgactttctccaacggataccccttcaccgcggatgaactgtacgaattctttatggggtaaagtctattcttgtcatgctattaaagttacttaattgcagatatgtaaacaatggtgggtctcttatgtatgtatgctgctggcttcaatatgttgctgttgataaacgaaatgttggctgggacgtcgttggattggttaataatatttggattttaca

SEQ ID NO: 42615 - DNA, 885 bp, Zea mays
  unsure (1)..(885): unsure at all n locations
  Clone ID: MRT4577_13886C.1
ccggcgtcatggtgcagcagcccgcctgacgagatgagcaggggaggctacccaagccctgtctcgccattggaggtcgctgtcgccgacgaggatcgtgatcctcaagccctgccccgagctgagcgcggacgacgtcgaggagtcctcgctcgggtcgccggagctggtgaagaaggagaacaacatggaggccttcctggaggaggtcaagaagaggctcaagatcgagctcgagggcggggtggcctccgacgacaaggcggaccgccgttggttcgccgccgcagccgccgccgacgttattccggccgacccgaagcagatcgcgcggagcatcgccaaccagatcagggagaacgtcacgacgctgtgcgcgttcgacaagtgccacgccatggcgccaaggagagcctccggtggcaaggcgctgctagaggcgctgtggaagtccatgcaggtgtggatagagccgccgagcgaccgcaggacggcgagctctgcctccgtggacgtgctgatcggccgtgacctgagcgtgtcggcgtggcacggcgcgttccgcgaggacgcggacgcgctggctggggacgtggaggcggagctgctggacgagctgctcgaagagacggtgtgggacgtcctcctcaatgtgggggactcatgatcggatcgtatgcctcttctgacgagtatacttgtacattttggggtgcctttttttctgcctcttttgggtgcttgccgggtttgtgaacggtgttgcattggcgagtgagatatgtaactataactatgtttgcgtgtggaagaatgctgaatttacactgaaaaaaaaaaaaaaaaaaaaaaaaaaaaaaaaaaaaaaaaanctcgaggaggggc

SEQ ID NO: 42616 - DNA, 738 bp, Zea mays
  Clone ID: MRT4577_138870C.1
aattcggcacgaggctcccctccacgccccgctgctgctgctgctgctgctgcctccccgcgcaatggcgccgagatccccgcgctgagcgagcctcccgggggtcgacctccgaaccggcgctgccgtcccgcagtgcacttgaagaccaggcagctgttctctactcaaggaagagatggcccatgtttcgttcaaaagcaaagatgtggacagcggcatgtcccggtggtctgaatacctaagtgttgaagagccaattccttcggcaatggcaacctggaggaacatgagcgctgatgcgccgcaaggctcttctgctggtagccacaaacatcttcagatggagccggtggttcagctgtccaaggttgcggaaggcttgctggccaaaatgtaccggctgaacagcatcctggactatccagatccaaacacgcacacattctcggatgcattttggaaagctggtgtctttccaaatttccccaaaatttgcatcacgatgtcaaaaaatttccggaacatcctaacaagctgcagctagaaagggtagataagtttggtcttgatgctttaaacgagaatgctgaaggttacatgcacaatcttgagcagtggatcctgttgcttcttgatttgctggcatttcgtgaacaagctttgcgacttattttggatttgagcagcacggtcataacattgctgccacaccagaactctttaattcttcatgct

SEQ ID NO: 42617 - DNA, 373 bp, Zea mays
  Clone ID: MRT4577_138871C.1
gcaaagcccctggtttaggtacaggaatacaagccaacgacagctaaaatatcctttttgtcctcgaacaccgcccaagaaggagggaagcaacaccatccaaatgtcaccaaaactacaaatgctattttaatgtaagcttggcgaccacctcgaaagtatttaaaggcaccaatgacaaccaccattgccagaaacaatcttcatttagcaagccattgaagaggatcagcctgagcatgggaacctagagcgcccagagcaacattgagtcccatggccgtgagcatcatctccaaaaaacctcgctaccctacatgaacaagcggagccggatgaacctcctgataaacaacgccatcttgttgaccaa

SEQ ID NO: 42618 - DNA, 489 bp, Zea mays
  Clone ID: MRT4577_138872C.1
gctcaccgtccatgtcaccgacgagtgtcgggtggacgctggtgtagggcacctggagaaaggacaggaatatggtctactttatggactacttcaccacaccgcatatgcaaggagttatacatggactccaacaagatcctcaccaacatcttcgacgcctactacgacgcctaccaggtcatggccacggccagcggcacggccaccggcctgttgcacttcctgttgcagttcctgctggagcgcttgcacaagctgtgcgccatcctgggtgccaccgtggctttcaccctggccttagagatgtccgactacagctacttctactgaaaaaccgtgacagatagccctacattttgctctgtgttctgttagaaggagggcgacaaggactgcgccgaggacttcgccgagcagattattgggcataatattgtggatcacgtcggagaacactcccgatgagacacgatcaacatgctgaac

SEQ ID NO: 42619 - DNA, 1523 bp, Zea mays
  Clone ID: MRT4577_138873C.1
ctgtagttaataggttaccacatggatacaccattgttttaaaagggaaaataatttttttgacatccttatcagctctataaaaataaaaaataaactacaataaaactgtacaatagatgtttaatttaattttatttattttatatgacgcatagcagtttttaaaaacaatgccctaaaattcttgactgacaatgactaatgcgctatagtgatggcctaatacggcacgtgcggacgtgccaagctgacacaacaagtgacaaccagcgaggcagcgaaccgcaagaacaactcccagttcgctacgcgctcaccgaacctgacgttcaggacccacaagctggtgacacattaacccaccaaatagcgtcacccaccactgttcgtcgtccgcaaaccaataatttggggagaaaattcccaattacggcgggcaaagagagtgatagagaggaaatattttttctctctctctccaatttttcacccccaattctgactcgccagcggcgccaccatctcgccggaatcctagtcgaggtgagtccccacgcaatccgcttcgtttcgccctcaattctttttaccgccgcccccaattcgagccgctccacgcggttcccccgcacggatttggtcggagactctgagctcgcccccgatcggagaatccgcgtccgggcttgctcggagcttgattctatcagcagcgccgctgaattgggccgtggagcggcctcccgagttcgtgtgcttccgtgctgaattgctgtttctggatctggtccggcaggtgttggtagcgtcgggccgtggtcgggagcccgcttgtcgcggcgagctcgaccgccgcggatcgctggagcccgtgggcggcggcggcggaggctagggtttgctgctctacccggagcagctagcgggccagatcgtccggccggcggggctgcatatattttgtgcctttcgccggcgagatatcgatgcagccgcggtcgaagaagttcggccgcgtggacacggtccagctcaaggcgcagatcgtgaggcggctggggccccagcgcgccgagctctacttccgcagcctcaccaagttcctgggctgccagctcggcagggacgagttccagaaggcctgcgctgctgcattggggaaggagaacgtcaggctgcacacatccctcgtccagtccattctccgcaacgcgtgcgtgtcggacgggccgccgccgagcgcgcaggccgccaccggaaactcgcagacgagcacggcggtgtccaatgggacgctcaccagtggcttaccgccgccggtgacgagagcgaggccgcccctgactaagtggtccggtgataagccgagcccgattgggaagtctcctctcggtcatcgtccggggactgcgcgggagttcgtgtcggctgggactgggagcaaagctttgcaggaggttgtctccgtggaggatggcgaggaggtcgaccaggcccgtggtggtagtggtagtccagtc

SEQ ID NO: 42620 - DNA, 147 bp, Zea mays
  Clone ID: MRT4577_138874C.1
gtagtatgacagaatcatgtggcacttgctgcattgattgaactggttcatatctgttggggtcttggggcttgatgtttgcttgatatcgtgttgcgcgtttatggtcattgcttacctttcaatgttggatttatggtctcgctt

SEQ ID NO: 42621 - DNA, 384 bp, Zea mays
  Clone ID: MRT4577_138875C.1
gggattacaccttacttgctaacttttttatgtgttgaggccaagggcaaggaactgaaaaaccgaactccaagggaaaaattgacaacagaccatgacaccaggacaccagggggctcaaaaaaccccaaaaattttacagaatcaaaactcccgaaagatccacgaaagaatcaatattgagcctatccaaggaccgaatgaccaaaagcaggggcccattttacatcaaatgggacccttactgggtaacaaaaaaacggaaggaacccccgggtggcctagggcaaggcttttgaaggggcttgggaacctgaagaaccacatctgaaatgtgagggcgcattccaacttaaggttgaaggatccagataacaaaatggc

SEQ ID NO: 42622 - DNA, 231 bp, Zea mays
  Clone ID: MRT4577_138876C.1
gcacgaggtttgtttagggtttatggttttagggtttagggatttgtgttcacgagtactctcttcggatttgcggtgacaaagcccttgcttgtgttacattgaggtaaatctaaacgatcatgagttcatttctctttaaggccttctttgatgactacaaactcgagttttttttttttttttttttttttttttttttttgttgtatctgttctccgactcgcacga

SEQ ID NO: 42623 - DNA, 813 bp, Zea mays
  unsure (1)..(813): unsure at all n locations
  Clone ID: MRT4577_138877C.1
acctcccaaaacgggccagtcccccatccgatttcgccgggaaacctccgatccaagcgaagccaaggctttctcgtcctcctcctcaagatgcagatctttgtgaagaccctgaccggcaagaccatcaccctcgaggttgagtcctcggacaccatcgacaacgtcaaggctaagatccaggacaaggagggcatccctccggatcagcagcgtctcatcttcgctggcaagcagctcgaggatggccgcaccctggctgactacaacatccagaaggagtccacactccaccttgtgctcaggctccgtggtggcatgcagatcttcgtcaagaccctgaccggcaagaccatcaccctggaggtcgagtcctctgacaccatcgacaacgtgaaggccaagatccaggacaaggagggcattcccccggaccagcagcgtctcatctttgctggcaagcagctcgaggatggccgcacgcttgctgactacaacatccagaaggagtccacactccaccttgtgctcaggctccgtggtggcatgcagatcttcgtcaagaccctcaccggcaagaccatcaccctcgagggtgaggcctccggacacaattggacaacgtccaagcccaagatccaggacaaggagggcatcccaccggaccagcagcgtctcatctttgctggcaagcagcttgaggatggccgcactttggcggactacaacatccagaaggagtccacacttcacttggtgctccgtctgcgcggtggncagtaagctcctggccatggatctgcttctgtctct

SEQ ID NO: 42624 - DNA, 442 bp, Zea mays
  Clone ID: MRT4577_138878C.1
ctcgcgctcagctgcccgcctcctcagccagccatgctggagcatctgagctcgctgcccacgcagatggattacaagggccagaagctagctgaacagatgtttcagggaattattcttttttctgcaatagttggatttatctacgggtacgtggctgaactgttcgggtggactgtctatatagttatggccggatttgctttttcatgtttgctgacacttcctccatggcccatctatcgccggcatcctctcaagtggttacctgttcaagaatcaagcacagacgacaagaaaccaggggaaagaaaaattaagaggcatgctaaaaataattgaggttttcatgattcagcacctgcttttgtttctgtgagatgagctaaattgctttcataccccagataagagctaaaaccacctaatgctcttatggcac

SEQ ID NO: 42625 - DNA, 864 bp, Zea mays
  Clone ID: MRT4577_138879C.1
cggccgcatcaggcggccgggccggaacatcttagcaaaacaagcgagtccccctccgatttccccgagaaatcgacgcgaaggctctctgcccgtcctcaagatgcagatctttgtgaagaccctcaccggcaagaccatcaccctcgaggtcgagtcgtcggacaccatcgacaatgtcaaggccaaaatccaggacaaggagggcatccctccggaccagcagcgtctcatcttcgctggcaagcagcttgaggatggccgcacccttgctgactacaacatccagaaggagtccaccctccacctggtgctcaggctccgtggtggcatgcagatttttgtgaagaccctcaccggcaagaccatcacccttgaggtcgagtcctcggacactatcgacaacgtcaaggctaagatccaggacaaggagggcatccctccggaccagcagcgtctcatcttcgctggcaagcagctcgaggatggccgcacccttgctgactacaacatccagaaggagtccaccctccacctggtgctcaggctccgtggtggcatgcagatttttgtgaagaccctcaccggcaagaccatcaccctggaggttgagtcctcggacaccatcgacaacgtcaaggcgaagatccaggacaaggagggcatccccccggaccagcagcgtctcatcttcgctggtaagcagcttgaggatggccgcacccctggcggactataacatccagaaggagtccacccttcacctggtgctcaggctcaggggtgggatgcagattttttgtgaagaccctcaccggcaaagacatcacacttgaggtcgagtcctcggacacaattgacatt

SEQ ID NO: 42626 - DNA, 255 bp, Zea mays
  Clone ID: MRT4577_13887C.1
taacaagatggtgaaactcgcattcagaagcgtcagcgactccttcagagcaacattcatcaaggcctacgtggcaaatttgatcatcactctacatttcatcttcatcggcacggggtccagcatctcattcgcgcaactgacgaatggcagcacgctccaccctgcgaatctggtgacgaacacatgggagcacgcgctggcgctgtaggagaacatcatcgtgtgcgtgaacacttcaggcgaacacctgaa

SEQ ID NO: 42627 - DNA, 251 bp, Zea mays
  Clone ID: MRT4577_138880C.1
ccacgcgtccgtctagctgagttggttaggtggtctgagtagcactcctcaggtcttgggttcggctcccagtggaagaagcacaggtgtaaggctcagtcccggtcgtggtcattctcacatgagcttcgatgccgccgtgtatgggtggggcaggggttcaggggattttctcgacctgtgtgagaatgtcttcttcttaatacaatgctcgggggctgtcttaccctcgcaggttgagttttctttaa

SEQ ID NO: 42628 - DNA, 434 bp, Zea mays
  Clone ID: MRT4577_138881C.1
gaaacatacgagataaggacgcataggtaagttaggtggcacgaacaacatgggcggccactatccatctaggcgcgatgaccgcctctagcttgacggacgggcccgctgccgcactggtcatggccagggccgtgacggtgcgcgccctggtggggagggccactgccaccgtgcgacatgagcaacgacgagagcagtgctgcgccgatgcctggtggggccaatgaccacaggaccgcgcctgctcgcgcgcatcgcgacgcgtggctgtcgactctctagcgcaggcggacatcaagagcgtgtgcgactacaagaacttgaagaggatgggcggctacaacaacaaccccaagcgcgacaaagaccatgcggccaagggcggcctcgccacgcagatcgactgggaggagtgcgctaacccagccaag

SEQ ID NO: 42629 - DNA, 344 bp, Zea mays
  Clone ID: MRT4577_138882C.1
gttggggggcgctgcaactgcaaactgcaaatatgcaattgaatgatcgaacatggaaaaggacacaataactgcgcaggccgcaggggaaactcagggaatttttcacaaatccaaggaaagaatcaagagaacagaacaatgaactcgaagctaggatgtgcaatggctaaaaactcaggggctctgctcaatgcgtggccggcgagtccgtgccaccaccgtccgctgctgcgactggcaaacctgcgccgggaacttgcacccgaaccgctttgtgactattgggccccaccttccattcggcggcgggacaaacggggcttccctattcaccggtgccc

SEQ ID NO: 42630 - DNA, 192 bp, Zea mays
  Clone ID: MRT4577_138884C.1
atcaagtcgacttcgcgaggtcgaaatccccaaggcgaggcgttgaaaccctataaccctacatccaccacaaaacggcgcaggcgggagagtgcaagtggactcaggaggcggcgggcgaaatgacagcttcaacgtacaagcaccctacaagggacacccaacttacgagcatcgcaggacgagaccccg

SEQ ID NO: 42631 - DNA, 580 bp, Zea mays
  Clone ID: MRT4577_138885C.1
cgggaggagaggggggagaggccaagaacccagccgcgatcgagggcggcgcccatctgatccggcacctgctgccctgccccaggccccagctcgtctctcaggtcgccttgccgttgccggttccgcgcccggctcagagtcgcgagctcgtctcgcagatccggcttcgcttgcttgaattctgttctttgggagcaaagaggtgctggccggtggcgtggcttggcgagttttttttgcgtccgctcgctctgcctgtagttttcttgctgcggcggcggggtggagatgggggtggcgggggagaagttccagctggggacggtgggggcgctcagcctctcggtggtgtcctccgtctccatcgtcatctgcaacaaggctctcatgagctcccttggcttcaacttcgccactactttgacaagctggcatctcctggttacattctgttctctccatgtggcattatgtatgaagctgcttgagcacaaacctttcgatgcaaggactgtcatgggattcggagtgctcaatggcatatctattggacttcttaacttgagtctgggtttca

SEQ ID NO: 42632 - DNA, 322 bp, Zea mays
  Clone ID: MRT4577_138886C.1
ctagaccattgaccggaccctggtgcccggcgccgagctgcacactgatgtcgaggcgggccacagcgatgacttggtcgaccttatgttgctctgcaacatgtccaggaccgacaactggcacaggcaggatcaccggccaccgtagctcgactgcaagggcacaagcgagggccaggcgacgctgatcagcagttacagtgacggcacaagcagattcagcatgacgccggacgcctgagcaacggtcaagggcatgacccacagcttcatcacggcgcgtgaatgccagctcaaggcaggcacctacggacgactgctc

SEQ ID NO: 42633 - DNA, 2210 bp, Zea mays
  Clone ID: MRT4577_138887C.1
gggtacctcgaggcccggccgggaaaacgggtaatgggctgtcctttcctttcttttgtataaaaaacacccgcctccgtctccatctccggtgagcaggaagagggggagggaggaggccaagagcgcagcggcgaagccatagccaagctcacccgatccagtccctgccgcccccagcgtgccacagccagtcccgcgctcagctcagctcagattcacgagctcgtctcccagatccagcttcgtttggttgaattctcttctttggaagtgctggtgggcggcgtggtttggtgctcttggggccggcgtgtttctgcgttctccgggctatctgcctgtcttgctgcggcctgcggcggcggggtggagatgggggtggccggggagaagttccagctggggacggtgggggcgctcagcctctcggtggtgtcctccgtctccatcgtcatctgcaacaaggctctcatgagctccctccgcttcaactttgccaccactttgacaagctggcatcttctggtcaccttctgttctctccatgtagcattatgtatgaaactctttgagcacaaacctttcgatgcaaggaccgtcatgggattcggagtgctcaatggcatatcgattggacttcttaacttgagtttgggtttcaattctgttggtttctatcagatgacaaagctggctattattccctgtactgttatactggagacccttttcttcaggaagaaatttagtcggaacatcaagctttcccttagtgtgctccttcttggtgttggtgttgcaactataactgatctgcaactcaaccttatgggatctgtattgtccctactggcaatcatcacaacctgcattgctcagatcgtatccttttgattgtacattactcactatttttttatgggcatatctgtcagtatccagaacgatttgcatacaacaaactttgcatttgccactaaagcatcctttaatttgaatattagtgttctgtggcgtataacttgagtccgggccaattatttccatgacaaatacaatacagaagaagtttaaggtatcttcaacacagctcctgtactagtcatgcccataccgggcattgacgttgttccttgtcggtccattcctcgatggatttttgactaaccaaaatgtctttgctttcgactacacaactcaagttctgtttttcatcatgctgtcgtgcctgatttcagtctcggtgaacttcagcacttttctcgtgatcgggaagacgtctcctgtaacctacaaagtacttggccatctgaaaacatgcttggtcctcacctttggctatgtcctgcttcacgacctatttagctggagaaacatacttgggatcctaatcgtggtaattgggatggttctgtacttgtacttctgcactagagagactcagcaaataccagcagaagcctccccgcaagtcgttcaggtatctgtctgctggaactctcggcggtctgaatggtgcttttagcaaggttgccaaggtcggtcatgttgctggctcaagaaccagagaaaagttacaattggttgtatcagatctagcagccaaagtgaatcgtcaagcgattttgtttcaagtaaaaaggcaaacttgttttgcgtgcagctggaactcgtgatgttggtgcatcctgctgattgcaaaagcatgttagatgctttcatagctggctgtgatttccattccaggacaaccatgagcatgtatcagcatattcgtgagactgttgaagaagagaaagtaattcttgagtggcatcctcaacccgatcaagagaaatctcccatgctgttgttgaaggatgcttttggcgctgagaggaggaaagctataagatgctaaatctctccattgcatacgggaaaacgtaggaagggcactgcagctgatgttgctgtgtgcaatgcttgggatagacagaaatactcgtcttaaggagcttggttgggcgctactcatgtgggtagtttatgcataaagttatgctcgtgttcgctgcttaaatgttgcatattttgtttttctctttgaaactgtgaagggcgcaactttttaacgacttctgtaacttgtgtatctagcatctgtattcggtattctaagttaaaatggcaacatttaattatattttacataatttcttttaagg

SEQ ID NO: 42634 - DNA, 284 bp, Zea mays
  Clone ID: MRT4577_138889C.1
ccccccccccgcgcacgggcatttttttctttttccgggacggggtgcacccaaagctgcaggccataagtctccccaggatacccttccagaaaaaaggagaggtgtccctcccttacttgaccgcccgacacccgagtggtagcataatgagatacatccctttttatgctagaaaagaggacgtcgtcgtcctgctagtgcatcaaaaaagaaaaaaaatccaaccctgacctatgatccggttggagacgaaagggggtgagcaaagaatggcttgcacc

SEQ ID NO: 42635 - DNA, 285 bp, Zea mays
  Clone ID: MRT4577_13888C.1
aaaaaaaaaaaaaaaaaaaaaaaaaaaaataaattttgggcagcctatattaagggaacgggattaaaaacacataaatgcaaaaaaaaaattttttttttaggggggcctattttgatttcttttggttgtcgtttctctaccttgtgtctgggaaaacccttttatgtccctaattaatcctcttttgagacatgtcccttttggtagaaagtgttcaaaccaaaaggcccccatctttttccctttccaacattttttcatctttaatttgttatgggatcc

SEQ ID NO: 42636 - DNA, 596 bp, Zea mays
  Clone ID: MRT4577_138890C.1
gcacgagctgtattttaacttgcagtttttctgttatgtagaaccttctgacatcccaccatttcatgcctcatattttgctcagattgcattagagataactccaaattctgacatcacattctgacatctcaccatttcatgcctcaccatttctgacatccttgtttgtaccaacgcatcatgctatacaaatattttttttggtgaatggtgacttatatccttgaactgaaggaaaatttcatcataaatacgtacggagtatactgtataccgctatatttatgcactacaagaataactctaaattggaagaaccataaatcatagtcaaaagctaccatttcaaggatcaaataatactaattcatcagtcaaaacagtcatagtttggccctatcaaattttctgtagttgcacatgtgtagttgcagcttgtatcaatttcagtatatatgccagtgtttcagactatgtatctatttcagttttgtgttctagacatctgtttgtgttccagactatatatcaattttagtttagtatgcagcttgtttcagactatgtagcttgtttcagtatgcaatttgctt

SEQ ID NO: 42637 - DNA, 521 bp, Zea mays
  Clone ID: MRT4577_138891C.1
ctagatttgttttttttaaaaaaaaaaaaaccttgctcgcattacgttcacaggaacaccaaaaccaatcatctctgaccagaaaggtgccaccaaggagacatgtacgaagaaattacccagctctaaaagccttaaaagatgaactgtttttgaaaaaggggggcctattccagcaacaatcaatcctcccctccttctacactgaacagaaatatgtgtccagatccaagcaaggcataactctcttctctgaaccctcacttctcagctcgcttaatcacccttttacgatacctgcatgcaacctgaatactaagtagaagcaatggcctcctcctccagagtattgataccctgatcgctcccctgcatggtgaattacgcagaaattcgagcaaactgcggaggtgactacttacagatcacttgctctgacttcacatgcttcgaaattagttaaacaactcactgtacgtatagcaaccaaccgtatacctagtaatataattttcccacca

SEQ ID NO: 42638 - DNA, 365 bp, Zea mays
  Clone ID: MRT4577_138892C.1
cgcaggaagaaaggattaacttaattgccggcaatgaaaggggaaaagtgtacttgttcgttgaacaatgcgcgcaccggccgggaaggctgtttatattgtggacaaccagtggattaatcggcatgtggggtctgtgcacatgtcagatcttgtcaacgcccgccgggctgtgcgtgtcggacgcgtgtacatttcgccgcggcgccgcgcacgggctgtggggggcccgggcgtctgcggcggcggacacactcagcatgcggaccagcgcgcgcgcggcgcccaggcaccagcagcaggcgcgccgcgggggcaggttcccgtcgctcgtcgtgtgcgccagcgccggcatgaacgtcgtc

SEQ ID NO: 42639 - DNA, 274 bp, Zea mays
  Clone ID: MRT4577_138893C.1
gaaaaaaaaaaccccccccttaaatggggcgggcggtaacaattcaaaaaggtcccttttatatcccccagcggcaattaggcgggatttgggccattcaggggggaaattttttttgggggggggggggggggtaatcccttggcccggacaggtccccgggccgaagggtgccccgggaattaaccacccagtttttgggggggggggccaacaaaacctccggccaaaccacctttattttttgccattcgccccaaccttttgccgggcc

SEQ ID NO: 42640 - DNA, 379 bp, Zea mays
  Clone ID: MRT4577_138894C.1
gggaccctcgaggccggccgggagaggacgaaacctccggccgcatcctgctgatgttgccgaggaccatgtccctagggctcgggcagtctccgtcgacgccctcgtcgtacgtccatgagtttcccgaagtagaagagaccactgacgacgagcacctcatctggctctatctcgaggtcctcggcaaaaatcatctcccacttggtggcgacgatgctgcggaacttgaacgggacgccgcactggcgggcgaagtcgctgagccggcgcccagccccctcggtccgggtagccgagcggaacccaggctgggggaagtcgatgccggtgatcctcacctccggcggcccacccacccgggtggaccaggaaccca

SEQ ID NO: 42641 - DNA, 318 bp, Zea mays
  Clone ID: MRT4577_138895C.1
gtgtgtttttttttttttattttttattttttttttttatttttatttttttctcaaacacgggcccccacaacaatttaagcctccttttgaaaatccccataacatttaaaaaagggggctctcttcctttcaaccaacaatacaaattctcgcccggggggggcggaccacagtgataattgacccgggagacatcccaccttcccaaagcataaaagagggagctcgttggcgaaaaaaaaaaccccccagtgggagccacccctaaaaaaaatcccccaacaccccatggagggggcccaggaaaccaggggc

SEQ ID NO: 42642 - DNA, 169 bp, Zea mays
  Clone ID: MRT4577_138896C.1
tgtcaagcaacgtcaacttcgaagaactgagagaccgctaacacacgcaatgcagcacccaggctgaacgcgtcccagtccctaggagtcgccttcatgctcgccgaaaatcttaggcagcggaggatgcggcgatcgacggtgaaacctgggctcagcggcacatctt

SEQ ID NO: 42643 - DNA, 439 bp, Zea mays
  unsure (1)..(439): unsure at all n locations
  Clone ID: MRT4577_138897C.1
agccaatcaggaaccactcaaaaagtggacagcaggcttcaggaggtccatatgcatggcggtctacggctcgatccatggcatggggagaatgaagcaaactacactggtatatttaaggcatactcacaacagcatacttcggagaactgatgaacgcacttcacttcaggtatgaaaacacgccactgacaaggcttatacgttttcaaacatcacagaagcaactatagcccttgctataataaaaaggccgcatgaaaaaccaagaaactaccaacgatgaaatactactgctgagacacatgntctataagtggtaaagcacatttcaactacagcttccttgggttttgactctgatctctatgcatcagcctagggacatgccaaacatcatgtgtagcggcttattaaagcaggacttgtgcttattcat

SEQ ID NO: 42644 - DNA, 690 bp, Zea mays
  Clone ID: MRT4577_138898C.1
aattcggcacgagggtgcccccatgtcctgacgcggacgcgcggggagcacaccacatgccgacgtgctgtgctgttgcctcatatgatttcggtgtgctccatcatacctgcctctcttcttttttttttcccggtggggagaaaagcgggggcagcgagttgtgcgccttgtgagcttgcagctgttccaggttgcaatgcctgtgctgctcgtgctttagtctaggctgccccctttttcttcccgttcgctttgggaacataaaagattttttctccctttctttgctaatctctctggcgctggcccacttcgcccccctatttttgtggggaatgccggggtgggggcttgtgatttttgagccctcgttctagtgcttggccttttggggagtgttgatgcggcgttatggggcgatggatctgttgtgaaacgcgagctcgtagcactagcactagcttgtccgggaccgggagcctgcgaggtaatttcttggccatggatcctgaaaaggcccctcttctctctctctctctctcttgcacacacacacaggtatccagcgccgggtgtttgctgggctcggtttgtgactggcttggtcgggggggattgcgggtttggggggttttgggggggtggggggctgtgggggctgggggtgttggggggccttgggggggg

SEQ ID NO: 42645 - DNA, 290 bp, Zea mays
  Clone ID: MRT4577_138899C.1
ggaaaaaaaaaggggctttcagttgagtttacatttactaacaatgggttttttagaatttacaaaaagcttcaatggggggtttaccagggcaagaaacaaaccctaaaaagattttttgagaaaccgggtgatgatgtttgtaacacgatgatggctgccatgaaatccgatttaattgttggctaacacgggttggaaaaacccccgatgaatttatttggacccgacacccttttaggaggcaatttttttattggtgcccaaacctttttttttggtaccggtat

SEQ ID NO: 42646 - DNA, 2107 bp, Zea mays
  Clone ID: MRT4577_13889C.1
cacaaactgaaccagcgcaaaaagaatcggcagcatgccttcacaaacccttcatcatttacatacgagaggcgcttctttaggccttttgagtatgctctgcagcctccaccttggtacagagatgaacatatagctttggataagcctgagcttcctcctggtgtatcaaagatgactgaatatgatggaccacagtgtttcataattcctggaaatcatgactggtttgatgggcttcatacttttatgagatatatatgtcataaaagctggttaggtggatggtttctgcctcagaagaagagttattttgcattgcatcttcccaagggttggtggatatttggtcttgatttatctctccatggcgatgttgatgtgtaccaattcaagttctttgctgatgtttgtcagaataaggttggagagaatgattctgtgattgtagtaacacatgagccaaactggcttcttgattggtactggaatgagactacaggcaagaatgtatcacatttaattcaggaatacctgaaaggaagatgtaaacttcgcatggcaggggatttacaccattttatgaggcactctgccactcgatcagaaaaaaataattttgtgcaacacttgcttgttaatggatgtggtggtgcctttttgcacccaacacatgttttcagaaactttgagaggttctctggaaccacctatgaatgcaaggcagcttatccatcctatgatgagtctactgggattgcattgggtaacatattgaagttccgcaaaaagaattggcagtttgacatcattggcggttttatatacttcattttggtgttttcaatgttcccacagtgtaatcttgttcgtatcttaaatgaagaaacttggtctgggcgtctgaaaagcttctcaggcacaatatggagtgctttgctttatatttttgagcactcttatgtctcttcagtaggaagtcttactttattgacggcgtcatattcattcgtaccatccaaactatcaaggaggagaagagctattataggcggcctccatgttttggcccatttaactgcagcactacttttaatgttgctgctggagttgggcattgaaatttgtattcgtaaccatttattggcaacttcaggttatcacactctgtatgaatggtatcgatccatggaaagtgagcattttccagatcctactggtcttcgtgctcgtttggagcaatggactctgggactgtatccagcatgtataaaatatcttatggcagcctttgacgtccctgaggtcatggctgtgacaagaataaatatatgcaagaacggaatgatgtctctttcgcggagtgttctgatcatgtactacacttctgtgtttatctatttctggattttctcgactccagttgtttctctcatatttggtagttacctatacatctgcatcaattggttccacatacactttgatgaagccttctcgtcgctgcgcatcgcaaactacaaatccttcacaaggttccatgttaagaaggatggtgatctagaaatatttactcttgcagttgacaaggtcccaaaggactggaagttggatccgaggtgggaatcagagggacgagggcctcatcagctcagccatgaccggaagcatccaagcaagtggaggtcagcctcatcaactgaccctgtgagatctgtacgggttgttgatcatttcaccatcgaaagaacaagaaccccagatatggagccctcttcctgattgtgcagcccttactattataaggagttgctactgctgctagaaaaattaacaataactagcttcaacacacagtattgtttttgtttccacatccagccaataggtggaccgaggtgatctgcccttgtcggcgtccccgctttactgacctcacctgcagcattgtaatctgtatagaaagaaaattcacctgctgcctattgcttgtattcaatcaaaggaactctaaaaaaaagagtgttacagaagaatgttttgagaaagcaaagggatgaatcgattcatcatcatttactaaagattgattctattctgttttacc

SEQ ID NO: 42647 - DNA, 813 bp, Zea mays
  unsure (1)..(813): unsure at all n locations
  Clone ID: MRT4577_1388C.1
ttcgcccatggaagacagtgctgggaagcacgacgccctcaaacatgggaagcggcgcccaggggcgtcgccgtcggcaaaggncttgcccaaaaaaaccctagcacaatgccaagtgagggccccgggacaaaagcaagctacctccgccgccgccctgacgcacaaacnccgcagccgccgccggggccattgctgcccacttgttgttgccacacaccaccaccgggggagccaaatccgacggccatagccctaaactaggcctcgccgcacccacgaggaggccacagcacacctcacctcctccgctcctcactgtcgcaccgccatggggacctcgcccgccggcactccacaaccggcatcggcctcagggacggcaaatccggccacccgacctccagatctgactgccgccccaaggccaacctgctgcggccaccgaccgccccgacctgggccactggcagcggctagctccatgccgcaccacgacccacgaacagaggcagctccgacgctggcatggcccatagcccacggagcacgtgcgccaccggatctggttccaagcgcggcggccaagccaagcaggggacgcggggggcgaggtccgtggccatggccccgccgctgccatcctcgcatctgcacggactcccggtggtctgctctggcgacggcgaggttggaggaagcgacgggtgttgtggtggtggcggagtcgccgcccgtgtcgcccgcggagtgagcaacgcggggccgttttgtgtccgtcatttaattcccggccggcctcgaggtacccaa

SEQ ID NO: 42648 - DNA, 272 bp, Zea mays
  Clone ID: MRT4577_138900C.1
aacccgggctgatctaaggtttccacggaaggggaaaaaactggggacgatacagacgcaaaaaaaaaaaaattcaggagtttttggaaaaaaacttttactgaccatggggatgggggaaaaaaaaacttttttttacggggggggggggatgatacagggaaaccaagatcaggtggatatgccattggcggtttgttacattacaccaccaggccccatgttcaggtgcccccaatccaagcctggaaaccggggaaaaaaccttattt

SEQ ID NO: 42649 - DNA, 214 bp, Zea mays
  Clone ID: MRT4577_138901C.1
aggagacatgggtgcaaacagaggaaaaacagggcccgagtagatgaaggaaggacgttctgtcaaacagggcgtgtgtgatcatctacatgacatctttcacgccgccaccaagaatatacatggcggatgggacctctgctgcatccagcacgggatacacatcaaaggatcccaaggcatctatacaacagctggagcagacaatgatact

SEQ ID NO: 42650 - DNA, 348 bp, Zea mays
  Clone ID: MRT4577_138902C.1
ttccacttcaactacctgagatatttttaaaacttcgcaaacccctacctaacctaaattttcactatcttcttatacaatttcctacaccacctcttcttctacaccatttacttctaatacttcctctcctttccttatatcctacttctacatatcctcatctcatcattaaaacattcatacatacatcactcaatattttacaataccatcaatttaattaatcaaataatatttaacttaacacacaataatataaattcctttcattctacattatccaaacttacttactctttcttactacatcataactctattatacactcacctaaattcaattta

SEQ ID NO: 42651 - DNA, 1868 bp, Zea mays
  Clone ID: MRT4577_138903C.1
tcgaggccggccgggagcagtgtgcccgtcgccttttccgggtccccccgcgcccgccgggacgtcacgcccaccaaatcccgaatcccaccaccgccttctatcgcccccaccccggctcccagatcgcggcggcacacataatggccgcctcgccgtcgctgcacgccgtggcgcaccgggggccctccctgaccgccctcctcttcctcgtcgccgcgatggtgttggttccccctgcggcggccgagatccgggagaccgcaatccgggccgacccgcggagcatcatcccgctggacgagttcggcttctcccactcgggcgtgctggagctcaacgtctccggcatcgccttcgacccgcaggcctccgcggagctggacctctcccagctcggcttcttcctctccacgctcgacgcctgggtccacgtcctccgccagctccaggacctcgacgtcacctgcgcgctccagtccgagctcgtcaagctcgccttctctttcgaccgcctccgcccgccctccaaccctgccggcgtcgaggtcgctcgctcctcctccttctccaccgccttccgcgtctccgagcccggccagtacacgctcgtcttcgctaactgcctcggcggcggcctcaaggttgacatggacgtccgctccgccatgtacaacgtcgacccggcaaccggggagcgccagtacctctccgcgggggcctccgcgctgccctccttctacttcctcttctgcctcgcctacgctggcctcgccgctgcctgggtcgccatcctcctccgcaagcgggccgccgtattccggatccactacttcatgctcgccgtgctcgtgctcaaggcgctcaacctcctcgccgaggccgaggacaagtcatgcatcgagcgcaccggcaccgcccacggctgggacgtgctattctacatcttcagcttcctcaaggggatctcgctcttcacgctcatagtgctcatcggcaccggctggtccttcctcaagccctacctggccgaccgagagaagaaggtgcttatggtggtcatccccctgcaggtcgtagctaacatcgcgcaggtggtgattgacgaatctggaccctatgcccgggactgggtcacctggaagcagattttcttgctggttgatgtggtctgctgctgtgctgtgctcttcccgattgtgtggtccattaagaacctccgggaggctgctcgcttggacgggaaggctgcggtgaacctcatgaagctcaccctcttccgccagtactatgtggtggtcatctgctacatttacttcacgcgtgtcgtggtgtatgccctacagaccatcacctcgtaccggtacctgtggactagcgtcgtggccggggagcttgtgacgctcgcgttctatgtctttactgggtacaagttccggcctgaggtgcataacccatactttgccattgacgatgaggaagaggaggctgcagctgagacgctaaagttgaatgatgaattcgagctatgaggggttaggaattggaatcgactccatggcagttttaatattggtgttgtatgccccccagcacaggacaagtggcataaactggtatctagtccgtatccttttgtttctccttttgagttggctacacttggtcttactgtaattgggtatggacaagaatcctgtgtgtgttcagcaatacagcttggctttgccttaaattttgtacccaatcactgagatgagcagattcggttctagatgttcactttgtttacacacttaaaagtgatcttatgacactgaatgtacttctgcctaaaaaaaaaaaaaaaaaaaaaacccccccaacac

SEQ ID NO: 42652 - DNA, 226 bp, Zea mays
  Clone ID: MRT4577_138904C.1
tctgtttcgaattgtagctctactactcttttttggatagatacgccttcttcgacgggaggataggacatcataagtggtaggccgacgcgaggaagacctacaacctgatggacaccgtcagccggcacaagaaccaaatgtacgcgacttcattgaccgaaatcatgctgaacttcgacaacgcggtcatgtggatcttgcattccaacatctgggaaccgta

SEQ ID NO: 42653 - DNA, 273 bp, Zea mays
  Clone ID: MRT4577_138905C.1
ggaatccataactgacctaagcaatgtgagaaaacatgaaaatgaaactctaggtcagtctctttttcaaatatgaataaaggaatcctccatgagaaattaacaataagacttagtaatgcatttaaaaaatagtacttcctgaccaagtagggtttatctcaatattgaaaggttagtttacttttagaatttatcagtaaatgtgtcatattggcatattaaaaaagaaaatgggattatatataaggatgatgttactagttataaaaa

SEQ ID NO: 42654 - DNA, 440 bp, Zea mays
  Clone ID: MRT4577_138906C.1
cgacgcttgatgctcctagcagcggtctcctttttttttttttcgggccaccaacgatgagaccaaggtctggaatcatgctcacgagccaaagtagtactcagctggaggtatttgcatgagaaaagtaattgagtgagcagcaaaactctaaccttcagtcactacacatacttgagcaggaaagcgatacgctttataagcacttaattcttgaagagcggaacattaccaaagtgggaacctagctcaaaggcctaaagttcgcctatcctataccacttgacgggctcgggggactcgagagcctactcatccctatgccttatactggacacttagctgcaacttcttgctgtccaaaaatgagaaaatgagccaaataatcattgatgtgatgacaacaaactgcaacattggaaccaatcagatcaataagt

SEQ ID NO: 42655 - DNA, 627 bp, Zea mays
  Clone ID: MRT4577_138907C.1
cattgggtacctcgaggccggccgggatccgcttttcatctcgcctcgacgagcctctgtaaagttcttagctgcctccccgtccgcgctccctgtacgtctctcgtgcccagaggctgaatagggtttcaaagaggcacattggtgccacgcaagctaaccaaaccactgttctcttataaggctcggtgaccagttctacctgtcctccatcatctctgaaagtgtagcccggcccggaacatatgcccatctgtctcatcttatgcaagaggagatttgaacacaaggaactacatgacccaaagactttggggaccttacaatgtctgttatcggaggcatcaatgtcccagagatgcacaccccgctctgtgctaatgctcttgctgagaaaggagccaagaactacatgattgatatcatgatagggggcgagtgaccctgcatgtcttcatagactgctgctgcatcacatcgagcgtgacgaagctgcttattcacaaccaaaatgatatgatttacgccatggtaggctatcaccagacgcaccaaggcattgctgactgattcaaacgtaccatttccgattgaggtttctcttccttgaggagggataacactgct

SEQ ID NO: 42656 - DNA, 129 bp, Zea mays
  Clone ID: MRT4577_138908C.1
cccacgcgtccgaaaccgtgcgctaaaccaaccagttgacactgttgatgatatatttcagcataaaccatatccctccctggattcaacctcatcccggtcaacaccatgccttgatggttccttctc

SEQ ID NO: 42657 - DNA, 651 bp, Zea mays
  Clone ID: MRT4577_138909C.1
atgtgcacgcgcagaccgttcggccaccaggcacggaccgtccggctcattaggcaggtacgacagacagtacgtccattaaagaggtggaggccaaaggccgttgaagtaaatcaaacggccacgaagataggaaacaagacaacaatgttacaggtctctgcaggtacggcagacagtacgtccattaaggccagatcgtctgtggatgacacggaccgtccgacctccgagtccggaccgtccgctctgcgcgaggacacctccaatgacgcgccaactcctatggaggaggacgacctgctgagaaaggacttggtcgactacggagctacgccagaacactcagatattggattcatgctaagcaatgtgtaccttctacgttacagcaaatgttgctataatggtgttgcggatggtccggccttcaagaccgaacggttcgcagccacacagagaccacctaatccctctgagggaggcataatagaggaattcatggatctcgacaaattaggacaggagtttacatcggctgatccttcggaggagttcgacataggagatggtaaaactccgaggccgacttttgtaaacaagaccctggagaccgatcttagagatgaaatgatcggtctattaaagtaa

SEQ ID NO: 42658 - DNA, 535 bp, Zea mays
  unsure (1)..(535): unsure at all n locations
  Clone ID: MRT4577_13890C.1
atgacagcacactctcctctccagctttcgctctccgtgttccttgcacctggtacctatccccaatctgcaacaccgccggtggaggtccggtctcgtctccaaactgcactgcctcgctnnnnnnnnnnnnnnnnnnnnnnnnnnnnnnnnnnnnnnnnnnnnnnnnnnnnnnnnnnnnnnnnnnnnnnnnnnnnnnnnnnnnnnnnnnnnnnnnnnnnnnnnnnnnggnnnnnngnngggnngggttagccgccggtngaagcacaaagttccgcccgttcgtcgtgccccggctagtcgatcgctcgcctttgtttntcgtgttgcccggcacccccagtcctccgtgtccagcgtcagaagtcccttgcctcacantcaagaacatcatcgtcgcgccatcgntgcatgcctctagnctcttnntagcgcatcaccgttctccaaaacttccgtgtctttgcatttgtggaaatttgccgtcgtcacggcgtcaccgtggtattgataatagtgatgaccatgccaaccg

SEQ ID NO: 42659 - DNA, 220 bp, Zea mays
  Clone ID: MRT4577_138910C.1
ttttatattttatacattttagttttattttgctcgtgcaacattttcaattataattagctagcatcaagaggaatgggcaaacctgcaatcaacaaaagccacattcttcctgaaacacccaatcccgtaatatgtttcaacaagggcaaaacccttcaagccaggaaaaattctaaaaccaaaaaaggggggtttttcacaacccgacgggtaaaaa

SEQ ID NO: 42660 - DNA, 270 bp, Zea mays
  unsure (1)..(270): unsure at all n locations
  Clone ID: MRT4577_138911C.1
gaagtttccctcaggatagctggaactcgtaacgaacggttttatcgggtaaagcgaatgattagaggtcctggagttgaaacaacttcaacctattctcaaactttaaataggtaagancccgagggttgctcgaacttttcttgaaccctcggcgcgaacggagagttcttagtgggccatttttggtaagcagaactggcgatgcgggatgaaccgaacgtcgagttaaggtgccggaatacacgctcatcggacaccataaaaggc

SEQ ID NO: 42661 - DNA, 442 bp, Zea mays
  Clone ID: MRT4577_138912C.1
tgctccttcaacatctcgtctctctcatcgggcgacgccatccgctcccggcccggccgagccgcgcgttgtgtatggattccaaaagcaatcatacaggggctatggcgaggccttacaaacctaagaatatcctcattacaggagctgctggttttatcgcctcccatgtcgcaatccgcattaccaagaagtaccccgattacaagattatcgtccttgacaaacttgactactgctctaatctgaagaacctgcttcctagaacattgataccataatgcacttcgcggcccagacacatgtcgacaattcatttgggaattctttcgaatttaccaagaacaatatttatggacacatgtactttttaggcctgcagattagtggccagataagagggtcatccatgtagcactgtgagggctatgggagactgaca

SEQ ID NO: 42662 - DNA, 267 bp, Zea mays
  Clone ID: MRT4577_138913C.1
ctctatccgagacagatagcgaccataaaagattaacagtaggcttatagagtaccaggctaacccactgaaccgacgccaagtaaccccctatagcctgtgtaactcttagaaaactgcagaaacctacatgattgaaggactacttgcaagatgcgctcctactgcaaatggttttataagggcaggttggtcttgatcatggatgatccagatgggtcagagaggagatgcctgacaaggttcatttgcattttgatttggggc

SEQ ID NO: 42663 - DNA, 366 bp, Zea mays
  Clone ID: MRT4577_138914C.1
aacaagtttactcactattgccatttctttacgctaataagtccactctcaaagcgtcgttcacctaactacttaccgtcctctaatacataaaacctactcaattaatctgcaatactactttacctacaatacaatcttaaccagctaacttattgatcaaatatcaccaattactcaaactcatccattaaaattcccaattttctactgaaacatactatgatctgtatataaaccacataacattcactactataatctcctgtatgatttctaactactgaattacatataaatcactaactaatctactctatcttaccaatactctcttaacatttctcttctgatttaacattacat

SEQ ID NO: 42664 - DNA, 713 bp, Zea mays
  unsure (1)..(713): unsure at all n locations
  Clone ID: MRT4577_138915C.1
cctcgaggccggccgggtataagcctcacatgtcttcaatgccgctggtgtgactggaaggcccaatgttgattggtgtgaatcgcacaagccggacaccatccgtaccaatgttgtgggcaccttgaatctagcagatgtatgtaggaagcatggcttattgatgatgaactatgccactgggtgcatatttgaatacgatgcacatcatcctgaagggtcaggtatcggcttcaaagaggaagatacaccaaattttactggttcgttctactcgaagacgaaggcaatggtaagtcggtaaatgcttgttacccttgcaactgttacttttgtctcaactcctaagttgacatatttcatgtttcgaatagtgaaagaaacaagtggctattctttcttgaaaaatgcaggtcgaggagttattgaaggagtatgagaacgtctgcactctgcgagttcggatgccgatatcctctgacctcagcaacccgcggaacttcgtgacaaagatcagccgttacaacaaggtggtgaacatccccaacagcatgacgatattggacgaactcctgcccatctcagtggagatggcgaagaggaacctgcggngcatctataacttcaccaaccccggcgtcgtcagccacaacgagatcctagagatgtacaagcagtacatcgaccctagcttcaagtggacaaacttcacc

SEQ ID NO: 42665 - DNA, 699 bp, Zea mays
  Clone ID: MRT4577_138916C.1
tcagaggccggccgggatgcccggcctgtttcaaccggccgcggaaaggctcccgatatccttgttatcacaccactcaaccatgataaacattacaaagccacaaaactggacccgcggtgattacctggtctcaacagaccctgctcttctccaggttgatgccatcaatgctgcgctgagctcggacatggtctggtgggccggagaccttccggccgatgcactctgggatgcccttcggagttcaatatgttttggtctttatcgtaaaagatcttcagaaatgaatggcaccgggccgacagttgaatacaagattgaggagtgggagcaggttggattggtcagaatgatcacagacggggtcacatttggatacctaaccgatgtgtacattctgccagagcatcaaggaggtggacgtggtcgctggatgcttcagattttaaacgaggctttgcagggttggcctcatcttagacgagtgatgcttctgacaactgataagatgcatctttttgggaagaatttggggatgaaggactacagggagtttgacggcatgaagggtgtttctattgctatggttgagggtcctggagcacagcattgatgtttgtatgtagaagcgatttggatgaagctatcaagatatctgttatttatcacaaaaaaaaaaaaaaaaaacccgcggcc

SEQ ID NO: 42666 - DNA, 2490 bp, Zea mays
  Clone ID: MRT4577_138917C.1
gggacacgagcacgcaccaaccctctctctgaaaaaccacgcaccaaacccaacaccgctggaccgtgcattccgcctacccctcctccctgccacctccgcttgcatttattaaccacctcccctccccagcgacatctcgtgtctctgttgggagctccttcaacatctcgtctctctcatcctccgacgccatccgctcccggcccggccgagccgcgcgttgtgtatgtcactttgctcttacaacaggattccaaaagcaatcatacaggggctatggcgaggccttacaaacctaagaatatcctcattacaggagctgctggttttatcgcctcccatgtcgcaatccgcattaccaagaagtaccccgattacaagattatcgtccttgacaaacttgactactgctctaatctgaagaacctgcttcctgtgagctcatcaccaaacttcaagtttgtgaagggtgatattgcaagtgttgatcttgtcaacttccttcttgtcacagagaacattgataccataatgcacttcgcggcccagacacatgtcgacaattcatttgggaattctttcgaatttaccaagaacaatatttatggtacacatgtacttcttgaggcctgcaggattagtggccagatcaagaggttcatccatgtcagcactgatgaggtctatggggagactgacgaggatgcagttgttggcaaccatgaagcatcacagctgcttcctacaaacccatatgcagccaccaaagcgggagcggagatgcttgtaatggcatatgggagatcctatggactgccagttatcactactcggggaaacaatgtctatggcccaaatcagttccctgagaagcttatcccaaagttcattctcttggccatgagaggggagcccctccctatccatggtgatggagtcaatgttcgtagctacctctattgtgaggatgttgcggaggcatttgaggtcattcttcatcatggagaagttggacatgtttataatattggaacaaaaagggagaggacagtgcttgatgtggcaaaagatgtttgcagactcttcaatcttgaacctgacaaagtcatcatgtttgtcgagaacagaccttttaatgaccagaggtatttcttggacgatgagaagctcaagagccttggatgggctgagcgcaccccatgggaagaaggcttaaaaaagacaatggagtggtatgtagcaaattctgattattggggtgatgtttctggggccttactgcctcatccaaggacattgatgatgccagggtgcgaggggtctgaggagattaaaggaatactcagccggtttaataacattcaaacaaaggtcggttcaacatcagataatgctccagaaccgcatgccttcaagttcttgatatatggcaggacaggatggatcggcggacttcttgggaaaatatgtgagaagaaaggaattccatatgaatatggaaatggccgcttgcaagagcgttcttcactcgtcctagacatccaaactattaagccaacacatgtcttcaatgccgctggtgtgactggaaggcccaatgttgattggtgtgaatcgcacaagccggacaccatccgtaccaatgttgtgggcaccttgaatctagcagatgtatgtaggaagcatggcttattgatgatgaactatgccactgggtgcatatttgaatacgatgcacatcatcctgaagggtcaggtatcggcttcaaagaggaagatacaccaaattttactggttcgttctactcgaagacgaaggcaatggtcgaggagttattgaaggagtatgagaacgtctgcactctgcgagttcggatgccgatatcctctgacctcagcaacccgcggaacttcgtgacaaagatcagccgttacaacaaggtggtgaacatccccaacagcatgacgatattggacgaactcctgcccatctcagtggagatggcgaagaggaacctgcggggcatctataacttcaccaaccccggcgtcgtcagccacaacgagatcctagagatgtacaagcagtacatcgaccctagcttcaagtggacaaacttcaccctcgaggagcaggcgaaggtcatcgttgctccgcgaagcaacaacgagatggacgcaaccaagctgaagaacgagttccccgagctgctgtcgatcaaggactcgttgatcaagtacgtctttgagcccaacagaaaggtgcccacagactgaagcccgaagggctggcacagctgataccgtacaacacagcaaccattagtgttagactatgtgtgtgggccagcactactttacttttgggctgtcggtctattagggttagagtcctgtgagtctatatattgtacctcatctcttatacaatacatttttgggctgtgagtctaaaaaaaaaaaaaaaaaagcccctcgtgcgggggg

SEQ ID NO: 42667 - DNA, 245 bp, Zea mays
  Clone ID: MRT4577_138918C.1
gtatctgcctgtctccaactaatctagtccagaaactaatccacaccaactggacgacggtgcgttgcgttggtggccgccggcgacgatgtcgtcgtccgcgggcgacaagaggaagaatatggtgtgtgtgaccggagggcaacggctacctcgttttcgcgctcctccagctggtgctgctaggccgctgccacgtccgtgctagggctccgcccctggatcgttgacctcctcccgctcct

SEQ ID NO: 42668 - DNA, 397 bp, Zea mays
  Clone ID: MRT4577_138919C.1
attcggctcgaggttcccaccctgaatgcctgaccagctaggatcagcggaagcagggggggttatgagcgaatcgagcgggttgaagagctgaaacgccgtgcgcgtgcccagaccgatggcagccgtcttacctgaccggccgactggcgcacgcctgcgccaacaccaccacctatggccgcgtcaccatgaccgtggagaggatgcccgggcagacactccctgccaacctcgacgggtccactcccgggtactataacttctatacgatctgccacgcgaccatgccggagaactatgaggcggttcaagagtcataagtgtaccactgtcgttgggacatgcttgacttctcaggatcctggtgaaggaagctatcggcctgtgcaacaag

SEQ ID NO: 42669 - DNA, 1925 bp, Zea mays
  Clone ID: MRT4577_13891C.1
catattgaagttccgcaaaaagaattggcagtttgacatcattggcggttttatatacttcattttggtgttttcaatgttcccacaggttagttacagattctcaaaatggacattttattttaaagtttatcctttgtcgcacgtttaaaatagtagtaactgtggaggttagttactaataataatcttgagcctcagttttcctcttttcttattttttttctgaaatcaatacccggaagcattggaagactctgactctctgccacctttagcaaatttattcccagatttgtaaactaagtattatttgcacctttcttgcttctgttggctgacctctgttatggatttatttttatttgcttattgctgtcttttctttttgaagagtgttactaattactgttaatcttgaagtatgttcgttgaccaaaagttagccgcctggtactggacatgtcatattctttataccagcctcagagaatactttgcatcacataaattatccgttaccctttatggtctcttgatttgtattcatgttgctactatcacttggaagatcaagttgaccaacatgtcgatttgtattcatattcttgatttatttctatttgttccagtgtaatcttgttcgtatcttaaatgaagaaacttggtctgggcgtctgaaaagcttctcaggcacaatatggagtgctttgctttatatttttgagcactcttatgtctcttcagtaggaagtcttactttattgacggcgtcatattcattcgtaccatccaaactatcaaggaggagaagagctattataggcggcctccatgttttggcccatttaactgcagcactacttttaatgttgctgctggagttgggcattgaaatttgtattcgtaaccatttattggcaacttcaggttatcacactctgtatgaatggtatcgatccatggaaagtgagcattttccagatcctactggtcttcgtgctcgtttggagcaatggactctgggactgtatccagcatgtataaaatatcttatggcagcctttgacgtccctgaggtcatggctgtgacaagaataaatatatgcaagaacggaatgatgtctctttcgcggagtgttctgatcatgtactacacttctgtgtttatctatttctggattttctcgactccagttgtttctctcatatttggtagttacctatacatctgcgtcaattggttccacatacactttgatgaagccttctcgtcgctgcgcatcgcaaactacaaatccttcacaaggttccatgttaagaaggatggtgatctagaaatatttactcttgcagttgacaaggtaacagaccagccttcattccgttgctcccatctgctcataactctgccgcctttgctctgctgtgaataaacaggtcccaaaggactggaagttggatccgaggtgggaatcagagggacgagggcctcatcagctcagccatgaccggaagcatccaagcaagtggaggtcagcctcatcaactgaccctgtgagatctgtacgggttgttgatcatttcaccatcgaaagaacaagaaccccagatatggagccctcttcttgattgtgcagcccttactattacaaggagttgctactgctgctagaaaaattaacaataactagcttcaacacacagtattgtttttgtttccacatccagccaacttaggtggaccgaggtgatctgcccttgtcggcgtccccgctttactgacctcacctgcagcattgtaatctgtatagaaagaaaattcacctgctgcctattgcttgtattcaatcaaaggaactctaaaaaaagagtgttacagaagaatgttttgagaaagcaaagggatgcatcgattcatcatc

SEQ ID NO: 42670 - DNA, 547 bp, Zea mays
  Clone ID: MRT4577_138920C.1
cgcctgcatgtaccgggctgctattacagggtcgacctcagcgttcgtgaaaataagcaaactacttgggaatggcttgcctatattttgaggactttgacataatgagcactgaccgctttttatggattgatggtttacagatcataaaaattaataacctggatatgtagacatttgaagttaatattacaaacacacaaagccttgtgaaaggggaactatgacatggtatagctcaaatagatgtaattcacaaaagaaaatctgccctgttaactcctgtatgatatttctgtcgctcaaaacgctggggtctaagcggctctagtatgcgaattctttatcaagcaagaggatccaatggaagcactctcttcgctcttcttgaaagaatatcgcatgctgagactacctagaccgacgcataataacaaacgatatatcacaacactgctcagggttgaatcatttacagtaagacataaaattgagcgttaaatctgaaatccacactttccaaaagcctttatcggtcggtaatatt

SEQ ID NO: 42671 - DNA, 780 bp, Zea mays
  Clone ID: MRT4577_138921C.1
tttccttttcggacggcagccgacgacacttccggcgggcggcggcgaaagattctccttctcccgcgccgccgggaccctatcgactcgctcctgctctccttgtcgtttcatttctctcggcatttaggtttgtgcacgcaaattggggtttcccatggttccatggacgtctgagagctacaatgccgaatacgtagctcatccttgctttcattttggataagcccatagatgcttattttaaaccttgttttttttctgcttctgaagtttcccttttgcatcctagtctcagaatccctggatctgctgcaggtttcaaactaattttgcatgctcaggtaggatgaatgaatgtcaccgaacttttcggtttgataaatcattattcgctgacatgtttgcgtctttgggaactactgcaggtgttgatttactgaaaaatgtccatgtgcaagcaatcgtcgggccacagacatctactcaagctaaatttcttacagagcttgggaacaagacatcagttccaatcatttccttttctgcaaacagcccgtcccggtcatccagccagaccccatatttcatcaggacagcatggaacgactcctgccaagctgaagctattgcctcacttgtccagaaatacaattggagggaagtcattcctatcatcgaggacgatgattcccacactagatttatccctgatctcgttgatgccctgggacatgtcgatactcgtgttccgtacaggtgcaagatccatccttctgc

SEQ ID NO: 42672 - DNA, 1066 bp, Zea mays
  Clone ID: MRT4577_138922C.1
tgcaagcgctctctcctctcacacacagagtcacactacactccccggatttcagcagctagctctcggtctaagcaggcattaaaaccctatccttttcaggtcactctcgccttttcttttccgttctccgttcactcctatttccggtcgtttgcacgcttgcctcttgagtcttgacacgagctcccacacgtacactgcataaataggcgagcagcgggagagagacgaccgacgaggacgaagaggaattaagccagagcgatcgaggtggtgtagtgtagcttccgagcgaagctcctaccgttgccgccggccggagatatgtcgtcgggcggccgacgtggcaggatcagcgacgacgagatcaacgagctgatctccaagctccaggctctcctcccggaatcctcacgccgccggaacgcgagccgggtatgtagcgcgtgtacacagaacggagctagctcagtccactacttcggtctatctctactcttccccaaaatgcgcaccgtacgtatctctcccgcagagtgcgcgtcggtgcagcgaattaaagcctgacgatcgacgacgacatggattatccatagcttgcgtctcttcttgcttgccctgctgatgcatgccggccatgtgatgtatctctgcagtcgtcggcgtcgaagcttctgaaggagacgtgcgcctacgtcaagagcctgcaccgggaggtggacgacctctcggagcggctgtcggggctcatggagaccatggacaacgacagcccccaggccgagatcatccggagcctcctccggtgactccagagtccaggttccagccatgccgcttgccgccccggtcgtccggcgcgcgcggccctcttatgctgcctgccatctagctagctgccgcagccagcgcaggtgcactgaagaaggagaagacgacgacgtacggccgagcttgcttgttcgctcgtttatttgctacggcgacgaccttaattgtgttcctttgtttttaatttgttctcctccttcgggtgcgtgtttgttcccgtgttggattggtt

SEQ ID NO: 42673 - DNA, 216 bp, Zea mays
  Clone ID: MRT4577_138923C.1
attcggctcgagggcagattgctatcgagcggtttttcaacgggtcgggcaggatgatcagcccggccaggtttttgaatgtcttgagggcaatgttagatgcaaggataatgagcgcctggtgcactacgcagctcgacttttaagacctaactgagataactgggggcatcatcgaaccctcctaacatagtgaactcatgtgaactttacaga

SEQ ID NO: 42674 - DNA, 862 bp, Zea mays
  unsure (1)..(862): unsure at all n locations
  Clone ID: MRT4577_138924C.1
atgggtacccttgtggtcccggccggnaaaaaacacagcaaacccccaatctcgtgtctcctcccctttcgagcctgtcgttgtctcaatagctcaatcctcattccttcaggcttcagggttctcaatgatcggcggcactgcccttaccaccacacgccgcctccgtcttctgtgaaagatcaagaattcgccgccgtctcagctgatcttcgcgcgtgcagtctacctgttcgacgagatgcctacgaaggtcacaaagccgtgggtgccggttaactggaccggggaagcatcgtcatcacgcgggcactcggtaggaggtgggggactcgaactcgagcccgccgctgaccgcctcagcgcgctgcccgacgcgctcctccaccacgtcatgtcgttcatgaaggcgtgggacgcggtacgcacgtgcgtgctctcgcggcggtggcgcgacctctgggcctctgcgccctgtgtggacgtccgtgtggggaggtatagcgaaccgccccaggacttttccaagttcgtgtaccggctgctgcttgctagggaggcccttgcgccgataaacactctcaggctgcggtcaccaactgattacgacgaggatttcgacaattctgatggttaagatgtggatccgccatgcaatcagactgaatgcttgcgctattcagctaactggtcatcccaatttgtctgcggagcttgattctatagacttggtctctcaccacctcaaaatcttgaaactggcctatactttagtgcttgatagcttcaccagacagcttctcgtcccggtgcccttctttggaggactagagctcaaggactggtttggtagagtgccgcg

SEQ ID NO: 42675 - DNA, 744 bp, Zea mays
  Clone ID: MRT4577_138925C.1
gccggggccttttctttttcgttctccgttcactcctatttccggccgtttgcacgcttgcctcttgagtcttgacacgagctcccacacgtacactgcataaataggcgagcagcgggagagagacgaccgacgaggacgaagaggaattaagccagagcgatcgagacctgactgtgagcaagcaagcaagctcctaccgttgccgccggccggagatatgtcgtcgggcggccgacgtggcaggatcagcgacgacgagatcaacgagctgatctccaagctccaggctctcctcccggaatcctcacgccgccggaacgcgagccggtcgtcggcgtcgaagcttctgaaggagacgtgcgcctacgtcaagagcctgcaccgggaggtggacgacctctcggagcggctgtcggggctcatggcgaccatggacaacgacagcccccaggccgagatcatccggagcctcctccggtgactccaggtccaggttccagccatgcatgccgcttgccgccccggtcgtccgccggcgcgcgcggccctcttctgctgcctgccatctagctagctgccgcagccagcgcaggtgcactgaagaaggagaagacgacgacgtacggccgagcttgcttgttcgctcgtttatttgctacggcgacgaccttaattgtgttcctttgtttttaatttgttctcctccttcgggtgcgtgtttgtttccgtgttggattggtt

SEQ ID NO: 42676 - DNA, 355 bp, Zea mays
  Clone ID: MRT4577_138926C.1
atcaactcagcttataagtgacatacaaatgaacttacttctaaagagcctaaaaaacacatgccaaggtcacgatttcttgaggtggaatggcccagagattgtccttgggccatacacccttgcaggaaactggctgaacagtaacccttcattaggcactggtcggtcacaaacaatgacgggccggcggccaagatttttcagggggatatagagctaatagtgtgttggacacaccaacggcctttccagccctaccagttgatttgatgtggtgaacacagcacgggaggccccaatcatgacagcgcaccatcgagagctctgatcttgttgagcctctgaaggcacc

SEQ ID NO: 42677 - DNA, 467 bp, Zea mays
  Clone ID: MRT4577_138927C.1
ggccggccgggcataaaataattctatattatacaataagaggatattaatacctcgtaaataaatgatcatgtatattgaaattggttttttaagaagaatacaaacaaaattacatcaaaaaaaaaccacaccaccattccgagcacattaaacttccctgtgcttgctcgctcattcttgcccccatggcactgctcttctcacaagatatggacatgtccaccgccgccgcgggcctccaatataaaaaccacggtgcgcgatcatcatacgactacacctcctcctacagcgttcacattctccgccggcttcccccgcgcccgagatgggttcaccgtcggtaccggcaaggcagaaaacgtatctcaagaaatagatcacaaccgggtaagaggtacataagaaaactaaaaggggtaaaaggctataccatacgtaaggcaatggaaaggccctgaaca

SEQ ID NO: 42678 - DNA, 271 bp, Zea mays
  Clone ID: MRT4577_138928C.1
gcccggaatttattttccgggtcgacgagccatttatttcggaggccgccctttctttttttttttggttattttttataaccaaaaatggtcaccaaggtcaggattgtgcgaaactcttttccggtatcgattgaggggcccaacttcatcccaactaccctttaggttaaaaggactccatatgtccgaccctagaagtcgtcgtcacacttgttttatatttgtatgcttaaatcgatgatgttgaatctattcacatatacataac

SEQ ID NO: 42679 - DNA, 641 bp, Zea mays
  unsure (1)..(641): unsure at all n locations
  Clone ID: MRT4577_138929C.1
gccgtccgggtacactcctctcgtctccgtctccatctccgtctccgtctcccaccgtgccgtagctgctgctgtccgtgtccctcgcctcgaagaagacaactccaacactgttgctgcgtgactgctgaatcgctccacacacgcgcgaacccagcaaggcaagaacacgaacgagagagagagagagagagacagggagggatcatccatccatcagaccatcacccatggacaaccttaaggaggtaagacgggccagcgacctctgccccccctgaacaaccctttccttgctaggctcggccacgggtccctgctgcgagcgcgatccgtgcttgcgttcgtccttctcactagctcatcagtcatcacaccgtgcgctggtgcgtgcagcagcggggccacgatgccgcgggcgccaacagcggcgtctggatgacggtgccggcgttcggggactgggacacgaagaacggcgcgctgccggactactccatggacttctccaagatccgcgagatgcgcaagcagaacaagaaggagctctcccgcgccagcctcggcggcgacgacgacctnttngnccacgcccacgcccacgcncagaagccgcaggccaacagcgcccagcccaagct

SEQ ID NO: 42680 - DNA, 369 bp, Zea mays
  Clone ID: MRT4577_13892C.1
acatacataggtttcttctactacacgacgacgaacatggggaagcctgcgaagatcggagagtggggtggatacgccggcgatcgtggggaggggagggctactccggaccgggtgatcgaggtgaaggtcaaggaggacagaaacagatgaatccgctccatctccttcatctacatcggagccgatggtaaaccgtacgaggaggggccatggggtttcggacacgctggcacggagtacaagattgatctgcgcaggttcgacgagagtttgacggatatctcggggaccaggggtcgaggctgcaacattgacaatttggtaaagtgtctacaaatttttcaccaacaaactcgcttacggacc

SEQ ID NO: 42681 - DNA, 1293 bp, Zea mays
  Clone ID: MRT4577_138930C.1
attcggctcgggaacggatagaagacagacgtttgcaggaagattagcggctaaggctgcccactgccatctcggaaccagctggattcgcatttttctttccagtttctgcggtgtcggcctcgtccgcccctatctatcccctatatagccgtgcaggtcgtcttcttcctcctctccactcctctcgtcttcgtctccatctccgtctccgtctccacaccgtgccgtagctgctgctgtccgtgtccctcgcctcgaagaagacaactccaacactgttgccgcgtgactgctgaattcgctccgcacacgcgcgaacccagcaaggcaagaacacgaacgagagagagagagagacagggaggggtcatccatccatcagaccatcacccatggacaaccttaaggagcagcggggccacgatgccgcgggcgccaacagcggcgtctggatgacggtgccggcgttcggggactgggacaccaagaacggcgcgctgccggactactccatggacttctccaagatccgcgagatgcgcaagcagaacaagaaggagctctcccgcgccagcctcggcggcgacgacgacctcctcgcccacgctcacgcccagaagccgcaggccaacagcgcccagcccaagctcggccgcccctgccccgccgccgaccgccgaccgctccacgcccgcgaccactccccaacgggagggaagaagttcctgagctacttccagtgctgtatcaaggcctgaagaggagctgccgcaatgctatgtctgtgtgcctgtgctttgtcgcagcagaacactcgtgagcaattaggtcccggctttgttaagtatccaaaaatgtgcaatgtatttgccctgatggtcactcgtttgacctgttagcctgtatgaagaacaagtcaggttatggggccaggccgccaggcagccgtctatctgtacatggcaccatcgatttgtttgcgactggtggtataatgttgccctgtaatcattgtattggatgggaatttgcaccgcctccgtatttttgaacgatctaaagcatgtctgcgtagttaaagtgtgtgatcctggcccccctgccctgcctggggggggggggggacccccctggccccccgcctcctgggccggggggtccggggaaaagggttgggtccggtggaggaggggggggcctgggggggggcctttttggttggggttgggtgcccctggggtggtggtttggccgttgggccctcctggttttccaaaaaaaaaaaaaaaa

SEQ ID NO: 42682 - DNA, 390 bp, Zea mays
  unsure (1)..(390): unsure at all n locations
  Clone ID: MRT4577_138931C.1
cggacgcgtgggcggacgcgtgggcggacgcgtggggtcgctgctcgtcctgcctagctgacggtccggccagcatcacctcctgctcgcggcctcgcccagctccctccaccctccagtgagacgcagatctcctgctcgcggcctcgcccagctccctccaccctccggtgagacgcagatcttggtgcgacggggcactacggaggcagggtagtgcggttgtgcgtgtgttggtggcctggttctagcaaccgagaatgttcagagatgaattagagagagatggcatgcctaacattgaaagaacattgcgacaaggattccagactnggttcagaacccatatnctcagaatgcggaatataaatcaaggagaggctgatgatg

SEQ ID NO: 42683 - DNA, 914 bp, Zea mays
  Clone ID: MRT4577_138932C.1
attgggtgcctcgcatttttctggcagtttctgccgtgtcagcctcgtccgcccctatctatcccctatatagccgtgcaggtcgtcttcttcctcctctccactcctctcgtctccgtctccatctccgtctccgtctccacaccgtgccgtagctgctgctgtccgtgtccctcgcctcgaagaagacaactccaacactgttgctgcgtgactgctgaatcgctccacacacgcgcgaacccagcaaggcaagaacacgaacgagagagagagagagagagacagggagggatcatccatccatcagaccatcacccatggacaaccttaaggagcagcggggccacgatgccgcgggcgccaacagcggcgtctggatgacggtgccggcgttcggggactgggacacgaagaacggcgcgctgccggactactccatggacttctccaagatccgcgagatgcgcaagcagaacaagaaggagctctcccgcgccagcctcggcggcgacgacgacctcttcgcccacgcccacgcccacgcccagaagccgcaggccaacagcgcccagcccaagctcggccgcccctgccccgccgccgaccgccgaccgctccacgcccgcgaccactccccaacgggagggaagaagttcctgagctacttccagtgctgtatcaaggcctgaagaggagctgccgcaatgctatgtctgtgtgcctgtgctttgtcgcagcagaacactcgtgagcaattaggtcccggctttgttaagtatccaaaaatgtgcaatgtatttgccctgttggtcactcgttgggcctgttagcttgtatgaagaaacaattcaggttatggggggcaggcagctttttctatttgtacatggcaccatcgatttgtttgcgac

SEQ ID NO: 42684 - DNA, 1102 bp, Zea mays
  Clone ID: MRT4577_138933C.1
ttctccgtctccgtctccacaccgtgccgtagctgctgctgtccgtgtccctcgcctcgaagaagacaactccaacactgttgccgcgtgactgctgaattcgctccacacacacgcgcgaacccagcaaggcaagaacacgaacgagagagagagagagagaggcagggaggggtcatccatccatcagaccatcacccatggacaaccttaaggaggtaagacgggccagcgacctctgccccccctgaacaaccctttccttgctaggctcggccacgggtccctgctgcgagcgcgatccgtgcttgcgttcgtccttccttctcactagctcctcatcactccgtgcgctggtgcgtgcgtgcgtgcgtgcagcagcggggccacgatgccgcgggcgccaacagcggcgtctggatgacggtgccggcgttcggggactgggacaccaagaacggcgcgctgccggactactccatggacttctccaagatccgcgagatgcgcaagcagaacaagaaggagctctcccgcgccagcctcggcagcgacgacgacctcctcgcccacgcccacgcccacgcccagaagccgcaggccaacagcgcccagcccaagctcggccgcccctgccccgccgccgaccgccgaccgctccacgcccgcgaccactccccaacgggagggaagaagttcctgagctacttccagtgctgtatcaaggcctgaagaggagctgccgcaatgctatgtctgtgtgcctgtgctttgtcgcagcagaacactcgtgagcaactaggtcccggctttgttaagtatccaaaaaatgtgcaatgtatttgccctgatggtcactcgttgggcctgttagcctgtatgaagaacaagtcagtttatgggggtaggcagcggtctatctgtacatggcaccatcgatttgtttgcgactggtggtacaatgttgccctgtaatcattgtattggatgggaatttgcaccgcctccgtatttttgaacgatcacaaggggcatggttcgtttggattggttttgtaattacttatgatgggaaaatacggaaacaacaaatgacccctgc

SEQ ID NO: 42685 - DNA, 145 bp, Zea mays
  unsure (1)..(145): unsure at all n locations
  Clone ID: MRT4577_138934C.1
anncnnttttcttnnnnnnaaanaaggnagaacggggggggcagttgagggancgcacggaagacggacagacaccnagnnagaacgnncgaaacaaanacagaaancgaaagagcaannggccacaaaacagaggcccaaggac

SEQ ID NO: 42686 - DNA, 315 bp, Zea mays
  Clone ID: MRT4577_138935C.1
gacaatctcgcaggaacgcggcctaagctttttttttttttttgttttttctattttgtgcgtcatatacattaggcgtggcgatctattcattgaaaacacaaaactttattaaaaccatgcttttaatattggtcttaccacacatgaaaaagtgtgtcgtgtgggcggggggggtcatatatggtatgaccagagatgtatgcaggggattaataaagttttggttttaatgaatgggtgggtcggttgaggtgtatcctggggggttgaagcggacctaggtcgagaaaaagctgtgggtgggttcgtgag

SEQ ID NO: 42687 - DNA, 992 bp, Zea mays
  unsure (1)..(992): unsure at all n locations
  Clone ID: MRT4577_138936C.1
ctccctcctctcgtcttcgtctccatctccgtctccgtctccacaccgtgccgtagctgctgctgtccgtgtccctcgcctcgaagaagacaactccaacactgttgccgcgtgactgctgaattcgctccgcacacgcgcgaacccagcaaggcaagaacacgaacgagagagagagagagacagggaggggtcatccatccatcagaccatcacccatggacaaccttaaggaggtaagacgggccagcgacctctgccccccccctgaacaaccctttccttgctaggctcggccacgggtccctgctgcgagcgcgatccgtgcttgcgttcgtccttccttctcactagctcctcatcacaccgtgcgctggtgcgtgcgtgcgtgcagcagcggggccacgatgccgcgggcgccaacagcggcgtctggatgacggtgccggcgttcggggactgggacaccaagaacggcgcgctgccggactactccatggacttctccaagatccgcgagatgcgcaagcagaacaagaaggagctctcccgcgccagcctcggcggcgacgacgacctcctcgcccacgctcacgcccagaagccgcaggccaacagcgcccagcccaagctcggccgcccctgccccgccgccgaccgccgaccgctccacgcccgcgaccactccccaacgggagggaagaagttcctgagctacttccagtgctgtatcaaggcctgaagaggagctgccgcaatgctatgtctgtgtgcctgtgctttgtcgcagcagaacactcgtgagcaattaggtcccggctttgttaagtatccaaaaatgtgcaatgtatttgccctgatggtcactcgtttgacctgttagcctgtatgaagaacaagtcaggttatggggccaggccgccaggcagccgtctatctgtacatggcaccatcgatttgtttgcgactanaaaaaaaaaaaaaaagcggcc

SEQ ID NO: 42688 - DNA, 354 bp, Zea mays
  Clone ID: MRT4577_138937C.1
ggaagagggacaggttgttgtcatgaatcatttatttaaccaccacggcacaccattgcctggcatacatgatacatgcgtgtgtgtcaataacaggtgatgcttacagtaggagcagacacaggaccacgtcctcacgggccacaacacggagggtcgaggggaataggccatgggggaatcggggtcacataggcactggctgactccgcacaggagagacatacacacggaggatgttcagattcatggtgcgataccaggttcgaaagagcaggatcctgacattaaggttatgagcaggaaacataggggggatgggtctgtgccgaccatagctctcatatgggagga

SEQ ID NO: 42689 - DNA, 930 bp, Zea mays
  Clone ID: MRT4577_138938C.1
ggtaccctcgggctcggccgggactcctctcgtctccgtctccgtctccgtctccacaccgtgccgtagctgctgctgtccgtgtccctcgcctcgaagaagacaactccaacactgttgccgcgtgactgctgaattcgctccacacacacgcgcgaacccagcaaggcaagaacacgaacgagagagagagagagagagagaggcagggaggggtcatccatccatcagaccatcacccatggacaaccttaaggagcagcggggccacgatgccgcgggcgccaacagcggtgtctggatgacggtgccggcgttcggggactgggacacgaagaacggcgcgctgccggactactccatggacttctccaagatccgcgagatgcgcaagcagaacaagaaggagctctcccgcgccagcctcggcggcgacgacgacctcctcgcccacgcccacgcccacgcccagaagccgcaggccaacagcgcccagcccaagctcggccgcccctgccccgccgccgaccgccgaccgctccacgctcgcgaccactccccaacgggagggaagaagttcctgagctacttccagtgctgtatcaaggcctgaagaggagctgccgcaatgctatgtctgtgtgcctgtgctttgtcgcagcagaacactcgtgagcaattaggtcccggctttgttaagtatccaaaaaatgtgcaatgtatttgccctgatggtcccccgttgggcctgttagcctgtataaaaaacaagtcagtttatgggggtaggcaccggtctatctgtacatggccccatcgatttgtttgcgactggtgggacaatgttgccctgtaatcattgtattggatgggaatttgccccccccccgtatttttgaacgatcccaaggggcatggttcgtttggatt

SEQ ID NO: 42690 - DNA, 775 bp, Zea mays
  Clone ID: MRT4577_138939C.1
cacgaggcggcgtggtgatcgacggcgtggcgtaccggctccggcagatgcactggcacgcgccgagcgagcacgccatcaacgggcgcaggtacgccctggagctgcagatggtgcaccagagcgacaccaacaggtacgccgtggtctcgcagctctacaggatctcgcggcggcgtcctgacaggaccattcacaggctggagcggtacatccggaggatcgcgaggaggaagaaccacgaggagctcatcgacgaggaggtggacccgcggcggccggtgagccggagcacggcctactacaagtacacgggctccttcacgacaccgccctgcacggagggcgtgacgtgggtagtggcgcaccagacacggcgggtgacgcggcgccaggtcaggctgctgcggaacgccgtccacgacggcaccaggagcaacaggaggccactccaggaagccaacggcagggccatcaccttctactacacctcgccggcgcacggccgaggggcgaacggggactagcacgcattgcaaggagacggccggcggaatcttggcgtccccgtgctccttttctgtccaggcgacacaggccatggccaagcaaactcttgcatgtgatcgatgtccgacagtgttaggtcagagtgcagaccaatttttttttctctccagcgatcatcaattcgttgcggagtaatgctgtagtgcgattgcatatttgcattggcaagtgagtttgtgccaaaaaaaaggacatcaaattagta

SEQ ID NO: 42691 - DNA, 338 bp, Zea mays
  Clone ID: MRT4577_13893C.1
tctgtttagccacacccggtgtggttccggcggcgatgtttttggacggacctggccagctcaacctagactaggccccgtcatggggctgccgcagggttgactgatccgagaagctcgagctcatcggcgagggcacttacggtcaagtgttcatggcgaaggtgacggcccccaccgatatcgtcgcgctaaaaaatattcgtatggacaacgagcgggaagggttcccgatcaccgacatacgtcggatggacactcatcagaggctacaccaccagaacgctatctagctagaggagatcgtcacctccccaggcccagatcggtacaagcaa

SEQ ID NO: 42692 - DNA, 211 bp, Zea mays
  Clone ID: MRT4577_138940C.1
tttttagctgcattcatttccacaccgacggtttctagtttattgaggagaggtgaataaatgtacaaaacgtgtcgggatcatgtacataccatgctcacctactgcaatgcgggttttaatttttaaaaaaaataataactacagacttggctacaggctacagccctactcttaggcaggaggatccacccatcgcccatggccctag

SEQ ID NO: 42693 - DNA, 436 bp, Zea mays
  Clone ID: MRT4577_138941C.1
gggttggggggggttaaaaaaatttttttttttttttgttttttttttttttttttttttttttttttttttttttttttttttttttttttttttttttttaaccccagcccaaaaggggggggggttcatggtttttggcaacaaaaggggttgcgggggggcttccatggggggcgggaaaacccaactctaagcaaggaacaaacgaatttccctaatcggcgacttccacgtttaacccccggtggggaaccaacaaaaaaaaattcagggccgcccccgccccgcaataaaaggggcaaatatgaaccggctgcaaaagaattcccccatagaggcccattaccggagcagctacagcccacattatagcctggccaggggggatccccaagagccggggaagcaagcctttccacaggggtcgcagccc

SEQ ID NO: 42694 - DNA, 225 bp, Zea mays
  Clone ID: MRT4577_138942C.1
gtccggagtgtcgtgacgttctccctcgtcacgccattcagtcgaggacaagcaccacaatgacgagcaccaactgcgaggatgcttgctttgcatgggcgtctctgcctgcctggacgctaggtacctcatccctggacttcgtctccatgatgtagtacctggtgctgcacccctcgataacgctcttctacctgaaggacatgaacctgctcatgcccatct

SEQ ID NO: 42695 - DNA, 938 bp, Zea mays
  Clone ID: MRT4577_138943C.1
ccgcagaagctcggccttcccgtcggcaggcacgtgtacgtgtgcgcgtcgataggcggcaagctctgcatgcgcgcgtacacgcccacgagccccgtcgacgaggtcggccacttcgatctcctcatcaagatatacttcaaggacgaggaccccaagtaccccaacggcgggctcatgtcgcagtacctggactccctgccgctgggcgcgactattgacatcaagggtccgcataggcacatcgagtacaccggccgccgccgcttcgtggtgaacggcaagcagcgtcacgcgcgcaggctcgccatgatccaggccggcagagggaccacgcccgacgacgacacggagcaggccgtgctgagggaccagcccgacgacgacacggagatgcacctcgtgtacgcgaaccgaacggaccacgacatgctcctaagggaggagatcgaccgcgcttggctgccgcgcacccggcgcctcaaggtgtggtacgtggtcagcaaggtcccggaggacgggtgggagtacggcgtggggagagtggacgagcatgtcatgagggagcacctgcctctgggagacagcgagaccattgcgctcgtgtgcgggccgccggcgatgatcgagtgcacagtgcgcccgggcctggagaagatggggtacgacctcgacaaggcttgtctcgtgttctgagctctgaatagcggctaacggatgtcgtcaaggtgcaactgtacatagaaattctgtggtgccttgaatcttgaaccctagtaacgtgtcgatctagctagaactctaccgagttctcttgtaatactagcgatttaaactggccatggaagttcatactagctggtgccatggccgtcttgtcaagatgagatgtattggtcctactatatacagcgcaataaaaaccccaaggccattgt

SEQ ID NO: 42696 - DNA, 235 bp, Zea mays
  Clone ID: MRT4577_138944C.1
tcacatacaaccaaacaccccccaaagatatagtgggccgtgcagtactagtgatttgttatgtagggtagcggacggtttcagtaacaagcggttaagtatagggtaaggctaagcgtacaataagcgaactagtacgcttaaattcaacccagcaataaataaataactgcaaatcgttaggaaggactactagttagtggcggaggtgtacctatttggtggctttttgttc

SEQ ID NO: 42697 - DNA, 667 bp, Zea mays
  Clone ID: MRT4577_138945C.1
cggcgagcgcggcttcgcgcgcaggctcgccatgatcgccggcgggacgggcatcacgccggtgtaccaggtgatccaggccgtgctgagggaccagcccgacgacgacacggagatgcacctcgtgtacgcgaaccgaacggaggacgacatgctcctgcgggaggagatcgaccgcttggctgccgcgcacccggcgcgcctcaaggtgtggtacgtggtcagcaaggtggcgcgaccggaggacgggtgggagtacggcgtggggagagtggacgagcatgtcatgagggagcacctgcctctgggagacagcgagaccattgcgctcgtgtgcgggccgccggcgatgatcgagtgcacagtgcgcccgggcctggagaagatggggtacgacctcgacaaggcttgtctcgtgttctgagctgaatagcggctaacggatgtcgtcaaggtgcaactgtacatagaaattctgtggtgccttgaatctagctagaactctaccgagttctcttgtaatactagcgatttaaactggccatggaagttcatactagctggtgccatggccgtcttgtcaagatgagatgtattggtcctactatatacagcgcaataaaaccccatggccattgcaattgcttggtgagattcactctctact

SEQ ID NO: 42698 - DNA, 466 bp, Zea mays
  unsure (1)..(466): unsure at all n locations
  Clone ID: MRT4577_138946C.1
cacgcagcttacgnacacgangaccacaccggggcgcgacgggcagcaccacggcgacaagcgcaccgngacacgagcagccncccgaaacagcgacggacacggcgcaggcgacnngagcnncgggnccacggcggggccncggnncgccgncgccccgccgcgcccnngggcgccgccgccggagggggcgggcgncnncgngcagccaccagacganccgncgacgnngancangcngnggggaccgcccggcgaggggcccgnngccggcnncgcngcggcaccggaagggcnaccgngagcgnncgcnggcagcgcgncgggccggccgcncgcgaggcaggncggccngcaagcggccggcggccagcagggggcgcgcaacnacggggaggcgccgcggacgaaccacgcggcgcacgcgcaggaggccgagggcgcgcggggcgagacgcagcgggag

SEQ ID NO: 42699 - DNA, 274 bp, Zea mays
  Clone ID: MRT4577_138947C.1
gatcggcaaccagaacaagtgaggagacgcggcggctgagttccactgccaggcagccaggtggtgacgggagataacgcgggaggccgctccacgaagccggaccgcgatcgctgatccgcaacgtgcgtgcccaccaccaccacgccatagtgaacgccgctgctgacgagggcgggcgctacggagagaccctgcagtacgcgaactacacggacaacttacagggaatgccacacaacaccacgatatccgagacgctaggcccaatcca

SEQ ID NO: 42700 - DNA, 307 bp, Zea mays
  Clone ID: MRT4577_138948C.1
cgcgaccgggaacgcgttgtttgggctgcgtactgagggctttccagggggtttgtctttgcccggtttggcgtctgtgtctgcgtgtcgcgtgtgatgtcgtacatgcatggtggggattgctcggcgaggggggttctggcggggtgtggggctcccagtggcttctgaggcgcttctgggtcggcggtggttgtggttgtcgacggtgattcatctctggtaactgtcgatcttgctgggcttgtgtcggggctagctccgccggccaccattggctcggtcgagcacctcatgcccacgatgg

SEQ ID NO: 42701 - DNA, 1005 bp, Zea mays
  Clone ID: MRT4577_138949C.1
aattcagaagagcttccaagcttggttttatacctggtcacatgtgcagaactcatttttctagtgatgttggtccagttctagccaataagcctactattgaagggctagatgaattttgtgcttgcagttgctccacttttacacaacgatcatcattatgttctcgggaatacgtcttgcagtcttcctgtgactcatgtcccattaatggactgcactgcagaagttgtatgggacatgcagcagatagcttaacaaaacactctctgtttgatcctcttaatacaaaagaacgaggttcttgttgcaatggaagatgctgctactctgtagtcccaaaatgtttgtctagttgtgactttacaaaacactgtgatgtcataattgaccaaataggtcatgctgcacctaaagataaccatcagctgcaaatgcctaccagatgctgcacactgggggagaatgagaagttaatatgccaatgcttaagcaataaaatagctgtaagaaacttgcctcaaacttctcattgtaaagatgtctctgagaaagtaatgaaccagccttctattgctataacggagagactggagaatgtatcagaaccttcagtggctgatgacagttcatccaaagctgtagcagagaaaaaggatgcttatagagattctgcagtatctaaaggacagccaaattttggtttctcatctgggtcgtccagcattatagtgacaaagttccagaaatcacctgaatttaacaatgtatcctctactgctaaacatagcaaacataaaaatctgtgtgatgaaggatcaagaattgagaaaagttcagcatccagctatgtgcctaccagtacaggatgtgaagaacccctaaatagttctgccaaatctgagctgggtccatcaagagtgaagcgcaaatgtaatcagatttctgagggaaggagactggaagaaacagataatgaggaacattgttctgaactgctaaaaa

SEQ ID NO: 42702 - DNA, 208 bp, Zea mays
  Clone ID: MRT4577_13894C.1
tcccggctcgacccacgcgttcggagaaaataagagaagataagacgaaagcacttcttgcgttgaaagctgatgacaggggaggggaagttcacaaagatcctcgttctatgcagccactttcaaaccagaaaggaaattcttaaattctcattaagcttggttcttaccaggattacaagaatggaaattcttaaccttattaacc

SEQ ID NO: 42703 - DNA, 360 bp, Zea mays
  unsure (1)..(360): unsure at all n locations
  Clone ID: MRT4577_138950C.1
gcggcaacaagcgacagtaaggggctctactaattacaccaggttgctgcgcaaactcacaggactgctgcttctggctagagacattcacgtccatgagcggcctataactgcccggggctcgagcactacagtcggtacgtgtacctgaggcctgcgagggtacctctgcgcggcgtcatgctgtccgtcggcttctggacgggtcacacacgggacagagggcggcgacacatgcacatgccactgagactgagatcttgatggcgctccaggccacaccacgatagacctttanctgctacaaccgtggcccacgcattcgtttcaaatgtgtacaagactcactcggatgtaaaa

SEQ ID NO: 42704 - DNA, 641 bp, Zea mays
  Clone ID: MRT4577_138951C.1
ggccgcttttttttttttttttttctttttttttaacatttcaaaaatggagctatattttctttattcagtatggaattgacatttggtatacataataagtgatgaccattattacacaaacagcacaagtgcacaaaacaaagagatataccatcatccagacatatggcaacaacaacccaacatgtatacatagatagtgcatatatatattatatgtgtacgtaccctagcatgcaagctttgctacgacgtactagaaatgtatagagcgaaggctgctcatggcttaacttcttggctcccaacgtcatggccacttcccggcatgtttccagggctgctccagctatcatactcgggccgtggtatcgcatggtgattgtcgaccgacgtcccctccgccgtcgtcgtccccgccttcaccttgtgcaccaataattccaccttgtgatgtgccgcactgcaagcgacgttcagcatcatcattgcaaggaacaacagaggaaggagcttcgtcatggtgaatgaaagaaactggccagtggcgtgtagctaggaaggtgatgatcggtagaggccggcggcgcaacaagattattgagaacgccgcacacggcctatgacccacccggccg

SEQ ID NO: 42705 - DNA, 693 bp, Zea mays
  unsure (1)..(693): unsure at all n locations
  Clone ID: MRT4577_138952C.1
gggtacctcgaggccggccgggactgtagtctctagcgaacgagacagagccagcccccgcgtggtcctccgctcgggcgacacgggaggcccctcccccagccctagcgccgccactctctcctcctctatttccccctcgtcgtcgccggaggagactgccgaaggccggcgcgaccggcggcggagcgtttctccggcatttcttcttcgtttgccctcccggtgttcagatttgagcgggttctatgtcgggcggctcaagttccagccgcggggttactggggcgggtgcagtcccccgcgccgtcgtcttccttgtctccggcgtcgtcgggggctgtgctcggcggttcaacatctggtcctacaggtgcagccaggcgatggattggcggcatctgctggtggtggcggggctgcaccgtttcggcggtagacgcacggcgtggtgggtctagagctggccggcggacggctcctcgtggtgttgggtttgtggcgtgtgggccggatctgccctgaacagctggcgctggcggccggtggcggctgcgtcgatggtggtttgnggctcgagcaggcgctgtggtgcggcgctctcttctttgccaccctcccctcccctcacggncttgtctactgctgtgggcggggcgtcagccgtgcgacggtgaggagcggaggatctga

SEQ ID NO: 42706 - DNA, 1439 bp, Zea mays
  Clone ID: MRT4577_138953C.1
gtcgcggtgagccccacggaggaacgggctacccaaactcgccggattcctacctgtcccggccaacccacctcgccgaaccactccaccaaccacgaacctgaaaccctagccacgcccatgagcgacgacgcgaccgccgccgcgccctcttcgccgtcgacctccccttccccatcctctgcttcctcatcaggcgcctccccgtcgccttcctccccgcgcaccaagcgccgccgcaccgaccggtacgctctcggtttcgagttcgccccgcgactcgcgccctacgaactccctgaggaaccgctccccgacaagcacaagcgctcctggcccaactggacggagcgctccaccttggctctcctcgacgcctggggcgacagcttcgtccgcgcggggcgcagcatcatccgcgccgacgagtggctcgaggtcgcccgcctcgtgtgcgccgccgtgggccgtcccgcggggtatttctctgatgcgcagtgccgcaaccgagtggacacgcttaggaagaagtttaagaaggagagggagagagcgcgccgtgccgcgcgccgctccggtccctccccttccaaatgggtttattacgacaagatggtggcaattctgtgcccgaccccgcctccgctgccgaccctgcctccgcctgcccgtccccctccgctgcctctccagttgctgcctctggtcgcaaagcgccgccgcgacaggcagccagcgcggcgctttcagtgggggatgaaagctcctgagcgtcttcttggtggtgccggagacgtcgtaggtcccagggtttcagggtcaggtgcgaagttgggtgaacttggaccgcagaaaaatagtgctgttcaagggaagcggaatggtttcatggccctcacagagtcaattcagaagtttgaggaggcttttgcgaggatggagagtagcaagaggcagcacatggtgaaggtggagcaaatgaggagggatttgcaaagggacctagatgcaaagtggagggagatattggagaaggcgcaagcggagattggtcgccttagtaatgaggatggggatgaacatgatgtggacgaagatggggatgttggcgatggtaagagattggagggtggtgatgagcaaaacaatggtgctatggatgcttctccttagcatatagcctagatgcttacaaaatgaggaacaaaattggggttatcatgtcgatagatgaatccacatgatagacatgtggttatgattaactccgtagctgctgatattagtattattgtataattctcatatgtgtttctttttttttactccgcaatgctaagcaaaagattactgctattttggttactgtacatagctatttgcttaccgacgtgtgttttcaagataataatatcattggtcaaaaaaaaaaaaaaaaa

SEQ ID NO: 42707 - DNA, 681 bp, Zea mays
  Clone ID: MRT4577_138954C.1
aattcggcacgagggttcaccccacttgctctctttctccccagtagcaacgaccgcgcgtcctccgccgccgcactaaaccctactccatgtacccaggtctgcgtcgggcccttgccggcgatgagaacccgtcaggaacaggagagccagcccccgcgtcgtcctccgctcgggcgacacgggaggccccccagccctagcgccgccactctctcctcctctattccccctcgccgtcgccggaggagactgccgaaggccggcgcgaaggatggcggcggcggggcgtctctccggcatttctccttcgtttgctctctcggtgttcagatctgagcgggtttgtgtcgggcggctcaagttccagccgcggggttactggggcgggcgcagtcccccgcgccgtcgtcttccttgtccccggcgtcgtcgggggctgtgctcggcggttcaacatttggtcctgcaggtgcagccaggtgatggattggcggcatctgctggtggtggcggggctgcgccgtttcggcggcggacgcacggcgtggggggtctagagctggctggcgggcgtgctcctcatggtgttgggtttgtgacgtaggaacgaatctagcctggacagatgaaactggagggcggggaggggtgggggggtggggggggggggctgggggc

SEQ ID NO: 42708 - DNA, 802 bp, Zea mays
  Clone ID: MRT4577_138955C.1
ctagagagggcgcgctctttttttttttattttttttttcagaacaaaaggcttctttgggccaatacaggacctggccatttgaccacacagtaaaattaggggtgctgcctcactacaggcattggccgcttttttttttttttttttggagcttagatgcagatttcactcataatagtccacatagtgacaacaaacaacatgatacaactccgaccaatatgggcaacctatcaatatcagaatcacaccaacaatattgaatccagcattacatagttcaatagagattcttaatacgcctcgcctactgtcttggattataggatcatcacggttttgttccctctaatccttcagctgccaacctttcgtttgtgattctgactcccatatacctgccgagcatcatgacggttgcctgcgggttggttcctggcgaggcgttgaaagtggagccgtcaatgacgcgcagcgcgtcgatgccgagcactcggtattcagcgtcgacgaccctgccgacctggcagccaccgtggtagtgccagatggtcatgacggtgtccttgcagaacatctcaagcgacgtggagtcgttgtcgtgccggggcagcaggttgacggggaaccccgtcgacatgttgagcagcgtctccatggagaagtcggggtacgtgaagttcttgaaggcctgggagtggatgacgcgctcgatgaccgacaagccggccacgcagcggcggaggtcctcggggtgcgagaagtagtgaacgcccggccggcctcgaggtacccaatg

SEQ ID NO: 42709 - DNA, 350 bp, Zea mays
  Clone ID: MRT4577_138956C.1
gccggccggttttcttatcaaagattccaaagagccctcaagttatacgaaggactacaatctggtactgaatagcacttagatatcgaactcaacaccgcacgactaagtcgcatcctctccttgaaggatggagcttagctcctcggtctctatatgatatatataatctgtatggttaaaatctgtcgtgactgacactttaatctgctgagaactgatgaactcgacttggttatcaacttgcatgataatcgcctggaaggtagaaacatatcacactatctatctagggcgtgtgaactacgacagaattctaacaaaaaataaggtcccaagggtcacaacca

SEQ ID NO: 42710 - DNA, 433 bp, Zea mays
  Clone ID: MRT4577_138957C.1
accccgatgtcactcctctccttctcgctactacactccctttttattctttttccagggacgcacgcaagcgcgggggctgccgggaaagcggacagcgccatgacgccgacccctatcttctacgtccacgaggcggacgtcgcccatatccaccactttctcgaggagtgcttcctctgctccaaatatgtctcacgcgacatcttcatgatcaggcgtgacacaaccaatctggaccgacgagttctaggagcacacacatacaggcgcacagggccaaccacctacgtaagaaacacgcggaggtacacgcacttgactgacccaccatgtagcaccggcaccatgagaaaatgctgcagcaccaccaccaacagcactaaccgcacacgcggcatgccggcatggacaccacacacccgagggtcga

SEQ ID NO: 42711 - DNA, 355 bp, Zea mays
  Clone ID: MRT4577_138958C.1
aaccaaaaaaaacacatatagactaagggcatacacataccacagggaactaagaacaaactcgcgagaaactaacaagcacagtatgactgagtagatggcacagcaacatctaattactcaagttctgcagtcggcgtcttaacaaaacaaaaacaacagtcttgcatgacgatatagtcaccttctttaaaatctgaaactccagactgcgatgaactgcccctctggtcctttgacacacagttcttcatggtgatcagaaacgcattgcggcgcttgagatagtcacaacagcgcaaccagcttagcacgaagaccgaccaagatacaaactcaccaaagaccaacgaga

SEQ ID NO: 42712 - DNA, 340 bp, Zea mays
  Clone ID: MRT4577_138959C.1
accagctccctgatgaccattgagagcgcagaacttttcttgtcggcaccacaagcgggctgctcgtcgcactcttcgcgaacgccttggtgccaccttctcctcccatcccaatcaactgagagcactcttttgcaggtctccgcacccgggcaagggaatgcttcagcgccatcagctgcttgcggagtatgatgccctgtttgatcgtgacacggagacgtatgcaccctttgaagacattcttcgtgctgctcaggaagcaattgtgctccccccatgggttgcacttgctatcaggccaaggcctggtgtatgggattacattcaggtgaatgta

SEQ ID NO: 42713 - DNA, 399 bp, Zea mays
  Clone ID: MRT4577_13895C.1
ggggggggtttttttttgggggttttttttttttatccggaacaaacttataaatcctccatgggcccagtttttaaggtgacatggtagatttctgaatgcaggtggtttcttctgggcccataaataatgggcctcacatcacatttgggggaacccagaagcatcacatttgccccaaccacccaaggggcctacaggggtgggggctcctaaactaatgggggggggactttttctggttctcatggggccctaggaccatgcatgggcaggctttaaaggaactgggagtgaccacaagggggtattttgtataggccatttctggagaaatgggtagtgtataacattctggggagggggcgggggaaattcaaaaaattggtttaacttttt

SEQ ID NO: 42714 - DNA, 1035 bp, Zea mays
  Clone ID: MRT4577_138960C.1
acgcccggacaactccctactcgactccaagcgcaatggctcatccttgcttaattaccaaggtacctttgcaggtaggtaggtagctagccgccatagcaagctaggccgaagcagaggagtgatggccaaggtccaccccaacgccgcggagtccgtccaggcagaggccgagggagagctgcccacggtgctgacggtgtggcgcaagtcgctgctcttcaactgcgacggcttcaccgtctacgacgcccgcggcgacctggccttccgcgtggactgctacgccggctcgttccgccgccggcgccgcgccgacgtcgtgctcatggacgccacggggaagccgctgctcaccgtgcgccgcaagacgcggttcggcttagcggagcgctgggtcatctacgacggcgacgccgacgacggcacgacggccggggccacgccgctgctgtccgtccgccgccgccgcataggcgcgtgctgcaagacgctggcgctcgcccgcccccgcccccgctccgccgccgcgggaaccgacgcaccgtcgtacgtggtggagggttcctacggtcggcgcgcctgcgcggtgcgcgacgcccgcgggggcgccgtcgtcgcggaggtgcagaggaaggaggccgtcggcgacgacgtgttccgcctcgtcgtggccgggccacgcctcggcgcgccgctgtccatggcgctcgtcatcgccctcgacgacatgttccgcggcggctggtcggcgcggtcgctgctgcgcatgagctcgccggcgtagtactttcactagctatagaagccacgagatggagtggagcccatataccagggactctccctgttacacgtgtaccgttacagtgaccccgggcccagttgtcagcgtcagcagagtttataatgcaggctgcagcaggggcagggctaacccaagcaatatttagatactagaattttcagttcgaatgcgtaaaacagtcggttctctgccaaatcaatcaaatatgaaaaaactatatatttgcc

SEQ ID NO: 42715 - DNA, 356 bp, Zea mays
  unsure (1)..(356): unsure at all n locations
  Clone ID: MRT4577_138961C.1
tttatanttttttttttttggaaggggaaccattttggtaagttttattagatttaccgcaagctcaaagttgactggtgccacagaaacagaagcaattcaacttttaccacgataacacgaccacaggtggaagggcttagctgacctactagatcttgggggcagcggagctgcctccgggggagggagcgtactcgttcatgccggcagaggtacccatgttcgcgccaagcgaaatggacatgttggcgattctggggtggcagatgccgggcagctacttaatcttgttctcgaactagtgcacctccttgagctggatgatgtacagggggttgatgggaccgtccacg

SEQ ID NO: 42716 - DNA, 1636 bp, Zea mays
  Clone ID: MRT4577_138962C.1
gccagggatggatgctgaggtcagcgagatggtcacttgtcacccagagagcagagccccatcttctccgcgcggccgggtataaatcccctccgcttctcctccaacccctctccacccgctcgactccaagcgcaatggctcatccttgcttaattaccaaggtacctttgcagctgcaggtaggtaggtagctagccgccatagcaagctaggccgaagcagaggagtgatggccaaggtccaccccaacgccgcggagtccgtcgtcgccccagcagtagcaccagtaggctccgcccaggcagaggccgagggagagctgcccacggtgctgacggtgtggcgcaagtcgctgctcttcaactgcgacggcttcaccgtctacgacgcccgcggcgacctggccttccgcgtggactgctacgccggctcgttccgccgccggcgccgcgccgacgtcgtgctcatggacgccacggggaagccgctgctcaccgtgcgccgcaagacgcggctcggcttagcggagcgctgggtcatctacgacggcgacgccgacgccgacgacggcacgacggccggggccacgccgctgctgtccgtccgccgccgccgcataggcgcgtgctgcaagacgctggcgctcgcccgcccccgccccgccgccgcgggaaccgacgcaccgtcgtacgtggtggagggctcctacggtcggcgcgcctgcgcggtgcgcgacgcccgcgggggcgccgtcgtcgcggaggtgcagaggaaggaggccgtcggcgacgacgtgttccgcctcgtcgtggccgggccacgcctcggcgcgccgctgtccatggcgctcgtcatcgccctcgacgacatgttccgcggcggctggtcggcgcggtcgctgctgcgcatgagctcgccggcgtagtactttcactagctatagaagccacgagatggagtggagcccatataccagggactctccctgttacacgtgtaccgttacagtgaccccgggcccagttgtcagcgtcagcagagtttataatgcaggctgcagcaggggcagggctaacccaagcaatatttagatactagaattttcagttcgaatgcgtaaaacagtcggttctctgccaaatcaatcaaatatgaaaaaactatatgtttgcaagatcctgaaaggaataatcaggggaagatacgatgaagggttcgggtttttttagataggaatagtaatacacctactaaaatattagttacacatctagaaaaagtatttattacataaattttgtaactagataaaaattagaggtagaagtgttttttttgtaagcgatccggataaaatactttgctacccattaggtctcggatgcggcaaaagacggacgcagattcatcagggaggcagaccgtggcattgacttgccgtcccttcacctttgttagctcaatcggcacgaagtagatcagctatcttcttgtagttgtagggcttggcagggaacacaggggcaccttgaacagatcatcgtagtcgtccttctctgccggcggcacaacgctgaagaagtccctgcttgcaagtattgggtgacggcggacgcgtgggcggacgcgtggg

SEQ ID NO: 42717 - DNA, 349 bp, Zea mays
  Clone ID: MRT4577_138963C.1
aaaaaaaaaaccaaaaaaaaaaaaaaaaaaaaaaaaatataagaaaaaaaaaaaaaaggggggagaggaagaaaaaaaaaaaaaaaaggcaaaaaccaacccccctcgaaggcagggaaccccgacccttcctttccttcaaatcgatcacccgtttcaacccgtaagctacttagcagggcgagggctaccctaaccgggccaatgaaaaccggggggggggggggaaaaaagcagcgcgagggcgcgggggcaatcacgggcgcggaggcctgtttcccccactcaaagaaaaagctccaggcgctgggcttcccgggggggaaaaagcccttgcggggactgaaga

SEQ ID NO: 42718 - DNA, 280 bp, Zea mays
  Clone ID: MRT4577_138964C.1
agagagagcagaggtcggagcccacccgcccgcctaggggggggagctctgctcttttgtgctgctcgcctcccttcccttcccttctcctcccccagccagccaggaatcgccaccagcggaagccaagcatcatcccagcaccggatcgattccgcccgcccgcccgcccatccaaggatccggcagccgatccggcgtcgtggccgccatggacgttactcctgctgcagacgctgagccgtcatcagacctaggtaacgctcttactcaccatcta

SEQ ID NO: 42719 - DNA, 788 bp, Zea mays
  unsure (1)..(788): unsure at all n locations
  Clone ID: MRT4577_138965C.1
cggccgggccgggctttcgtttagattattctccctccccaagtttcttccggcctctcctccacctccgcctcgccctgctgcttcccttcatccgcctccactccacctccgcctccgcgcccttccgacctcccagtcctcctcatctcgcgattggcgaattatagggtttcgcggcggccacccggatccagctcggcttggtgagcgcctccaaagcttcggatcgcgagagggcgctgtgctcactcgctgttccgccgccgccgcgacgacgacgacgagcttctgtgcgcctgtgcctgggttcggagcccccgtcgcccctccgctggccaccggataccagctcatgatgtggaaatctcagctctaaatccgcttaggttgtgataccgtgacagtgtgggactgacataattgtcactgtgcaagatgttttggcacgtgccaggattctccgctgcatcacctgtggatactattttggacaaggaaaattttaagttggaggatcttcttgatgaggatgaaataattcaggagtgcaaagcactgaatacccgcttaatcaattttttgcgggataaggttcaagtggagcaattgctccgctacattgtagaggaggctcctgaagatgcagaanagaaacggatatttagatttccatttatagcttgtgaaatatttacatgtgacgtggatgtcatcatgaagacattagtgggaggatgaagatcttatgaatttggcttttctccttcctaaaacctggccaccct

SEQ ID NO: 42720 - DNA, 878 bp, Zea mays
  unsure (1)..(878): unsure at all n locations
  Clone ID: MRT4577_138966C.1
ccgggttaagctggtagctgccggtgacacgtatctgctctcaaggttgcatcaacttatctgggaccacttgctgccaataacgaagctctactgaagcccttgaaggaaacattggtgacactaattcaacccaatgaagatgtagtcatgaatgcattgtcattgccagtacttgccagttctgtccaggttgcaatgagcagaaggcttggtattgaagagcctcagttaatgaagatagtcagaacaacaatccatacacacactgaatggtttaagcttcagatgtgcaaggaccgttttgagcacttattgaagattgattctctaaaagaggttgatccatcattggggagtcaccgtaagtccaaggtccttacagatgaatgtgcaaatggatcatctcaaatgacaacatgttcaagtggcaaggtgccagatgaaggtagtagccctcaagtctcatcagaagttgcctgtgatgaaaatgctatactgaaggttatggaattccttgcgttgccaagggcggacgccatccaactcctcatgcagtacaatggaaatgcagaggcagtcatccaacagatcttccaatagtgtactgtaaataacaaagtattttgcttgctttcaaacgtaattatttgttgatacttttcttgccctgtacagaagattctgttagaactaggagtctgtgtttgatgatccacagtacttctatggacttacacagagtaggaatcggtgggattcagcgcaggctaaactcaacgataaatgcaaagatattgatttatactggttcagaccattgaacagcgtgcgtaatatatattatgtctagttagttgtgttgaaaaanttagttg

SEQ ID NO: 42721 - DNA, 218 bp, Zea mays
  unsure (1)..(218): unsure at all n locations
  Clone ID: MRT4577_138967C.1
tttttggtgtggttttttttattttgatggggaccaanaatagaacgccggccgccccccgtttttttaactgttttgtcgaaaaacaacatctactgatttttcctccctagtagcggcggacgagcataaccggcggaatcaacacgagagtcaagacagtgcctctacggtattcaaataaaaaacccctgattaacctgtataaccgggtgatc

SEQ ID NO: 42722 - DNA, 579 bp, Zea mays
  Clone ID: MRT4577_138968C.1
cgtcgccatcctacgagcaagataaaacggggtcagaacgacctgctaacggaaataaacaggtgctacacaggtatcagtttcgagagcttctatatggtccggacccactcgactggaagtattgcttttgtgctacgtgatgcaggagcccgctatggataagatgggtagaagtggtggcatacacaacaagctgcggaccaatttggccctgaaagccgtgactcatggcgatgagcctgtagaataaaaaaaggaagctgccttactaggatatctgaaagaccacattattgagttgatacatgccttcatggataaacacaaaagctgattaaaaaagacctatcatacaatgtttaggatggccaaggctgttacacaaagatccggacgataactaaaagaagctggaacagaaagcgctttgtcactgcacaccaatgtgtatgaggataatacacgttggtagctacttgcttgacatcatcctttgtttatacaagggctggtgttgatatatgcatgctgaaacctataagcatgtgacaggcatgttcacataactgtattgca

SEQ ID NO: 42723 - DNA, 174 bp, Zea mays
  unsure (1)..(174): unsure at all n locations
  Clone ID: MRT4577_138969C.1
ctcgagccgccggnccgggtcgttttgattcgtttattatcggatgcgtgccgatgcagttcttgccgttctacgtttaggcttgtttttctttgcatctctgcgactccgcctacagacctattactgccatcgggatggcaacttcttcggagtcggaggcgggttcgggtt

SEQ ID NO: 42724 - DNA, 145 bp, Zea mays
  unsure (1)..(145): unsure at all n locations
  Clone ID: MRT4577_13896C.1
gggggtggggttttttttttatgggaancggagaatggggagatnttatntattgggttgttaatagatacagattttagagtgtgttgaataaaagnngaagattgatggtttgattaaattatagttatgnttanttatttaa

SEQ ID NO: 42725 - DNA, 274 bp, Zea mays
  unsure (1)..(274): unsure at all n locations
  Clone ID: MRT4577_138970C.1
gagcatcgnagatagnctccttgtttttgggacttgtgccttcccccgacaccatcttgcccagcgctgctctctcagccccggcgctgttgttccctggatggtggccgccgtaccccagctcgaccttgcgtcgtccccatcaacgcccaggtcgcgtagaagctcagccaggcgggacatccctccctgctcgcgctggacgcgccccggctcgccttgctagcactggaaacccaggtgcacagtccggcttctaccaccgcgtctaccg

SEQ ID NO: 42726 - DNA, 260 bp, Zea mays
  Clone ID: MRT4577_138971C.1
gattcaaaagaggcacacctgacttttggatcgaggacgaaacaccgattttaagaggatagcatcctaccacatgtggcccactccgactcatccaaaatgagcaacagctcaagagcgcggaatgtgatgacaaaccggcaaacgctggtgtacacacacagctctgtttcaggagatgttaacggcatggatctcaaccacttcattctataccttatcgtcactgctagtgcaccgctgtccatgaccagctcaat

SEQ ID NO: 42727 - DNA, 1248 bp, Zea mays
  Clone ID: MRT4577_138972C.1
gtgagcttggaactttgtacttcaatcataaaacaactaagcaggtccaaatcaatgttgtcatagtttccaaacagactgcaactctagaaacatagaattaccactgtcttatatgaatgaaaatgtacacacttgcatccaacctgaaattttccctggaagtggctacgaaagaaaattcatgtgctttaggacacagtacaagtacttagaaagccaactccttgttcacgtctattttttccaatcgccgggtccgagtactacagtcactgtttccacctctcttgcttattctttacaaagctcttttagcgccaattaataatggtcaactagctgttatgatgcatggtgaattacaaggagctttgggatcttcgccgatcattttatttgtgattgcaaacagctggctctttatttttgtacagatcattgcacactgatacatagaagatcttagtgtcaaaagtatagctattcacacgccaattcgttatgagtgtttgcctcattgcagcatagaaaggcattagtttctctgctaccttgtgtagatcagatcgattgctttgtttgactgatttaatacacttgtctatttttccaaactttgtatatttttgaagcttgtgttttaggtactacacaaggtaattgattcatttatatagtaagtagttattgctactatatgttaatcagtgtatgctatgttcgttaattgacactaattatttagatgggtgccctaacagacgaattttgctactgtattcaggcccaggttcgttactgaagttaccttttcaaaagagcagttccctttactttcaaaaagtgcctttcttgaacggtcaattgaagaaaattctgaccaagaataatgcatcatcaaactaaatgacattcctggggtgccaagtcatttgagctagttgcaaggttctgctatgggtgtgaaaatagagcatcaaaagctactagagtgaacagatgcttttgtgactgatcagctctggagcagctagagtgatgtagttgtgggcttttgaacaatagctagagtgatatgaaacattagtgatgtagttgtgggcttttgaactacttcaagctggagtgatgtcgatgtggtgcttttgtgactgatcatctctggagcttttatgaatgatctagctagctatccgtaaatgatctagttgtgaatgatattataattgtgatgcttttgtgaat

SEQ ID NO: 42728 - DNA, 186 bp, Zea mays
  Clone ID: MRT4577_138973C.1
atggcatcggcaattcgcgcggcatggttgatgacgatcatcgagtcgctgcttcggctgcttattgtccgtgctaacgttacgatgctgagaagagaaggaattgacgacagcaatgcaagtgaagggttgacggttgcggcggcgacgcgagtgagggagaggggcgacatagacgcaaggtag

SEQ ID NO: 42729 - DNA, 608 bp, Zea mays
  Clone ID: MRT4577_138974C.1
ccggccgggaactttttgatatcctcatctaaaactaaaagaaacatcattagagctaaagcccaaaactcttctcagaatgtctacagcagctgcaggtcaagtgcctgctaagaagcagcaagatcttcaagtcacctattccaactacaagaacactcttcagcaaatagcccagagaattggtgatatcgagcaagaagccgaggagctcaagctcgttttggagaccctagaacccctttctgaggatagaaagtgcttccgtctcatcaatggagttcttgtcgagaggacggtcaaggacgtggtcccagccctcaagacgaaccaagaaggacttcgcaaggtgctggaagatttagtgaagcagtacaaaacgaagcaggatgatcttgagaagtggaagaaaaagcacaatgtgcaggttgcccagcggtaatgaatgagactacgaggtcagaattaaacaaaaagatttcctgttatacaagagcactcaggtcttgctcgaaccaccgaacatcatgacttctgccgcggacgttgagaatgctgagaatattaaatacatcacatttgacagaaaaaaaaaaaaaccaacgccc

SEQ ID NO: 42730 - DNA, 658 bp, Zea mays
  Clone ID: MRT4577_138975C.1
tttgcatctagctctacttttgtgcatgggaggcctaggaaaagcatgttttgcatcatgtgcctaggagaatatgtaatgaaccttctaccatttaccatgcttgtaatacttcattcgcgcttttatgtaagaatgcaaaagtagtagctaggaaattgggatccaaatgcaagggagacaagacttgtatttggattccaaaggctattgtaactaaccttgtaggacccaacaagagttgggtacctaaaacccaagcgtaaattgtcttgcaggtttatgcatctgggggctcaagctggattatcgacagcggatgcacaaaccacatgacggaggagaagaagatgttcacctcctacgtcaagaacaaggattcccaggatacgatcatctttggagatgggaaccaaggcaaggtcaaaggcttgggcaagatagccatcaccaacgagcactccatttcaaacgtatttctagtagagtcgcttggttacaaccttctttctgtaagtcaattgtgccacatgggctacaattgtttgtttacaaatgttgatgtttctgtctttaggagtgatggttcattagcatttaagggtgtattagacgacaaactctacttagttaatttttcgaaagaggaggccgatct

SEQ ID NO: 42731 - DNA, 1219 bp, Zea mays
  Clone ID: MRT4577_138976C.1
gagctcactagtcggcggtcgcccttttttttttttttttttttagggatcaatcatgagtgaaccaaattaaagaatgattgagttgaaccaaaactggcaataatatacatacctcctcacactgcatatgaatacgtagtggcaaaaaaaataatataggcttacatatacatacataaatatctaacacgggtttgcacagcaataacatctggagcaacaaaaacattgtgtgcatatatatgcaacaacaatatggatggtgacgtgattaaagagcacggtacaccagctagctagctaggggcagcaagcgcaagaagatgaacctgctgaaccctagctagctaggccttgggtgtctcctcctcggccttggccggctccgccacggcaggtgcaggtggagcctcagcttctgccgcggcctccgcagcgggctgctctgtagcagctgctgcatcagcaggaggagcagtctcggcggcgggcggtgcaggggtgtcttctttcttctcctcttcttgggtctcttccttcttctcgacggcggcggcgggggcgggggcttcctctttcttctcgtcaacaggcgcttccttcgtggctgcctcctcagtggcgggcggggccggggcctccttggccggctcctcggcagcgacgacagggagcagcgtggagaccttctcgaacgtggcgaagatggggccggacagcagggccgggccggccttggagatgccgtcgctcacttgcttggctccagggaattcgatcttggccagctcctcgaagaacttggtgattgcggcggagttcttcttgatcccggacaccttgctcctctccttgatcaggaccttgagtggtgcaggggcagactcgtagatctcgacgaccttgggctggagatcagccttcttctcctggaactcgccatcgatcccctccttggactcgtcgaaggacttgacgagctcggcggcggcggcggcggccttgccggcgctcttgacgaagacgagcttgatcttgggcaacaccttggacttccaaatgtccatggctatgctatgggaaggcaaaggcaggacagctgcggctggcaggcaggtgcagcacgggctaccttgctaatgagtggacgtgatgctgtggctgtggccggacgcgtgggcggacgcgtgggcggacgcgtgggcggacgcgtggg

SEQ ID NO: 42732 - DNA, 397 bp, Zea mays
  Clone ID: MRT4577_138977C.1
gcgacgacagggagcagcgtggagaccttctcgaacgtggcgaagatggggccggacagcagggccgggccggccttggagatgccgtcgctcacttgcttggctccagggaatttgttcattgatgagatatgcggatgtgtatttattaatttgctgtctgtctggcactgtcactgtgtggcctagtactacatcgatctactcaccgatcttggccagctcctcgaagaacttggtgattgcggcggagttcttcttgatcccggacaccttgctcctctccttgatcaggaccttgagtggtgcaggggcagactcgtagatctcgacgaccttgggctggagatcagccttcttctcctggaactcgccatcgatcccctccttggactcg

SEQ ID NO: 42733 - DNA, 222 bp, Zea mays
  Clone ID: MRT4577_138978C.1
ctctatactgagtcgtattacaatcattcaggtccaatactacatcatagtacctacacgctgccgtttcccctttggcatcagatattgccatgaggtatacccttactcagcggcacatgttacttcgtcgctataccggtctcagcagctgctaatataactgtcatgctggctaggaacctgtggcttcgatctcataatttttctgtcatctatgag

SEQ ID NO: 42734 - DNA, 425 bp, Zea mays
  Clone ID: MRT4577_138979C.1
ggaatacacggccacgtctccttcaaggggcaacctcaaactagccgggccgtttaacccaacgaaaggggccaccgggggactgcctttcacacggacccctcaacccccggaaggaggaattaaaatggtcgccgaagggggcatctccttaccgttgccggggttttcgttcttcccattagggcctaacgccttctccgggatcttttcaagctcctccaggacttttcttttgccctggaaaaaaaaatgtttttctccagcccgacgggacacggggagcacgactgcccccatcatgccctttgacatgaccgacagggcatgggggagggctatgggggtggtcacccttgtccccccttgcacatgggggggctgggtgaatctgcggaaaaagggggccttccgggaactccccc

SEQ ID NO: 42735 - DNA, 321 bp, Zea mays
  unsure (1)..(321): unsure at all n locations
  Clone ID: MRT4577_13897C.1
acccacgcgttcttaccgacgtcaggattgacgtgaagctgaacaggcgcatntggagcagtggaatcaggagcgtgccacggagggttcgtgtgaggattgcccgtatgaggaacgacgaggaggatgccaaggaggaactttacttccttgtnacggtggttgagatccttgntgagggcttgaatgggctgggggccanggtnattgntgactctgnttaggctntnacatgttaggcatttttagagagtttttagtttgtatttgtaacaggaaaccttttgtnttctaagaagttttgtgttttggtgctgtgat

SEQ ID NO: 42736 - DNA, 663 bp, Zea mays
  Clone ID: MRT4577_138980C.1
tgggaccctcgaggccggccgagattatcttttatcatctccatgcgtacctctctccatttacctgatcctcagcctcctgcttgatccatccaagccaggtatcaacatgaaggactccaaggagtcccacttgctatccaacgacgacttcgtagccgccctcacctagccgtatgacgctggcaccgtcctcaataactgcttcatcatcatcaagaaccttccctgccaggctgaggaggtgtctacctctccacactgctaaggatggccatgccgaatgccactttgttgacatagacatattcgacgcgaacaagctccaagatattgttgcttcaccacatcgattgtgatattaccgcatgctgtaaccgtagctcgagtaccaacgtgactgatatattcgtgaggattcatgctcgggacctcgttcttactatgacatagcatcacactgaaggcatgatgctttccattcccagactgcatgaatactcttagtgagaccatgatctggcgaaacggcctaacacgtacctagaggcactcttgcctgcagactgtaccagctctcgctagtgacgagacgcaagatatctgatcttctcaaggcatgttaggacccagagtcaactctccctgaccttgcgaatactg

SEQ ID NO: 42737 - DNA, 448 bp, Zea mays
  Clone ID: MRT4577_138981C.1
taaccttctccctttgttgcagtgaagaggctcaagaccttcctacccaataaccagttagatagctccatccacttgctgaataggcactggagcaaaccctcttccataaccacttcgtcttgaatttacactccttctgctcggagctcacgccttcagtgctcgtgcaagatcagtcgggatcaacatggattggatggccagcggtagagctatccacggctgcgttctgcggtgacatggccttgggtgtgcaactgctccagctgccctggcgacagtgaggtgggaatttggtggctgtggtagccactggcagaaagatgacgcgctatgcagaaaactgaccgagttggtggctgggaagaggactgcacaagcttgaagactcgaggattaccctacacatgcagggaacccaagaccagagcccaaggacaggaag

SEQ ID NO: 42738 - DNA, 447 bp, Zea mays
  Clone ID: MRT4577_138982C.1
aaaaacaaacagttttttagcatttccatgatcgatgattacttttgcttgcttggaaaagcaaacccctcagcgggtttaaataatttacgtagcatcactcacgtttcgcccgtgggataggatgatctaatcttagccgcccggggtaagtttggaataaaaataacaaaagggggaatttttaaactttgaccacccaaaaaagaggggtcgttgaatatctacagtttgttcagaaaaagtaaaccccccgttctccatttttttaacagaaccccctatgaacattacccacaatttttttgtttttacagcctgtgatgtcaacctaacaggtttaccccagcacaagctcacagggttgaatcagggtccaagtaaacccgcccccaattgacctggaggaggcagcatttgaaaaagcaatcttgccccccgacaaaa

SEQ ID NO: 42739 - DNA, 980 bp, Zea mays
  Clone ID: MRT4577_138983C.1
cattctctgcatctgaggtgatgaacgatatcaccgggagaagcaatttcggttggcccaagcagcagtatgttaaagaacagcctgctccaacatttgttgaacgaatgcccaaggcaaaggatgcggtggagttcacatcatcaaatatagctgaagtaccagatataatgtaccagctgggaaggcagccatcaaggaaagatgtcactttggcgaacaatatgagaaattccgttgcttacccaactagaagggttgagccagatgatgatgatgagcatctaaacaatcttctccaggaagaggaagaattggttagtgctcataggaagcaggttgaggagactctggacatcctcaaagaggaaatgaacatattaggcgacgcggatcagcctggcttccaactcgatgactacatcacaagactaagcagtatgctctcgcagaaggcggctgtgatcgtggacctacaggctcgtctggagcagtttcagaggcttttgaacgagaacaatgtgctgctatatgctcagagcccttgaccgtagctccgtcggattcatctgttgccctgttgccaccggaaaaggtgggcactggtgatgagtctcgggcggcaacctgtgcgttgttgctgtggccatggtgctgctactgtaatccgtcggtgccagtgaaacgcggaactagatggctagttcacagcatgttgccatgcttctttggcatggccggcccggcaacctattttgtactagagttgctgcatccttgtgttcctgcgccccatccaatgtgtatatctcatatttgtccgtgtcacatgaatgctctgttatttgtagctcaacagatacgtttttctccccctttctgaattctgatgtatgaagttttccagagtgtatggtatcatcccgttatacaaaaaaaaaaaaaaaaaaaaaaaaaaaaaaaaaaaaaaaaaaaaaaaa

SEQ ID NO: 42740 - DNA, 627 bp, Zea mays
  Clone ID: MRT4577_138984C.1
cggacgcgtgggcggacgcgtgggcggccaggccgtgccgggcgtgcaggcggcggtcggcctccgtcgtgctgctcccttgccgccacctctgcgtctgcgccgagtgcgagcccgccgtccccgccgccccctttgccgccgcagctgtcgccgctgcctgccccgtgtgccgtggcgcggtcaccggcacggtgcaagtgttcgtctcgtagcgggagggaaaggttaaaaaaaatggtgctcctgccaaaaggaatggcaggtgaaaatggggaatgaacgatggcaaattgtgtagtggagtggagcgcattactttttatttctctgttttttttgctcatttgttcattacaatcattttttctcttcggattgtgccgggaggatggggatcgggccctctctctccctccgctcctgcggtcttttttaccccctgactctcagttgtttattataatcctactattagtatataagtcgatctcttctagtactgctaggaataggattaggttcctgctttattttcccttggtttcttctggaaggcatatgatcgaccatggatcccagtacgtacattttggaaggcaatgaatgattgtgcaaagggaaatt

SEQ ID NO: 42741 - DNA, 404 bp, Zea mays
  Clone ID: MRT4577_138985C.1
gtacttcctgcgccccgccaacccgctcggctgcgtgaaggacgagccgatgcccatctgcgcctcactgctcaaacagttggactcggacgaccacgacgatcacgaatagcacatcgacgacgacaatcgatatgtaatagcacgaagtctactgaccgaccgcagtcgctgcagacgggccggcactaaaccacaagtcctctccaccgggatcacaaacatgcaacacgcgaaaggaaaggaaaacaaacaatggactgcgcggcggcccccaagagcgaacgctcggactggggtgggagacataaggggggctaccgcaacaactctagtgggtgcaaacttcaccagaaggcccatcctcgagggggccaccgcgacatgaacgcaagcaacactct

SEQ ID NO: 42742 - DNA, 1220 bp, Zea mays
  Clone ID: MRT4577_138986C.1
cattgggtacctcgaggccggccgggaggagaaaaaaaaaaacagcagcagcaggccggcggcggccatcgcccaggagcccggagctgtttcttcgtcgcaggaatgggcaaggacggcatccagtacgcagtggtggacgccttcacggcggagccgttcaagggcaaccccgccgcggtgtgcctcctcgaggacgccgccaaggccgccgacgagcggtggatgcagtccgtcgccgccgagttcaacatctccgagaccgccttcctcctccgggaaaagtcctccgcggccggcgccgtcccgctgttccagctccgatggttcacccccgtcgctgaggtggagctctgcggccacgccacgctggcttccgcccacttcctcttcacatccgtcctcgcggagcacgagaagctcgtcgagttctcgaccaagtccgggattcttacggccaaaaaggtccctgcgccgcagagcacgggcgtgtcgggcgaggggaagctgttcattgagctggatttccccacgattgaccttgttgattgccatccttccgagctgccggcaatccccgacaccctcaacggagcctccattgtcagcgttcacaagtcaacgacggccggtgacctcattgtggagctttcatcaggaaaggaggttgctgatatcattcctaacattcatgaaattgaaaagtgttccggcagaggaattattgttacagggccagcgcctgctggatctggctacgacttcttcacgcgttttttctgcccaaaatttggaatagatgaggatcccgtttgtggcagtgcgcattgtgttttagcaccttactggggtgggaagctggggaaacacaaactgatagcgtttcaagcatcccctcggagtggaatactatacctggagttagaagctacaggcaggagagtgcgaattcagggagaagcggtcagtgtgatgactggcaccctcttagcataacccctgctcaatgaacatcctatgtcttcacttcagttgtgtggcatgatttctctgcagctaggaataaattaagtctcttttcacctgtccaaaggtgttagatacactgcttccagactatgaagcagagtgtatgaggatgtttcttttgaataaatcagtgggtgttcaatgtgtgcgataaaaaaaaaaaaaaaaagaaaggggcgccgccaccaccc

SEQ ID NO: 42743 - DNA, 439 bp, Zea mays
  Clone ID: MRT4577_138987C.1
gtggtgggttgtttttttttttttttttttttttttttttttttttttttttttttttttttttttttttttttttttgcctatcggaaaaggggagccccagggccccaaatggaccccccttcagggcaggtccgccgggaccaaggggggggggggggggaaccggccaaagatcctacagccgggagggggcgaaccgggcgccggcggggaagaccggggcgcgggttatccccccgagggacgcggagcccctgggccccatggggggccccccctcggcccttagcgtcgggggcaccctccgaacgccggccccccccccccccgcccgcgggaacagcgcggggcggccgaggaacacccccgaagcccccaacccttttggcgggaagacgtccgggcccccggggtcccccccgtgggggaacaccgg

SEQ ID NO: 42744 - DNA, 313 bp, Zea mays
  Clone ID: MRT4577_138988C.1
aaacaggcccccactgttttttttccctaaaaacacccacgggttcccgtttttgaaaaaaccccccccccggggtttgtaacaattgccgcagggccagggaacccccccccggttaacctggttttaaaaacatggggtacaggatgccagccctggggatccaaatttgaaaacaaacaacaaaccttgtttagaaccttacgatgacccaatccccgaaaagatcccgcgattttaaaatcaaaaaactccatgaaggcaccctctccctggaccccaaatactggggtgccccaccaaaatggcgggg

SEQ ID NO: 42745 - DNA, 556 bp, Zea mays
  Clone ID: MRT4577_138989C.1
tcgagccggccaggagcatcccttagcgcacccacccacccacccactcgcttcagccgactccgccgtgcgacaagcaggtggagacaggatgccgggtggtcacggcctgagctcgcggacgtgcgacctcttcgcgcgcccctctccgacgaaggggtacatcccgctcaccacctacctacggaccgacaagatcagcgattaccgtctctgcaaggcgaacggagccgcaaccacggtgatgccgtaccagttctatcatcggcgcaccggtcgcgctcgtacagatgcaccaccaaccattcgcgcaaagaggacatcgtgctgcagaagggtctaccgtaaggaagtgttcctcgaccatgtggagcatgtagaggcgtgcaggtagctggaacacgtcaccccgaccaaggcgcacaatgacgggttgaccgccgattccatgaagtggtccgagcataacaaacacaaccggcttgcatagggacccaaggacatcttgatgaccaaggccaccaccattgacaccgcacctccactactatctgcg

SEQ ID NO: 42746 - DNA, 2665 bp, Zea mays
  Clone ID: MRT4577_138990C.1
ggtaccctccgaggctggccgggaaaagcgcgcattgggtccctcgaggccggccgggacctcacctcacctcactcaaaccgagcgccagttgccagcacgaagaataggagtagggatcgaagagtgagtgaaactgaaacacgaggaggaggcatggcgaccccggatgaccgcggcagctggttgctgtacctgtccctagccgccaaatgcgccggcgaccagccttaccgcctcacgggcttccttgccgtctgcgccgtggccttcgtcgtgacctgcctcctgcactggtgcttcccgggaggcccggcgtgggggaggtggtggtggacgcggcggctcggtgccggtgccggtggcggcgcgacggcggcggcggcggccctgccggggccgaggggcctgcccgtggtcgggagcatgtggctcatgacgggcctggcgcaccgcaagctcgcggcggcggcggggagcctcggcgccaggcgcctgatggccttctccctcgggggcacgagggtggtggtggcctcgcacccggacgtggcgcgcgagatcctcagcagcccggcgttcgcggaccggcccatcaaggagtccgcgtacgggctcctgttccaccgcgccatcggcttcgcgccctacggcgcctactggcgcgcgctgcgccgcgtggcgtccacgcacctcttctccccgcggcaggtcgccgcgtcggccgcgcagcgcgccgtcatcgcgcgccagatggtcggcgccgtgaaggagctgtcggcggcctcgccggggcggcgcggcggcgtcgaggtccgccgcgtcctgcgccgcggctccctgcacagcgtcatgtggtcggtgttcggccggcggtacgacctggagctggacccggccagggagagccccgagacgcgggagctgaggcgcctcgtggacgaagggtacgacctgctgggccagctcaactggtccgaccacctccccggcctcgcgtgcctcgacctgcagagcaccagggccaggtgcgaccgcctcgtcccgctcgtgacccgcttcgtcggcggcatcgtcgacgagcaccgcgcccggaaccacctccgctctgctccgcctgccgtcgtggacttcaccgacgtcctgctctcgctgccggccgacgacaggctcaccgacgctgacatgatcgccgtcctctgggaaatggtgttccgtggaactgacaccgtcgccgtgctgatggagtgggtgctggccaggctcgtgctgcaccctgacgtgcaggcccgcgtccacgacgagctggaccgcgtggtcgggcccgaccgggccgtcaccgagtccgacacggcgtcactggtctacctgcacgccgtgatcaaggaggtgctcaggatgcacccgccgggcccgctgctgtcgtgggcgcgcctggccacgtcagacgtgcacgtcgacgggcacctcatccccgccgggaccaccgcgatggtgaacatgtgggccattacgcacgacccagacgtgtgggccgagccgacggagttccagccggagaggttcatggggtccaccgagttcccgatcatggggtcggacctcaggctcgcgccgttcggggcgggccggcgcagctgccccgggaagagcctcgccatggccaccgtggccttctggctcgcgacgctgctgcacgagttcgagctgctcccctcgcccgtcgacctgtcggaggtgctcaagctgtcgtgcgagatggccgtcccgctggcgctggccgtgacggcgaggccccggcaagcggttcagaagtcggttggggtatcagtctcactgtgagcaatagcatggcgggctggcgctactgtacatggaaagtgcttctgcttgcaggttgctactactcggtcgacatgggtatatgcttttcatgttactgtctttgatgtgtatcgatcaggtgccgaatgtgatactttggcttgtactgttagctcttttcctgggtgctcttttctttctttttcttagtactcgctgtaagactcgtcaaatgtatatgctggtttggatggttttggattgtagtcgcatactactagtagtattgcgcagttcaatgcctaaatatgctataatcatcaaaaaaaaaaaaaaaaaaaaaaaaaaaaaaaaaaaaaaaaaaaaaaaaaaaaaaaaaaaaaaaaaaaaaaacaaaaaaaaaaaaaaaaaagcggccgagagggacgtggcctggggaggaggaggaagttgcccgatcgtcttatcttagctttgtttaccttgtagcagagaacgtaacgtggcccggcggcgatggatgagatgtgtaaaagaagaaaaagagcatgcccgagtgccatatgctttagagtcgactgtgtatatatgatgatgctagcagctagtggaaggcagagtactaccacctgcagcgccggtttgatgcctacgtgtgtaatgtaatgtaactttaccagcttgcatgcaatgtgatatgtgccttgttagtgtagtgcacaagatgagatgagcgtgacagttatcttttccttttcagtagtgcctagctagagctagatgtgtgtatctctctatctatatattggagtatatcctaatgcatgcaagcgtgtgtgtg

SEQ ID NO: 42747 - DNA, 654 bp, Zea mays
  Clone ID: MRT4577_138991C.1
ccggccgggataggtgacacttaaaaaaaaaaaaaaaaaaaaaaaaaaaaactcacctcactcaaaccgagcgccagttgccagcacgaagaataggagtagggatcgaagagtgagtgaaactgaaacacgaggaggaggcatggcgaccccggatgaccgcggcagctggttgctgtacctgtccctagccgccaaatgcgccggcgaccagccttaccgcctcacgggcttccttgccgtctgcgccgtggccttcgtcgtgacctgcctcctgcactggtgcttcccgggaggcccggcgtgggggaggtggtggtggacgcggcggctcggtgccggtgccggtggcggcgcgacggcggcggcggcggccctgccggggccgaggggcctgcccgtggaactgacaccgtcgccgtgctgatggagtgggtgctggccagactcgtgctgcaccctgacgtgcaggcccgcgtccacgacgagctggaccgcgtggtcgggcccgaccgggccgtcaccgagtccgacacggcgtcactggtctacctgcacgccgtgatcaaggaggtgctcaggatgcacccgccgggcccgctgctgtcgtgggcgcgcttggccacgtcagacgtgcacgtcgacgggcacctc

SEQ ID NO: 42748 - DNA, 562 bp, Zea mays
  Clone ID: MRT4577_138992C.1
ccccgcgtccgccccgcgtccgaaaggaagtaatagcaatcaatatgaatccatatgtatataataattattaatgttatgtatctcaatctgaagctgtgcacgattttttctagtcaggtcagccctgagctgtacggggacagcaggccgaggctcttcacgtactggacagtgagtacctcctgctgctgcatgcttgttgatttgcatcgcatacaatctagtactttattaatattaatagttataataatgggcaatggatgacacgcatgcatgcacatatatatggctgcagagcgacgcgtacgaggctactggttgctacaacgcgctgtgcccggggttcgtgcagacgagctcccgcatcgccatcggcgcgtccatctcgccggtgtcgtcagccggcggcgcgcagtacgacatgacgctgctggtgtggaaagacccgaagctgggcaactggtggctcagctacggggaccagctggtggggtactggccggcgcagctgttcacgcacctgtcagaccacgccaccatggtaggagtggggcgg

SEQ ID NO: 42749 - DNA, 1405 bp, Zea mays
  unsure (1)..(1405): unsure at all n locations
  Clone ID: MRT4577_138993C.1
ttgggtacctcgaggccggcctcgcgtgcctcgacctgcagagcaccagggccaggtgcgaccgcctcgtcccgctcgtgacccgcttcgtcggcggcatcgtcgacgagcaccgcgcccggaaccacctccgctctgctccgcctgccgtcgtggacttcaccgacgtcctgctctcgctgccggccgacgacaggctcaccgacgctgacatgatcgccgtcctctgggtgtgtaactgaacccagcgtagcctcttcctcttcccagtgtaacctcttccagcatcttcgcaccgcatggctgcttcggtttcttatggatgacacgcgaacgtcgttacgtcccttttttttgttttgtttgcaggaaatggtgttccgtggaactgacaccgtcgccgtgctgatggagtgggtgctggccaggctcgtgctgcaccctgacgtgcaggcccgcgtccacgacgagctggaccgcgtggtcgggcccgaccgggccgtcaccgagtccgacacggcgtcactggtctacctgcacgccgggatcaaggaggtgctcaggatgcacccgccgggcccgcttgctgtcgtgngcgcgcctggccacgtcagacgtgcacgtcgacgggcacctcatccccgccgggaccaccgcgatggtgagcatgtgggccattacgcacgacccagacgtgtgggccgagccgacggagttccagccggagaggttcatggggtccaccgagttcccgatcatggggtcggacctcaggctcgccccgttcggggcgggccggcccagctgtcccgggaagagcctcgccatggccaccgtggccttctggctcgcgacgctgctgcacgagttcgagctgctcccttcgcccgtcgacctgtcggaggtgctcaagctgtcgtgcgagatggccgtcccgctggccgtgatggcgaggccccggcaagcggtgtgacggttcagaagtcggttggggtatcagtctcactgtgagtaatagcatggcgggctggcgctactgtacatggaaagcgcttctgcttgcaggttgctactactcggtcgacatgggtatatgcttttcatgttactgtctttgatgtgtatcgatcaggtgccgaatgtgatactttggcttgtaaaaaaaaaaaaaaaaaaagggaaaaaaaaaaaaaaaaaaaaaaaaaaaaaaaaaaaaaaaaaaaaaaaaaaaaaaaaaaaaaaaaaaaaaaaaaaaaaaaaaaaaaaaaaaaaaaaaaaaaaaaaaaaaaaaaaaaaaaaaaaaaaaaaaaaaaaaaaaannnggggggggccctttttaagggaccaaagttttcttcccgggttttgcgagaaaatatcttttttttggggccccttaatttaa

SEQ ID NO: 42750 - DNA, 464 bp, Zea mays
  Clone ID: MRT4577_138994C.1
gaccctcgaggctggccgggaaaaaaatatgaacaacttcaggcttggagaaagaagaaaggcatagcagggggcagcgagatgggcattagccccgctattcctgcgaggatgctcttagtcgctcttcttggcggtgtatgttgcggcgccaccgacggcaggtccagccacgcccgacacaccgacgccgacgacgcgattcgtctccccagtaaatgtggagctggtggacgaccgcggaattgctgtgagtgcgctattaaggacgcctccctgccgtcgtgacgctgtaacgacggggaggacaatgtgctgcgacgactgacaagactgccaggggtggccggccgttgacggatgcgcttgaggagactggatctcaagcttgaccgaacgctgagactgcacacagaggccgtgggactgctgatacagagaccacctgcacaaggcgactacat

SEQ ID NO: 42751 - DNA, 382 bp, Zea mays
  Clone ID: MRT4577_138995C.1
gttgcattaaacgaacatcattcatagtgcagtagcgcacaaaaaatctcaggggagtgtgcttcttggtctttgtgctcctggtgctcacgacactatcatcctccaatgatacaaaggtcctattgggagaacttcttacaacattacctttgatgggccagtgtaccggaagctgacaaccaagggtgttaagctacaggaccacaacacgcaatcgcatccaccaccttaccttaatcagcctagtggcttcaacaaccatgaggcctattacaacaatcacctgtctgggatttattgtctcaaaaaaatagggaccaaaaactacaacaacttggtgtagtcaaccttgctgccaactcttagcaacagcagtttt

SEQ ID NO: 42752 - DNA, 419 bp, Zea mays
  Clone ID: MRT4577_138996C.1
atatatgaatcatgttttttttatgggggaagataagggctctaacaagcaaacaaaaaaaaaaaactttcttttttgcttaaaaagggggggggctgaaatagcaaggagatcaagggaaaacttaaaggaccttgattaaaagggtgggggtgcctttatcaacatcaccaaaaaaagggcgggtggtagcctccaaatttttttaaaaaaaggggagggggggcgctccccccttctttaagggcaggaacttaccccccagaaaaaggaggagcccgcctgtttttccccgaagagggacaaggaccccccccacaagggcaaaaaactaaatttttaaatggcaaaaaaaaataaagcgttctggtgctggaaataaccacggggaggaaaacaaaatctccctcaaaaggaag

SEQ ID NO: 42753 - DNA, 1430 bp, Zea mays
  unsure (1)..(1430): unsure at all n locations
  Clone ID: MRT4577_138997C.1
tttcaaaattatagagagttttactccagaggctcgtgacatgtttgaaagagaatttgatttctttgacaaagtcacatctatttctggtgttcttttccctctccccaaggacgagcggagagcgggtataagaagggaactggagaagatttctattccaggtgatgacctctacctacctactgcaacaaacaagctagtacggggtatacagttggacagcggtattcctctccagtctgctgcaaaagttccaataatgattacttttaacgttgttgaccgtgacggggacccaaatgatgtaaaaccacaggcttgtatttttaaggttggtgatgactgtagacaagatgtgctggcgctgcaagtgattgctctattaagggatgtatttcaagctgtcggattaaacctgtatctttttccatatggtgttttgcctactggaccaggccgaggcataattgaggtggtcccagatactcgaagtagaaatcaaatgggtgaaacaactgatggtggtttattagagatatttcagcaagattatggtcctgtaggttcaccttcttttgaaactgctcgagaaatgtttatgatcagtagtgctggatatgctgttgctagcttactccttcaaccgaaggatcggcataatggcaatcttctctttgatagccatgggagattagttcacattgattttggttttattttggagatttcacctggaggtaacatggggtttgagagtgcacatttcaagctaagccacgagatgactcaattgctggatccatctggaactatgaagagtgatacatggaaccaatttctcaggttgtgtgtcaaaggatacctagcagcaaggaggcatatgaatgggattttaagtacagtcaacctaatggtggacagtggccttccttgctttagcaggggagatcctatcaataatcttcggaagcggtttcatccagagatgaatgaacgtgaggccgctaacttcatggtacgaacatgtgctgatgcttacaacaagtggactaccgcagggtatgacttgattcagtacttgcagcagggtattgagaaatagtttgtttctcgttttttaagtggcgttcgtgtacatcaattgtatgtagccactatctttttatgtagaatttattttttgagttgtatcatcgggcaaggatggaattcatgtgattaacgtaggatgcttggtgcaaagaggcaattcttttttttttcttgcactgtaaaactgccaagaaagtagctagtaagttgatcaagattctgtattgctgtcgcagaatgcattttcgtttactagggcggccacagctagtagctcgtcagaccgggaataattccgaaccggcaccnggaggcgtaccagaataacctatagt

SEQ ID NO: 42754 - DNA, 155 bp, Zea mays
  Clone ID: MRT4577_138998C.1
gtcaggtaaaaattatagcagggaacatacattaccggtgcagggagcggacttgcagtctaatatgacaagagcaggtaaaagggaaccaagatcggaatggtgtaattgtaaatgaatgtcaatgatttggagaaattatttgttgaacacaa

SEQ ID NO: 42755 - DNA, 721 bp, Zea mays
  unsure (1)..(721): unsure at all n locations
  Clone ID: MRT4577_138999C.1
cggccgggtagacagatccccaacggaaattgacaagcaaactgtaccgtcaaccatggatttgctaggagttctttcaactggcttcgcaacttcaacacctgtgacaaatacatctcagtcccaagggagcagcgacagcagtggtaataacaagagcaagagccattcaacggagccagtaactgttgtaaattcacacgatatatcaacccaagattttcctgcttcggcacgagggagaagcaacagcacacaagaaagccgacctcatatatacaagcagacagaacacgagacaagaccatacttgtcactacagctgtttggcagcagtgaggaggatattccacctaagatggactcattgaataagtacttatcttctgagagtagtaatcctctggatgagagatctccttcatcctctccgcccataactcgcaagtttttccccatacattcggttgatgaagaggttcgacaccctcatattacagattttggggaagatgctacaatgggtgaagttagcacaagtcaggcatggagtgcaccaccacttgatctcttgaaggatttagagcggacgctagagaatggatctgcaccaaatgctgaataccagagctgctatggtggaacatcttgggaagaccattgaccttaaacctggaactgcaatggacaggaccggactggggngagtatgttggaacta

SEQ ID NO: 42756 - DNA, 422 bp, Zea mays
  unsure (1)..(422): unsure at all n locations
  Clone ID: MRT4577_13899C.1
tggtacctcgagccggccggggngcgcgtaccctcgatccgttccgccgacagnccgnctgcccaactccagccgccgcgtgcccctcctctccccacccgatgngggccctcgtttgcgccgcgtcgctgctccgccgcgccgtggggtttgtgtctactacggcgttgctgtactatccgccgcggaacgtaggtccttgnctcgtgaagaatttgnnaggtttcttttttaatgggtattctactcttttggttttttatatgaagtgttgtttccaccanaatttctttctaccaggattgtgtggacaccngtattgtagtttgttttgtttgtagacctggtagttatggtttttgtcttttttattgacgactcgggtttttctggtttctccatggtgaatgttttttgttgtt

SEQ ID NO: 42757 - DNA, 1213 bp, Zea mays
  Clone ID: MRT4577_1389C.1
ttttagggccccgggacaaaagcaagctacctccgccaccgccgccctgacgcacaaaccccgcagctaccgccggggccactgctgcccacttgttgttgccacacaccaccaccggggagccagatccgacggtcggcctcgccgtacccacaaagaggccacagcacacctcacctcctccgctcctcactgccgcaccaccatggggagctcgcccgccggcgctccacaaccagcatcggcctcagggatggcaaatccggccaccggacctccggatctgactgccgccccaaggccaacctgctgcggccaccgaccgccccgacttgggccaccggcagcggccaactccatgccccacgaacagaggcagctccaacgctggcgtggcccacagcccacggagcacgcgcgccaccggatctggttccaagcgcggcggccaagccaagcaggggacgcggggggcgaggtcccgcggccatggccccgctgccgccatcctcgcatctgcacggactcccggctgtctgctctggcgacggcgaggctggaggaaggaggaagcggcgggtgttgtggtggtggcggagtcgccgcccgtgtcacccgcggagttgcagcattctccctttgagcacttcgggctgtgactagagctatactattaatacgtttctccctctgcagaaagagaaggaaaaaactggtggagcaaggaaacctcagaattcgaaagacaacaagtgaaattttcagaaaagctcatggatggaagtcggttgatagacgcattcaatgaagtttgtatgttagtatgtccttttggtttaaccgtgctgggagctgtattcatgtgggtgctctgttcgtaaacttgtttaagttcttagtttgcgatgtcatgctcttgtcactttcggtgtggctctttgttctctgcttttgggcaattatgttagatggtctgaaactcctcggtggaaggctttccccgtgttatgttttctttagctgatagttgcgtgcgttttgtcggcttttcgttttctggtggccttaacggtcatgtatgaactatgtttctgtctatttcgtaatgaaatagggggtgttcccctttgtaaaaaaaactaggatacaacactatatttgccaaaataggacaagcaataccaagctcaagagagccaccgttttatcattc

SEQ ID NO: 42758 - DNA, 342 bp, Zea mays
  Clone ID: MRT4577_138C.1
agcaagggggattatgagcttaaggaaacatgccttgagtgacccaaaagttacaattactttttaacaaatctttgttacaagcattatttaagttctcacagggatggattgcacttagccaaaatatcatatacttatcggattaatcataccaatttatggcaggtggagatggttgaacacaagaaaatgaaacacttcaagaatcacatgtcaactataagattggggcatcacctagatgaacaaagctgttactagtgtgcgcgcatgggaccaaagctactagcctaaaatccatagattttgaagtcaatttggcagtttacagtaagatcc

SEQ ID NO: 42759 - DNA, 806 bp, Zea mays
  Clone ID: MRT4577_139000C.1
gccggccgggtcgcgccaagacaacgactaacacacggtttggaacacatcacggtttcagtgccatggcacccaacaagtccgttggtcaccctgcgctccgattcctagccgctatggcactcgtgtttacggtatcagtctgtggccagtcgtcgtctccagctccgacgcctgctccagccccggcgcctgcaacgactcctgctttagccccaataatgccagcgccgactcctgctccgacgcctgcaacgactcctcctgcttcagccccaacggcgccagcaccgacaccagcgccaacaccatcactgacaccagcgccgactcctgccccggcgccatccgaaaaccggtgtccccctggcttccctaacctaatcaccttaattcaagccattaagaccacctatcctaataagtgcaatattattattgtccccgttccattctcgccggtaaacccagggtcgggcattcttccatttccaccctacaaatgcctgtgctactgatttcccattattaggattccatggcccggcatccccacctacaaatgtgttcctgtaggcactcccggcccttaacagtatgagcatatatatatttgggtgcacggaaactatgcagaaatgtgcgcatgcatacttaagtatgaataagtgcatgtgagcgaggtctgtaatctggaggttgattagttccatacatgggcgcagtgtgtgcatggtaagggacattaaatgacctacggttgtgtgaatgcgcgacatgctgttgttgtctactatataccactt

SEQ ID NO: 42760 - DNA, 849 bp, Zea mays
  Clone ID: MRT4577_139001C.1
cctcgaggtctcggccggaaaaaaaaaaaaaaaaaaaagaagggagaaagaaaagcagtcgagcagcggtagccggtaggcgagagagtcaggattcaggacgcggcgaggccaccatgagcactctcaagttctgccgggaatggtaaaagcgacgaaattgttggcattcgtgcccactgccggctctttggtattggaatcgtggtcgtttgcttcatattttcatcgtctttgctttgtattcgccgcagcaacaacatgctgtacccgcgggaggacaaggagacgcgcaccctcctgtacgcgtgccaaacgtgcgagcatgaggagattgccactgatacttgtgtgtacaaaagggttatccgcaagcctggtggtgagcccaaggatgtcctgaaggatgcagcaactgatcctagcctgcctcgcaccagaagcgtcagatgttacaactgcaaccatccagaagctgccttttttcaggccccgactaagggagaacaagccatgacgctgtacttcatctgctgcaacccaagctgcgggcacaggtggagggactgagaaggatctggcttggtcttcgctgcaaacctgccgtattgttagcctatcacataaatattgtaggtacaagttgtgccgtcaactgacgtttgatgcaagcttataagctactataacctcgtaacaaaacgatggtttggctggagacgaaatctgttgttcctgatgataagccaaaaactttacggccgagctcaggtaagaaacagaagcggctatgaactactgtggtgtttggtttgaggaatgagctagtctatcatcttctcactcctc

SEQ ID NO: 42761 - DNA, 489 bp, Zea mays
  Clone ID: MRT4577_139002C.1
gaggtcggccgggttcgcgggcttatgcgcaggtcaagagggcgcccgcgctgtccatcctggacacgtgctacgacttcaccggccggaccaaggtgcagatcccgtcggtggcgctgctcttcgacggcggcgccaccctgaacctcggcttcggcggtgtgctgtacgtggcgaacaggtcgcaggcgtgcctggcgttcgcgtccaacggcgacgacacgtccgtcggcatcctcgggaacatgcagcagaagacgttcgccgtggtctacgacttggccaaccagaagatcgggttcggcgccaagggctgcagctgagagtagtagtcatcaaccatgcgtggcgagcatgaggacgcccattggtgattcgatacacgggccatagttccatacaagttgatagggcaagtcgatgatgatcacggcctgtaatttcacgatgaatgaaatggaactaaagatgatcgaacgaaaacaaaat

SEQ ID NO: 42762 - DNA, 652 bp, Zea mays
  Clone ID: MRT4577_139003C.1
attccccacactctccttcagtctttttctctggatccttcaagatagctgcagatagcccaacacacacacacacacacaggggcatcggcacacatcaattttctgcagcagcatcacgacgacgagaaacggagaaagcagggattgatatactgatctgatagatgatggatcgacatatggaggaggactcgagcacgttcctgcagtgggcaatgaaccatctccagcacccggccgccgccaccgcggtttccgccgcataccagcaggagggcggcgccggtgttggtgcccgcatcagcggcggcgccggagatcaggaggactccgccgccgccttcccgtcgctccaggcgctccgcgcatcccagccacaggtcgtgcccggcagcgtccgagtccgggacctgacggtgcaggtggctgactacggcggcctgaccaacagcagcagctccggcgacagccccggcgcagccatggaccacgacgcggcggccgggtggtccccccacaccgcgcgctccaggaccacgggcctcggcggcggcagcaacagcaggtcggtcagctggaacttcagcgccgcgtctgcgcagccagcgtacgaccgcggggccgtcaccgtcgcgctgccggacgcccc

SEQ ID NO: 42763 - DNA, 340 bp, Zea mays
  Clone ID: MRT4577_139004C.1
acaaacatacatacatacatacatacatacatgataaaaataagttgaattacaggacatttatgaaggacggggatgggaacagatttaccaacatccatttttattaatgcccaacatattataacaaaaccccaaatttgaaaagtttgacccaaccctaaactcaaacccttattttcggatgcttgcaagcacacaaaaatttaacaaaaaacgggatggcactaatgccgggttaaacagatgaaaaattaagacccccacttgttcccttagtttcccttggcacctcctctcattttcagggacaaaaacggcttgctaatttatttaaaaa

SEQ ID NO: 42764 - DNA, 494 bp, Zea mays
  Clone ID: MRT4577_139005C.1
cccccccccccccttttgtttttatatgtaaggaaatttttcggttcttcccccccaccccggggggaaaggatcttgggttctttggtttcaacggccaccgaatatcgggccttttctatgtgaaagggggggggaaaaacccccctttcaaaaaaacggggttttgaagggaaaaaaaaaagggggcttttttttacccccccctccctttttttggccggaggccatttaaaccgggggtaagccccccttttttcggccagaaaaaaaccgacggcccccttgggaaggaacaaaacccccgacccccaagggaggaacccccggtggtgcccttcccaaccctgtatacggggggtaaaccccccccggggggggccaaaaaattttgggtccccccccttccccctaattttgaaaacctggggacacctcaacaaaaaaatttttaaggaacccccaggtggaggcgcctaattcccccccaccgg

SEQ ID NO: 42765 - DNA, 373 bp, Zea mays
  Clone ID: MRT4577_139006C.1
gatattcgtcgttggtgcttgttttgttcccatgcctggtagaatgcaggctgctggcatttatgcagctgtattattccatcaaggatgcaagggacgtgagagaaatcacgagcagcaacgatggtggcggctgtctacacttgggcctaggcaacattcatattgaactggacaacatatatgcttagcatagcatttgaaacgcacaggagaaaagaaaaaaaatgctcgtgttgcagttatctgcgaacttgcagctgcattgagtggtacctatgtagagagccgattttttttatctttaaatacaagtcgatcggcatacctaaataagtagattgcagtgcctcattgtagcagttcagctcat

SEQ ID NO: 42766 - DNA, 391 bp, Zea mays
  unsure (1)..(391): unsure at all n locations
  Clone ID: MRT4577_139007C.1
gggcgcagcgttgcacaaaaaaaaggcgccaccagcacaacaaaacagaagggaataccacccaaaacaggcaagggcggaaacaaggcgcagcagagaccagtataatgtacgcgccaggaagctgcggggcaaagctacggatgcaggcacagatggccgaacaccaggcgacacggcngcggactactggcagacccgaccgacgaagagacactgaaaggagcgctccgccgtatcccgacgaggacggagtctgaccgcaaagccgaatgggctactggacgccgaggtgcagcaacatggcgagccctccctctgacggaaagtgcaggaacgcaactggccgtggagcaccccgggcaacacgcacaggggacccgcccacaaa

SEQ ID NO: 42767 - DNA, 462 bp, Zea mays
  unsure (1)..(462): unsure at all n locations
  Clone ID: MRT4577_139008C.1
ccacgcggccgaggcagtggtgctgcgggattgtcacaagcctctgggccatcagggacgtgagggtgcagtgggctgttttgacgacgaaccggggaccccataggtacgggctccattgtcggaccacatggatgaggccgatgagctcccgctcgtgtgccgccattgcccgatgtgtatcgagctctctaaagtgaatgtgcatattcaaaacctttatttaatataggtatacctgattacatatttgtgtcacaatgtggtgtcctactctgatttgacaatttgaacatgtgtgtcacagtgatttgcgaacaaaaaaaaaatcccctgtgccaatccaagatgtgtgggtatggggatgtgtttatccataaccagaacacgagcacctgccgtgcaaatcagcgtgactcgctctcgctctanaatttcaaaaaaaggcagtaccaggcgnaa

SEQ ID NO: 42768 - DNA, 641 bp, Zea mays
  Clone ID: MRT4577_139009C.1
actacccgcctccctcatctctctcgactccggccagtcagtctcttcttcttctctagcgagcgagcaagctaggcttggaggtgaccgaaaatgccggtcagcaggatcgccgtggggagccaccgtgaggtgtacgaggtgggcgccctcaaggcggcgctcgccgagttcatctccacgctcatcttcgtcttcgccggccagggctccggcatggccttcagcaagctgagccccgacggcgcggcgaccccggccggcctgatctcggcggcgatagcgcacgccttcgcgctgttcgtggcggtgtccgtgggcgccaacatctccggcgggcacgtgaacccggccgtgaccttcggcgccttcgtgggcggcaacatcaccctcttccgcggcctgctctactggatcgcccagctcctgggctccaccgccgcctgcttcctcctccgcttctccaccggcgggctccccaccggcaccttcgggctgagtggcatcggcgcgtgggaggcggtggtgctggagatcgtgatgaccttcgggctggtgtacacggtgtacgccacggccgtggaccccaagaagggcagcctgggcaccatcgcgcccatcgccatcggcttcatcgtggg

SEQ ID NO: 42769 - DNA, 221 bp, Zea mays
  unsure (1)..(221): unsure at all n locations
  Clone ID: MRT4577_139010C.1
cngnacgactgcagnnnccggnccggaattcccgggtcgacccacgcgtccgcacacancagcagctcaaaaacctaacacacctcaacaagcagagcaaagacccgggattcgccggngcggnaggagagcgtgagatggacgggnggatgtncggtntngagacccccctgntngtggcgctgcagcaccttctggacgtncccgacggcgacgtngga

SEQ ID NO: 42770 - DNA, 1066 bp, Zea mays
  unsure (1)..(1066): unsure at all n locations
  Clone ID: MRT4577_139011C.1
ccccnctcgggtcgacccagcgtccgctttcgcagctaacagcttttctattttccccttcccagttccgacacccgcgcttataaccctctgttcccacgccccctctgccccactcccaaatattgacgcctgacgtccccacaagtgatctgcatgagtaacacagctgaggaaaacactggcggcggcggcggcggcagcaccccgacgcgcgttgtggtagtcgagcgcgtggtgacggtggagtacctggagccgtccatgtcgcgggagctgctgggcaagttcccggacccatccgccttcgacttcgactactcgcagagcggaatctggtcgccgctcaacaaggtcccgcgcggcggcgcgtgcgagcccgagacggccgacgccaccaactcctcgaccgacttcctcatcgccaacccgaagcgcagggcgagggccggcggccggcccaaggactcggccggcggcgggaggtccaggtggaggcgcagacggctgcggcgagacgggtccttcctggacctccacgagactggcagggccaggctcgacttctcgccgccggcaccttcccccgcgaaggtagtagccgcccacttgccttcattaagctttgctgaaatagtcgtgagcaattgagcatcacgcgggtttccactgattggttggacttgggggcggttcaggaggggtggaggtgggtgctcaaggcggccatcaggaagttcaaggcgcggcagcggcggtcccggcaggctcccctgctccagatggtcctccccatgctgtgatgatcgatcgatcgatctcgcgcgctcacacgaattgtgcttgccttttgtttccacttgttccatcacagttctattcattgcatccggacgctggtccatgcctcgcctgtattatagttgagttcagatttgcttcaagttgtattgtaaccgtgtaatgcagctaatgctcttgctggagaaatatattggtgtacatcttttcattcgaaaaaaaaaaaaaagggcggccgccaccgcggtggaaaaaaaaaaaaaaa

SEQ ID NO: 42771 - DNA, 275 bp, Zea mays
  Clone ID: MRT4577_139012C.1
gacccacgcgccctttgggcttaccagcacgcagcacaacaccgggagccgggggcccctaaaagcggctgggagaagcacacaaaatcatccggagaacggagtcctagcaaagaaaccgacgaaggaaagacaggcgccccggtacccgctacaggaaaagacacaggggcagagaaaacgaacaagaacgagaagctagcacaaagaacgactgacccaacgggcccccggaagcccacaccaaagaagaggacccggagcccccggagaac

SEQ ID NO: 42772 - DNA, 527 bp, Zea mays
  Clone ID: MRT4577_139013C.1
ctcaagttctcaattttcgaaatatatatttttttcctcacacagaaaagggacctcttgttttacaagtgtgtgcagtatctaatcactcgacactggggaataaaccaaagtcgagtttctgagagcttgggggcgacgcctttcgcgctatgtctacaccgccaccggcaaagccgtccagaagcatcaccggttccttgctagcattcgggtctctggcattctgaacatacccacatgtcgtgaagagctagcacgagtgcacaagccgccggccacggccggtggcttcgggacgatgcctaccgtttctgtgtcggcgtagctgacaacgaaacgtattcgttcagtaggctcttgaattgctcccgcgccttctcaatctcgagccgtaaattctgttccttgagtcgtagtgccttctctgccatatcaaaatccgagcactcttcacggagcatccggttttccatcttcaggaagcaaaattccttcgtctctcgctctcccatttccatataccc

SEQ ID NO: 42773 - DNA, 494 bp, Zea mays
  unsure (1)..(494): unsure at all n locations
  Clone ID: MRT4577_139014C.1
ggccctggtggcgaggatggagttggacgtcggcagcgggctaggcttgcgggtcgaagaagaagccgggtcgatgagacggtggcgagcccaggttcgagatcaacgagcttcttcccggacacttctcggacgtcgtggtgntcgagaccccgtcgtcgtcgtcgtcgtcgtcgaggtagagccccgccaccctcctccctcgtcgtcgccgtcgccggcgagggagaagaagaagtcgtccgcggcggggtcgtccaggaagacccgagttgaccgtcttgtacatttcgccgggcggcgcgccgcggcccatcgcagccggcttccggtggacggatcgactggctgctgctgctgctgctgctgccgtgggcggcgtcgccgtgcagcagggctcggcgtcgccgccgcctgcgcctgcgcggaagggaggtcgtctgaggggttggaaccgcaggccgaccactgccacggcgtggcggcggcggcgg

SEQ ID NO: 42774 - DNA, 613 bp, Zea mays
  Clone ID: MRT4577_139015C.1
accggtaccgacacttcccgggttgccaagtaccaggccgacaacgccgtccctggcgccgagaacgagctcgcctcgggcgctgccagcccccattccttgcaggagctgcaggacactacgctgggctcactgctctcagcgcttatgcagcactgcgagcccccacagcggcgctacccgctcgagaagggcgttcctccaccgtggtggcctaccggcgacgaggagtggtggccggaactcggcattcccaaggaccagggcccacccccgtacaagaagcctcatgaccttaagaaggcctggaaggtgagcgtgctcaccgctgtcatcaagcacatgtcaccggacatagagaagatccgtcgcctggttcgccagtccaagtgccatatccttcaacaccagctcgagcgagtatgatgtggacatcatcgatgagtgcaagggggacgaggccggtaaccagaggacggcagtcactgacccaaccgcgttcaaccttggtgccgctatcctaagcgacaagttcctcgtgccgacgccgatgaaggaggagaccgccgacgtggagttcatccagaagaggaacgcccccgctgcagccgat

SEQ ID NO: 42775 - DNA, 454 bp, Zea mays
  Clone ID: MRT4577_139016C.1
ggaatacatgtgttttatgttctcctgacaatcaaacgcccctgttaattgaacacccaccgggtgatgcactacaaagtgaggtcatcacctgtttctttttcagttttttagattattgcaatatactatataaaatcccacaccaaacacactgcagaccctcctgatatatggcttacattggaaccacttcaacggatcctgatgaacttggttgacgggcaaggacgacttaggtggcgattttagcatggttgatgaccctgtacttgccccttatctggccctgggtacccgggagaacctctatctgtcccatgttgacaatgggcttggctaaattggtcttccacgtgggcttgatgagcactaaggagggcaacaaccccttgattgttgaattggacatcagcgccgaattccactccaataggcccaacttgtttgtgaa

SEQ ID NO: 42776 - DNA, 2960 bp, Zea mays
  Clone ID: MRT4577_139017C.1
tcgcgagcgccgccctttttttttttttttttttttaccaaaggcagtgggtgaattggtgctagtagcaggagggagagtctgaaatgtgagagctaacacggagacagcggggtgggtgacacaaacacaaacaccgcaccaggccacggccctggcatcggtgttcttatcctcccttcctgcctcgaggccggccgggtacgtcgctgtcggggggcgagcagcagaccacgaccagcacgcccacttgcctgcgattactttgcgccagagggcagaggccttggccctgccatcgttgttcttatccccccttcctctttctttctcctccctcttgcggcttctctctggactcgcccctccctccgtctcgtctcccaggtcatggcaaagctggaacacccgtgaaaatagcaagtgggagataaacaggaagagctagggtgaatactaactacaagtagcagtagaaggaagagagtcagtctgcccgtgactgcgagtgaatttgttgggtgtggtgtttgttgaggtcacgatgatgggaggcgggctgttggtggatcagagcgtggtgttccctggcgtccacaacttcgtggatctcctgcagcagaacggcgacaagaacctgggcttcgggtctctgatgccgcagacgtcctctggcgaccagtgcgtgatgggggagggcgatctcgtggacccgcctccggatagcttcccggacgccggggaggacgacagcgacgatgacgtcgaggacatcgaggagctggagcgccgcatgtggcgcgaccgcatgaagctgaagcggctcagggaactgcagcagacccgcggcaaggactcgttggctagcggtgcgggactggctgatggctcgtccaagccaaggcagtcgcaggagcaggcccggcgcaagaagatgtcgcgcgcgcaggacggcatcctcaagtacatgctcaagaatgatggaggtgtgccgcgcgcaggggtttgtgtatgggatcattccggagaagggcaagccagtgagtggtgcctccgacaacctccgtgcgtggtggaaggagaaggtccgcttcgaccgcaacggaccggccgccattgccaagtaccaggccgacaacgccgtcccgggcgccgagaacgagctcgcctcgggcgctgccagcccccattccttgcaggagctgcaggacaccacgctcggctcgctgctctcagcgctcatgcagcactgcgagcccccacagcggcgctacccgctcgagaagggcgttcctccaccgtggtggcctaccggcgacgaggagtggtggccggagcttggcattcccaaggaccagggcccacccccctacaagaagccccatgaccttaagaaggcctggaaggtgagcgtgctcaccgctgtcatcaagcacatgtcaccggacatagagaagatccgtcgcctcgttcgccagtccaagtgcctccaggacaagatgactgccaaggagatctcaacctggctggcggtcgtcaagcaggaagaggagctgtacctgaagctgcaccctggcgcacgcccgccggcgtccactggtggcatcgcaagtgccatatctttcaacaccacctcaagcgagtacgatgtggacatcgttgatgagtgcaagggggatgaggccggcaaccagaagacagcagtcactgacccaacctccttcaaccttggtgcggctatcctaagtgacaagttcctcatgccgacgccgatgaaggaggagaccgccgacgtcgagttcatccagaagaggaacgcccccgctcctgctgagccagagctaatgctaaacaaccgggtgtacacctgcaacaacgtccagtgcccgcacagtgactacagctatggattccttgaccggaatgcccgcaacagccaccagtacacctgtaagtacaacgatccgatcactcagagcgccgagaacaagcctctgccagcaccgccgcaaccacaagccttccagccggccttcagccaagccaatcaggcagtgaacaatctggacttcagcctgcctatggacgggcagaggtccatcgccgagctgatgaacatgtacgacaccaacttcatgacgagcaagaccatgagcagtagtgacagcgtcaccatcatggagaggccgaacgcgatgccccagaggatccagatggacgagggcttcttcggacagggcaacggagtcttcgacgacgtcaatagcatgatgcagcaacaacagcagcaggcaccacccgtggtgcagcagcagcagcagcagcagttcttcatccgcgacgacacgccattcatgagccagatgggcgacatcaccagcacggcggagttcaggttcggctctggtttcaacatgtctagcaccgccgccgctgattacccaggcgcggcgcagaagaacgacggggccaattggttctactgaagaataaaacttgtagggctcctcgttataagcttcggattcctccatggctctcccaagttgtcaagtcttataggtcttcgttatataggttttgcagtagctgcaagacggctggaacctggaactggtttatacttgtatgtccggccagccataaacctctcttatttgcaaacttaatgttattcctagctttaagttgttagtctcagtgctgtccatgtatatggctgttaaaatgcttgtgcttgtttctgtactacctgctgtttggtgtctgaatgaagtgttttcttcagtggttctgctcgaaaaaaaaaaaaaaaaaaaaaaaaaaaaaaaaaaaaaaaaaaaaaaaaaaaaaaaaaaaaaaaaaaaaaaaaggaatttggctctttgctgagtgccatattctttaccgagtgttttatttcgggcactcggcaaagatctctttgtcgagtgtcacac

SEQ ID NO: 42777 - DNA, 494 bp, Zea mays
  Clone ID: MRT4577_139018C.1
cgggcacttcaaaagaggtcgactggtgatgttgaaacccaatgctgaacacttaatgagccaatagtcgagctgatgctgggatatgacattgatgatccctgttgctccatacattaatcggcgcctactacagcactttccttaggtgcatttattggaacttaacagtggtggcgcaacaactacaacaactatcagctagcagagcttgctgcctactctcagcatcagcacattacttccatctagccaactagatgcattgaactctgcgtcttatttacaacatcaacaactaccattcaggcagctacctgttgcctacccccagcaatttctaccattcatccaactggcagcattgaactctgctgcttatttacagcagcagcatctactaccattcagccagctagctggtgtgagccctgctaccttcttgacacaaccacagttgggtggcgttctacccagcacgctgcgcctaacgc

SEQ ID NO: 42778 - DNA, 237 bp, Zea mays
  unsure (1)..(237): unsure at all n locations
  Clone ID: MRT4577_139019C.1
ccgccgcagacatggcgctgctgaatcagcaaggtctgnattactccaacttcaagctcgtcatcgttggcgacggtggaactggcaaagccacatttgtgaagaggcatcttattggcgactattagaagatatatctagccaccattggtgtttaagttcaccctctcgatttcagcactaactatggtcacattcgttactattgctgggacactactgggcaagaaaagttcg

SEQ ID NO: 42779 - DNA, 166 bp, Zea mays
  Clone ID: MRT4577_139020C.1
attcggctcgagcactgtcgaaaaccagctttttttttcatggacctttataagtttttggggggggctcaaattgatctggagctgcaaagaaacacttcagctttttcgttgccctgctgaaacatcctccgaccctatgaatgttacggctatactttttggt

SEQ ID NO: 42780 - DNA, 256 bp, Zea mays
  Clone ID: MRT4577_139021C.1
gacaattcttgacttccaagcagtgcaaaagctgctgacctccccaaagtttacattcggttatgatgcactccatggtggtgcgggagcttattctaaacacatctttgtagaagagcttggtgctgatgaaagctcactgttgaattgtgtaccgaaagatgactttggacgtggtcatgcggatcctaaccttacctatgcacaagagttgcttgaacacatgggtcttggaaagtcatactcaaatgttgag

SEQ ID NO: 42781 - DNA, 330 bp, Zea mays
  unsure (1)..(330): unsure at all n locations
  Clone ID: MRT4577_139022C.1
ggatgatccatgtcaggatcgtcaaggagctggagnaggaattcagcggcaaagatgttgtaattggtgccacaaggaagattcttaaggcggccaaggaagggtccagttgtcaagggccttggaacaaggatcctaattgttttcaataatggcatcttggaggatgttgtcttccaagctgagattgtggggaacgtgtcaggtacgtctggatggtgccagatcatcagatctctttggaccaaggagagggacacacagatacaagctgacactacactacgtctacgcagctgtgntggaagatgtgtctgagtaccctatgcg

SEQ ID NO: 42782 - DNA, 191 bp, Zea mays
  Clone ID: MRT4577_139023C.1
cgccttcagctgatgtagcgaagcaggtcggaattaggatgactcttggccaaggtacagagacgtgtgtgcatgctgagcaataccacagctgttgccgaggtctgggatcgcatggaccacaagtttgacctgatgtatgtcaagcagtgcccagctgggggtcactaaagttacccttgtacttgcag

SEQ ID NO: 42783 - DNA, 376 bp, Zea mays
  unsure (1)..(376): unsure at all n locations
  Clone ID: MRT4577_139024C.1
catggttagtgaaaatttattcacctaaaaagctttttcaaatgcattcatacatcttaaaaagcattatctttatttaatatgtttaaaagataaaaagaatttcgattttgctcttaaaacatactatcttataaattacagccatattcccttagtaagtgataaagtctattttttcaaatcaacaaaaaaatcgttaaatataacctatgctcatgctctctgattccctttagttaattttttggctgattaaatcttctcgaaacctgtgtttaagactttccgagtgagatttgacggctgacttgttgtcaaaaatgaagacggngaactaaactttcctggatctgttggtgcccctgtagcgggc

SEQ ID NO: 42784 - DNA, 295 bp, Zea mays
  Clone ID: MRT4577_139025C.1
cgtggagggagcttctgtagggaggagcaccacacgtgttgttgttaccaggcttctctgtaaggtctgttgtgcccgtgatgcttgtatgctaatcctgccgtgccaacacctctgcgcatgcgagtcgtgcggaatcagtcttacagtatgccctctctgctaccttgcaaaggacaatgtgattcaggtggaggctcggtttggctgataaggaaagaggcaggcagggggggaagaagtcgtcatgcatgttttgttcttcataaggtgttagttgtaaccttgtatgagt

SEQ ID NO: 42785 - DNA, 273 bp, Zea mays
  unsure (1)..(273): unsure at all n locations
  Clone ID: MRT4577_139026C.1
ggaaccctacccccgccgccggcatcaagctcttttaccaaccctactcgtaccccgcccgcgccgcgagccgagccgcgtccacaccaggaagcggaactaggaggcatgccgaccatgtgggaccggtctgagggggtggaggtcttcggcggcgtgacgggaggcgagggctgagcggtgttttcgctggcccccaatatcggcccgctcggtctatactttttttttatcggcgaggacatcnacggggagaccgccgaggactggaag

SEQ ID NO: 42786 - DNA, 379 bp, Zea mays
  unsure (1)..(379): unsure at all n locations
  Clone ID: MRT4577_139027C.1
gccacgcttnctaaaacatattattatattcataagactatctaatcaaaattaaagaaggggttaataaaaaagaaggggggggccgctattaataatccaaacttacatacccgttcatacaaatatttagctcttcaatagtgtcacttaaatttaattaatttgccttctttttacaacttcattactttaaaaaccttttctttaccaaaattaataacctttcaacacattctcttttctccagttgtcatattaacaaaaaggcccacaccattctccctttctaaaaattttcacatccttaatggctatatttactccccctttaccttcactttaatccctataattttttttgtttactctcattttt

SEQ ID NO: 42787 - DNA, 630 bp, Zea mays
  Clone ID: MRT4577_139028C.1
gatgaatgaaacagtggcaagtgaagactcttatggcaggaacgatgtttggtgcttcgcttcgattctctgtgacacaatgtacttccctccctccgtccagcctttaaatgactgtatcatgtcattgtggtttaagtgagagttgtataactacctgaggaaactcacgtgttactatatgctaagatgctgtgacggtgagctattcagtgctcacttgtgttccaaaaaaaaaaaaaaaaaaaaaaaagatatgttccactggcaggcaaccatcatgggtcctcctgatagtccatatgctggtgttttcttggtgaacattcatttcccgccagactaccccttcaagcctccaaaggtatcttttaagacaaggtcttccatccaaacatcaatagtaatggaagcatatgtcttgacattcttaaggagcagtggagccctgctttgacaatctcagttttgctttctatctgctccctgcactgatcccaaccccgcccgacttgtgtgtgccatgctgacatcttttctcatactcatcagtacaagaacggatcggcctagtacgaggcgacagcccgcaacttgaccccaaaatacgccatgggatgaaaatgttcg

SEQ ID NO: 42788 - DNA, 405 bp, Zea mays
  Clone ID: MRT4577_139029C.1
acgctcacgcatgaacctacgcttgattcatctcctccttccgctcgaacactaatggaggaagctttgcttaaaacatatgctgttctgctcaaaaaaaaaaaaaaaataaaaaaaaaaaatgaactacaaacccttataaaaaaaaaaaagggggcgcccctttaaaaaacaaaattaacaccccggcattaaaaagggtgcccctttttaaagggccccaaaattaaaatcccttgccgcgaattttaaaaactttttaatgggaaaaacaatgtaattcccaaactaatatttttaaaaaaaaatcccttttaaaccatttggttaaaaaacaaaaagccctaaaaaaaacccctttcaaaaaattggcaattttaaataaaaaagggaaccccccttttt

SEQ ID NO: 42789 - DNA, 348 bp, Zea mays
  unsure (1)..(348): unsure at all n locations
  Clone ID: MRT4577_13902C.1
agcagtggtaacaacgcagagtacttttttttttttttttttttttttttttttttttttttttttttttttttttatgcatgttttattttatatttgttgtttttaaacacacgaacaccttctttattcggtggggcagtaacattctgcgggggaaaaaccttacagaaagccttgtctctcctggggggttggtgctcgcgtaacctgcggctccccccaggggtgctggggcccctgggggggtccggcgcggaaaccccgcctcccccgctttggctctgggggccgggggggcctccgggccggttgcccccgtgccccccccggntgtgttggagttgg

SEQ ID NO: 42790 - DNA, 477 bp, Zea mays
  Clone ID: MRT4577_139030C.1
ttaaaaaaaaaaaaaaaaaaaaaaaaaaaagaaaaaaaaaaaaaaaaaaaaaaaaaaaaaaaaaaaaaaaaaaaaaaaaaaaaaaaaaaaaaaaaaaaaaaaaaaaaaaaaaaaaaagggggggccgttttaagggacccaagtttacttccccgtccttgcaacgtaaaactttttttttgggggcccgcgaagggaaattaacggcccgtgttttaaaaccgtggggccgggaaaacccctggggtcccccaattaaatcgctttgcaaaaaatccccttttcgccagttggcttaatacgaaaaaggccccccccaaccccctttccaaaaatttgcccaccctaaagggcaaaggggcccccccctgtaccggccctttaagcccggggggtggggggtttccccccagggtgacctttccatttgccagccccttagggcccgctcttttcgtttttttccctccttttttc

SEQ ID NO: 42791 - DNA, 1114 bp, Zea mays
  Clone ID: MRT4577_139034C.1
cccagcgtccgctgtgagacgacggaagacaaaatcttgttgcttaccatgaagttgggcatgcaatttgcggaactttgacgcctggccatgatcctgtccaaaagttaccttagttccaaggggtcaagctcgtggtcttacgtggtttatcccgatggatgacccaaccaagcagatggttgtgacattcgcactcatctccaggcagcaactttttgccagaattgttggcggccttggtggtagagctgctgaggaggtcatatttggagagcctgaggtgaccactggagctgctggtgacttgcagcaaattactggcttagccaagcaggtatacttccctttgcattgcaattttgtcaacgggaatgttaatgtttgcaaagaattttgctggtcatcacaaaccattttgcactttatgactaagaaccaaactatgctgcaaaatcacatggtagagcctgttataattgacagcaatctatagatttgttgtctcaaggctttactactactgatcttcgttgccaactgtactgagatcacaatggtcctgcagatggtggtaacgttcggtatgtctgaaattggtccatggtctctgatggagggtggggcacagagtggggacgtcatcatgcgaatgatggcaaggaactccatgtcagagaagcttgcggaggacattgattcggcagtgaagcagttgtcagatgaggcctacgagatcgcattgaggcacattagaaacaacagggaggccatcgacaaaatcgttgaggtgctcattgagaaggagacactggccggagacgagttccgggcgattctttctgagtttgtggagatccctgtagagaaccgggttcccccagccacaccggcggccgccctccctgcctaaagtcaagtcttgtagggggtgaaatttgttgttgtaagatgttcatattttggattcttggtgtacactaattctacttcacctgccgggtttttggtagacgacatgtaacttgctcatggtgaactatagtaaaatgtaattagcttaaaaaaaaaaaaaaaaaaaaaaaaaaaaaactcgagaagaggccgcggtacc

SEQ ID NO: 42792 - DNA, 437 bp, Zea mays
  Clone ID: MRT4577_139035C.1
gtttttgccatatattttgctccattggtgaacctgagtcaggatgcgacatgaaacgcaaagcaggtccaggtgctggttggttaatcatttccgtaagtatatattctctatttcgatccaaggtcgatgcttcttatctagtaccacgagtgatatttaaaaaatcatttcgttgacctttattttgacacttgcggtttttttgtttctggactccttggcactgtttattctgcttttactgtgggcaccgactacaaatgtgtatgttgattgttcactcgatccaactcaacaatttaatcatatctattaacgaaattgaggattgtgtgctttataaattcaaaatgtctcaaataattctggcaggaacgaaacacgttggagtcgggagacaatgtaccatatgggtacgattttttttttatttt

SEQ ID NO: 42793 - DNA, 429 bp, Zea mays
  Clone ID: MRT4577_139036C.1
ccacgcgtacggagtagtctctctatcaaagcacttccaggcattggtcatacagtttcatctaaactgaaaagcaaagaaattgaatattgtagtcaacttcgcaatgtttcaaaggatgccctccacaaggatttcggaaaaaagactggtgatcttttatggaattattgtagaggaattgatcattcaattgttggatctgttcaggaaacaaaatctgtgggtgccgaaattaactggggagtcagatttaatgacaacaaagatgccgaacattttcttaacaacctttgcaaggaggtttctctacgcttgcagggttgtggagttcagggacgtactattacccttaaggtgaaaacaagaagggaaggtgctggggaaccaataaaatatatgggatgtggtgactgttaaaacacgagt

SEQ ID NO: 42794 - DNA, 382 bp, Zea mays
  Clone ID: MRT4577_139037C.1
aaccccccaaaacaaaaatttttaggggggggggggggggccattgttccaaaatttcccggggccaccccgattttaaaaggggttaattttttggggtccaaaggtaaaaataaaaggctttggggaaaaaattatgccttttcaaagaaaaataactttttttttcttggggggaattttgggaacatgaaaacaacccttataggatccaagtaaaaaaccttgttaagcctcctaaaggggcctaaaaacaccaaatttccccttcaggaaaaggggtccccaaaaaaaacaaagggccttaaaaagtttataattgagcccccactgttcctgggcgtggacctgggggtcccaaagaaccttgagttttttcacc

SEQ ID NO: 42795 - DNA, 1455 bp, Zea mays
  Clone ID: MRT4577_139038C.1
cattgggaacctcgagtccggacggcgactctcccactcctctgtcgcttccgccgacacctgagtcttgtcgctgccgccgggatggccggagtcaccgccaccgggatggccggagttcccgccaccttctcctcagccaccgctcagatcgggggcttcctctcgaagaagccttacgcgccgccgttgtgggccacgcacctctcccccatgccttgccataccttctcgctcggccatttcccaacaccgattcacaagtggaatctgcccaatttgccggaaggaacggaagtgtggatcaagcgagacgatttatcaggcatgcagttgagtggaaacaaggtccggaagctggagttcttgatggcagatgccgtagcacaaggcgcagactgcgttattactgttgggggtatacagagtaaccactgccgtgccacagccgtggctgctaagtatctcaatcttgattgctacctgatactacgtacctccaagcttcttgtggataaggaccctggtttggttggcaatcttcttgtcgagagactagttggggcacacgttgatcttgtgtcaaaagaagaatatggaaaaattggtagtgtggctttagctgacctgctgaaaaaaaggcttctggaagaagggaggaagccgtatgtgattcctgttggtggatcaaactcattgggaacttggggatatattgaggcaataagggagattgagcagcaaattcagcaatcttctgatgttcagtttgatgatattgttgttgcatgtggcagtggtggaaccattgctggccttgctttaggatccagattgagcagcttaaatacaaaagttcatgcattctctgtttgtgatgaccctgaatacttctatgactatgtccaaggcctgattgatggacttaattctggtttggattcacatgatatagttagcatcgaaaatgctaaggggttaggctatgccatgaacacagctgaggagcttaagtttgtcaaagacatagctgcatcaacaggcattgtccttgatccagtctacagtgggaaggcggtttatggtttgctaaaagacatggctggcaatccagccaaatggaaaggtcgaaaagttctgtttatccacacaggtggtcttcttgggttgtatgataaggctgaccagttgtcatctttggctgggagctggcgcagaatggatcttgaagattctgttccacgcaaagatggcactggtaagatgttctgatcagtatggtccatgtgattccatgatggctcattcttgcaaacattgtatccattacagagttattactcttaaatttgtgcaagaaaatgcagaatagatggttcacattgtatagaacactgatgcaatttaagaataaagcacatctttctgccctttaaaaaaaaaaaacaacaaaaa

SEQ ID NO: 42796 - DNA, 708 bp, Zea mays
  Clone ID: MRT4577_139039C.1
ctccctatatctctctccttcacctcactctctctccaccccgacccccgctgccgaatccccaaacccccgccgtcgcaatcatccgcccgtgggggcagccgcgcgcggatttctgtggactccggcgtccccggcccggattgatcccgccgctcctgctcccctcctcccgattctcgccatccaatcctttgctcccttcctttcccggccgcctccctggtttcttgccgaaattgcctgccacctgtttggactctggacgcgcgcataacttgcctcgccattgtggctgctctgctcagcccggctgcttctttggatctgctagctcgcctgccgccggcctccgggccgcgcatgcccgtcctcccccgctccgaatctcgtcctcgtttcggaggtcctcgtatgcggatgaggaggggatcctgacctgactcttgctcggctccggcggtccccttcttggatcctcgctcgcggcggaggcgtgccgggatgggtttcttgatctgcgcctgcctcctccagctgctcttcttgggctcttctccggcggcggcgcagtcgccgtctccggcgagggccctggacgcaatgctgcagggctacgcgtaccgggccttcgtccggccgcacaccggcattgtctacaacggcaccgtgcccgcggacctcgccggcgtcgcggtgtcccggctc

SEQ ID NO: 42797 - DNA, 254 bp, Zea mays
  Clone ID: MRT4577_13903C.1
cccacgcgtccgcgctgcagcaggccgtagttgcccgagctcacgacgcccagatgcgagatgatcgacgcgttatgcacctgcgcagtgtgtcaaacggatttagtttccttcttcttacgttgtggatcgatcgatcaatgaccgtacgtacgtgtacgtacctggaagctgtacgttacttcctgcggcgctgtttatgagactgaaggtgaagccggagtaggtggcgttgtcgggcacgccggtgaact

SEQ ID NO: 42798 - DNA, 525 bp, Zea mays
  Clone ID: MRT4577_139040C.1
cccagcgtccgcccagcgtccgcccacgcgtccgggcgatcccgttttttgattggagaattctctgctccggccggccgccgagcgccatgccaaaaaaaaaaaaaaaaaaaaaaaaaaaaaaaaaaaaaaaaaaaaaaaaaaaaaaaaaaaaaaaaaaaaaaaaaaaaaaaaaaaaaaaaaaaaaaaaaaaaaaaaaaaaaaaaaaaaaaaaaaaattaaaaaaaaaaaaaaaaaaaaaaaaggggggcccacttataaaaaaccaaatttctgtgaccctttccatcaacaaaaaatttcaatgactgggcacaaaaaaaaaaatgatgggaagcatgtacaaaatattggacctggaaaaacccaggagtgcaccaacttaaagaacgaaataaaaaacccccttccaaaatgggggggataatataaaaaagcccccactgggagccccttcacaaaaatatggcaatccaaaaatgcataaaagaacccccccttgtaaagggcaaaaaaacagggggg

SEQ ID NO: 42799 - DNA, 447 bp, Zea mays
  Clone ID: MRT4577_139041C.1
gttgggggggggggttttaataaaattattttttttgctgtttttttttttttgctctcccttttttgtttttttttgttttgggtaaacatgcaggcgtaaaccttgcggggggtttttttttttttttaaaaaaaatctgaccccttttttgttttgtaaggggcatcccctccccgattttcttcttaagccctaaaaaaaattttcagccccggcaaatgtccgcgggggggaaaacccctttttgaaccttggcggtttttcctaacactttttttaggcactgcgttcccaaataattttttggtttttcaggctttttccccaatgtgggggggggggattttccccccgcctgaaatttcttcttgggctcccccggggtttacttcccccgctacattttgggtgccattgttgttgttaggggctcccagtcttttt

SEQ ID NO: 42800 - DNA, 231 bp, Zea mays
  Clone ID: MRT4577_139042C.1
gttcattcatcttgcttttactgaaggcaaaagcttgcatttggacagacaggctttgtcccgggtcacaacaaagtcgaggaaacgttaccaaaagtttacaaccctcattcttgctcgggccagattcccagttttcctacccgtgcatgccacctcatagattgtccttctggccccccaaattaattatactggcccatcggctgcaccgccgtaactgggaaaacc

SEQ ID NO: 42801 - DNA, 258 bp, Zea mays
  Clone ID: MRT4577_139043C.1
aaaaaacacgaattttttttattggccattaaaatttcaaatttaactccacacaaatccaatcgtcaatggtccagcgggggaatttgaaatgacaaactttttcgctaattttggaagaggcccacctgctcgtaaatagaatcgcgggggggggcacacaagggttctcaagcttatttggggcaagtgaagtcctttgggcaaattttgccccatttgttggggatgaggtttaggctaaggggcccgttgggg

SEQ ID NO: 42802 - DNA, 264 bp, Zea mays
  Clone ID: MRT4577_139044C.1
cgtccggaggccagctatgacatctgccgccgctctagatacattgagcgcccaacctacaccaagctcgacttgctagagtcccaggccatcttatccctaactgcttccctgaggatcaatggagctctgaacgtagacgaaaacaagttccagaccaacctggagccctacccaaggatccacttcatgcatgcgaccaacgctccaaacaaagctgactagaaggcccacaaccaacaacagtcacagagccaaaacaac

SEQ ID NO: 42803 - DNA, 519 bp, Zea mays
  Clone ID: MRT4577_139045C.1
ataaaaaaaaaaaaaaaaaaaaaaaaaaaaaaaaaaaaaaaaaaaaaaaaaaaaaaaaaaaaaaaaaaaaaaaaaaaaaaaaaaaaaaaaaaaaaaaaaaaaaaaaaaaaaaaaaaaaaaaaaaaagttttttccttgggccggaacccccttagggggaatttttgaaaatttccttaaaattggggggggttcaagcttttttttaaggggcccatttccccttttagggggttttttaaaaattaattggccgtgttttaaaaacttcggaatgggaaaaaccttgggtttcccaaattaattgcctttggaaaaaatccctttttccccatttggctaaaaagcaaaaaggcccacaccaatcgcctttccaaaaatttgcccaccctaaatgggaaatggccccccctttttccggccctttaaccccccgggttttgggttttccccccaaggtgacctttaaatttgccaggcccttagcccccgtttttttggttttttccctttcctttt

SEQ ID NO: 42804 - DNA, 299 bp, Zea mays
  Clone ID: MRT4577_139046C.1
caggatatcacctgaattattaatgaatgcccaggaagtaattttcttctcattcttctaaaactactgcctttcaaagtgcacacacacgcgtccacatacactgcattcgttgctccagtataaattacatgcatgagcacctttctggcttttaagccaatataatgggctgcaaaatgaagacaccagagtgtatgcatacaaatctcactgtattaaagatgcaggttttctaattgtacccttcttgtctctctggcaatcttgcccttaatatccctggagttcctcatcag

SEQ ID NO: 42805 - DNA, 311 bp, Zea mays
  unsure (1)..(311): unsure at all n locations
  Clone ID: MRT4577_139047C.1
ccccggcccaaaaacggcgggtcttgtttggggggggataaaaaagaacgaggggggcgcggccttctttgttggtcttccctacccggccttcttggtgatgcttcgttacgccttcggggacaacaaaaccaaattttttggctgggttttnnangancanncnccctttggggggggggggggctttgttacgnccactcaccccatatctgcgggggggggggggtgccccctggacggaaagaaattaggcaaccggntggggcgggtggctcaaccgcgcccctgaggcccccgcgatgtcggcc

SEQ ID NO: 42806 - DNA, 190 bp, Zea mays
  Clone ID: MRT4577_139048C.1
ttaccctccaaaaaactccacggagatataaaagaactttctgtgttttttacacttcctggtgaaaaacctgatgccagcaaaatcgtggaagtttacaaaaaatactgaaagaaatggaaagctccttaggacaggggcaaaaggatgtttcgtttaatacatatccaagagctgataaacaccctcc

SEQ ID NO: 42807 - DNA, 398 bp, Zea mays
  unsure (1)..(398): unsure at all n locations
  Clone ID: MRT4577_139049C.1
ggggaccgtttgaatggggtcgttggactggaggtgcaggggggcctgcaatccggccggggggatcaagtccgtcccctcccaatccggcaaaggggaggatccaatctggagcgcctctttttgccaggagggggatggaataatggaaggattttttttttccagccccccccttgtttgggtgcaggcccaggccatagttgaattaaagggttcgggtggggtccacacagggggttaaaagaaggggaggcttgcttgtttgatccaggaggaaaccactggagcccaatttttaattttttttgggngggagggttcaaaattgggggatccagccatccagggctaaggtgggtgggattccatggtttttttaagccgttagggcaaaa

SEQ ID NO: 42808 - DNA, 339 bp, Zea mays
  Clone ID: MRT4577_13904C.1
tctacactgagtcgtactagtaccctgactgtccttagcttcaatcagtttacaatatatgggacatcagacgtttctgggcggtggtcacgtcagattacctcaagtccatgtcgagttgcgaaggacatcagttcacgcaagtagactgcgcacgtgacgcgaagtcgcagctgcaggcagacggagtggtcctcaaggcccataatccatcttgtgagtagacccagaagttgttcaacggattggtgcacgagtgtctgcgtcgaaagagggaccgtgggacagactgtggctgatcagtgacgggaaagactggctggtctgcctctaaagttc

SEQ ID NO: 42809 - DNA, 1006 bp, Zea mays
  Clone ID: MRT4577_139050C.1
ccggccgggtttataccattgtatctgaaatctctatctctgctaatccttaagggtggtgcgagggcatccaccatcaccgtgcccccgcccggtcccgcgcatcccgcagccgtgccccctgtgtcgccctcagctcccggaaaacctagcgcgttgtagccgccatcaacgcctccgcacaatcccctgcccgctcggccgcgcagccttggcgccgtgaccgccgcctctgctccctcctccatcccgcgcgcgccccgcgacctccgcctccccctccgtcatcccccatccacgcgcctcgccgagaatcccgccgcccacgcccgccccctccgacatcaacgccaacggcggcttcctgtcgtatgggaacatggagagctacgcgatgtgggtggcgaccggtgtggcgtcggccttcttcgtgtccctcgagcgctgctcctgcatccacctccacaccgtggaggacgacggcgacgaggaggaggaggacctcgaggaggcccgccgctccttctcccgcccgatccctgagtactactacgaccggtgcggctcctccgcctccgtcaccaagatgtgacctgaccggaccgcgcctccctctgcccaagaatgcgtggtgatacgatccggttcttgatctatgatgtgcccttgcttgattcgttattgggtctctagccaagaagatgaagaacaacaacaacaacaaaaatatatatatggtgctgcgtatgcccattgtaacagttgatgagatctgtgactccccgtgccgtgtcccgtgagttgctgatgatttcatcccccccccccccccccccaacacacacacactttttttaatctttcccccttattatggggtcccaaattgatgcggagatctcgagcgactctgcaaatttcagatgagtggtcatttcaagattccaaaaaaaaaaagaaagaatcttcaaatttcaaacgagtggccaggggattaaaaaaaaaa

SEQ ID NO: 42810 - DNA, 754 bp, Zea mays
  Clone ID: MRT4577_139051C.1
ataaattataccacatcactcacaaagaattattttaattttatttcacacctcatatattttacatgttaacaattaatcaaacatttcaggtttgactaccaaaatatcctacaaaattaacgatgacagccttattggataatcgtttgtattactaaatcaattcttcacgctattaattctccttacataataatcattttaaacttgagtttcgcgtgacacgaccactttatacgtatgtacacactctattgatgcatgaagcaagacatcacgacatacatctaatacctcgacaacgcacccgtgttaagaataaaacaatctttacgaacaactaattcaaccaatccattcatcagatcagtcaataaaaatagtaaatcagcttaccgtttcaacagctgactcgaatccgcgagatcggtaatgattttccgatcctgacaatttgtcgagcgcttagcaggtgctacacgaacttcacgcacaccaccatccaatctttagacatcttcacttggggattcttttgtccgtgcgatcacaattcggaggcatcacggagggaccggcatcgagacggggcgacggaacaacgacgaactagcgagctgaaccacggcgagtgatattttgacgtggatgagcaatggcaactggcggacacggaacggcgaagtgaggtgcgcagccagctagcaaagatgaatgtgtgcagcacggaagcgaaagcagaacttgatgg

SEQ ID NO: 42811 - DNA, 717 bp, Zea mays
  Clone ID: MRT4577_139052C.1
ctcgagtttttttttttttttttttttttttttttttttttttttttttttttttttttttttttttttttttttttttttttttttttttttttttttttttttttggaaaaagaggtttttttgggttttggggccccccccaatccagggaaaaaaaaaaaaccttccttggaacccccggaaacaggggccctaccaaaacatgttacagcccgagcgaaccccgcagaaacggggtaccccttttttttaaaaaaaacggggcagggttgacaaaaatttgtaaaagggggttcaaaacgtccccccccccagggggttaaaaaaactccgggggggggaggaagctcccttggaaaacccaaattttcctaacgtcccccccttttttgaacctgaacagaaagccgccaatcctccgggggttgggcccctttacctgggacaaacccatgggggggccccccataaagagcttccggagggccccggttctgtttttccgggttttaaggaccccaaccgccccaaggcaaatttgggggtggggtttttttgtcaaagggccgttaaagggcttctcgggtgttttaacccccgaagaaaacatggggttttgattgggattattacaaaaaatggccgagggcccccccggggggggggatgggttactcgccctcccacaaataccttgctccggggggctggaaa

SEQ ID NO: 42812 - DNA, 821 bp, Zea mays
  unsure (1)..(821): unsure at all n locations
  Clone ID: MRT4577_139053C.1
gccgggctggggacatcgctgtcttttgtctaaaaaaaagagatcgcaaccacagcgaccacgacgacgaggacatcccacccacgcgagaggtctgaaacccaagggcaaaccaaccgaccgattaacccaccaccgcctcgcctcgtctccgctctcttcctcggacaaagccgggccgttcggcgggaggcaggggaagcacgggcaggcagccatgaacggcatcaaccccaacggcgggttcctgtcgtacgggaacatggagagctacgcgatgtgggtggcgaccggcgtggcgtcggccttcttcgcgtccctcgagcgctgctcctgcatccacctccacaccgcggaggacgacggcgacgaggaggaggaggacctcgaggaggcccgccgctccttctcccgcccgatccctgagtactactacgaccggtccggctcctccgcctccgtcgccaagatgtgacctgaccggaccgcgcctcccctccgccccaagaaatgcgtggtgatacgttccgtttcttcatctatgtgcccttgcttgattcattgggtctctagccaagaagatgaacaacaacaaaaatatatatatatggtgctgcgtatgcccattgtaacagttgatgagatctgtgactccccgtgtgtcccgtgagttgctgatgatttcgttcccccgtttttttaatctttcccccttattatgnggtcccaaattgatgcggaaaaaaaaaaaaaaaaaagcggccgctttttttttttttttttttcggaacagatatgcacttctatattgattactgaat

SEQ ID NO: 42813 - DNA, 837 bp, Zea mays
  Clone ID: MRT4577_139054C.1
ccttctgcccgtttgtctccccattccgaatcgcatctcgcggcggccggcgatcccccagaagagaagatccatcggggttgcgcagcgccaccgccgacggaagctccagcgcgcgcggccgcaccaccgtgacgcgcctctttcgccgcgccttcggtcatatttcggtaggggggatcgagcagggctggttcgcaggagaagggataggagaggatgatactgctccaatccccatccaggttcctactccagatcctgaaggatcgcgtcgtcagcggcgacaagggcgtggacatcgattgccacacggtggaattcgacgatatgcggtatcatatccagttttcaatgaggaatccaaaggtaatggtgctatcagtggcattgcccctcgcacctcctgaggctattctgcacgacgggcttcctcttggtgccattgatgctataaaggcggcatatggggcagtggttcaaattcttgatcctccaaaggactgctttgatgtcacaatgaagataaacttaacaaagcttccgacagatgaagagcagcggaatgttgtcttgacacgaattgcatctgtgagagaggttgtgctgggtgcaccgctgaagcttctgctcaggcatctagcttcaaagacagtggctcctaacgtggataagctggttgcccttgttcaccgtcctaatgaatcgttcttccttgctccccaggcagacaaaagttacggttgtatacccaatgaggttccaggattcgattgatattgtcttggcaacttcgtttctgcaggaatttgtagaagcaaggcggactgctgcact

SEQ ID NO: 42814 - DNA, 343 bp, Zea mays
  Clone ID: MRT4577_139055C.1
atttgatcttgaaggtctggatccccttttagctgatgacccagaggatccactgaatattatcatatctaacatgcacaagatattattcaacattgattcgtctgctactacatcaaataggatacaagatgtgcaggctgtgctaatttgtgctcaacgtttgggagcaagaaatacaagagcaggacaacttctcactaaagaactggaagaatttagggcaagtacttcagccgattctgtcaccaagcatcaatcacgttatgtgttgcaagtgataacatatgtaacacaccatcaataacaggtgggttgctctacgtgatgctacaggggatta

SEQ ID NO: 42815 - DNA, 141 bp, Zea mays
  Clone ID: MRT4577_139056C.1
ggatagtaagatccacctgaactgtctgaccgttgttacgctactgcatattaacatagtcccggatcgtgccactcgtactacagcccatgtgggctgtcatgaacaccaggctgaacgagtgttcttgccatcctcact

SEQ ID NO: 42816 - DNA, 213 bp, Zea mays
  Clone ID: MRT4577_139057C.1
acagcaaattatttttattttggaatttgttatgaccattaactggtgtttgagtcacagaagatttatatttatatatatatatatatatatgctagcggttttgaactggtgattcttctccccacaggatttatatcatgttacttaaaaacagattttttaccatcccaacttcaaacagagtatacaattatgcatttattgggttgg

SEQ ID NO: 42817 - DNA, 460 bp, Zea mays
  Clone ID: MRT4577_139058C.1
ggttcatctcatctttttttcatggtgttttatttattgtggtggaagcaagatacaagtacggcggtgacagcagccatacaaaaaaaaagagctcaaatgcatagcctaatgtaccaacatgtaaaccagcagcgtccgactgactaaccaacatgcttaccgatccatcaaattacaatgcgaaagcaaacgcccgatccttcctgagatccaccgagcattatggggagatccaaacctgcctcaaaaacactacaagttgagtgccccttgttacattgtaaacgagactgggtgctctggtcactaacggcttaaccaacagcggtgttctgtacaggagcggggggtggctaaaaaacaggcgcgacatgagcgggggcaccatgtggcttgattcaaaatgctggatcagcccccccagcatatgaaaagacctcacgtgctggattatggg

SEQ ID NO: 42818 - DNA, 333 bp, Zea mays
  Clone ID: MRT4577_139059C.1
ggattcttttaaagtcgaccaacccgtccgcaaatccccaaagcctccgaccccttgggtttttacctccgccgacgttgcgcacgcatggaacaagcgacatgggcgtatacacctttgtgtgccgcaacaactgcggcgagtggaccgacaagcagcactccggcgagatcgaggcttacgccgctaccccatacgagctgcagcgcctgctcatcactgacgcctccgcggccgactctgcctacggcgtgcagtcgtccttatacatggtcacccccagctacgtcgtgttccaggtgatcgtcggtgctgtcggtggtggtgcaatga

SEQ ID NO: 42819 - DNA, 488 bp, Zea mays
  Clone ID: MRT4577_13905C.1
agcaacctacagagaacaaggcatttcttcttgcattttaaatagcaaagggcagcttgcaacagggcacatacacacacaagcacatttcgcccatctacggcctacgcataaccgcatactggtatcagagggcctgctaaacatcagatcactccagacagcacagcctacgccttattgggggacttggcggtcttattgggcgactttgcctccttggtccccacactgaacccctgctcccccggcttgttgggcactacaacatggtcggtattggggagcacacccgcgggagcgatagacacgccgtccaacaagtatgcaagctccttatccttgacgatcacgcagaagcacctggctcgtgataatgcgagtcttctggtggctcctgggaagacaccggcgagctcaacaacctcaccacgcaggtattcaacaacagggggaaggcaaaccggggccccagctcccacacgctg

SEQ ID NO: 42820 - DNA, 324 bp, Zea mays
  unsure (1)..(324): unsure at all n locations
  Clone ID: MRT4577_139060C.1
tccctccccctgtctcagctggtggaaacaaccaatgaagccaactcatacccatccatcctcgtcgttcgtcctcctaccccacccagggactgacgaccgaccccaaaccagccgcaccaagtaacacgcgaatgctcccgtacgacgtctgctataccatcttctagggcagcttctccaatgtcaagcacacgcgcaactcccgcaccggcgccgtccgcgccatcaaggtgctcgaccgcaaccacgttcttcgacacatgatggtcaagcacatcaagcgcntagacttcgactattaagcatatcaaacatcccaat

SEQ ID NO: 42821 - DNA, 161 bp, Zea mays
  Clone ID: MRT4577_139061C.1
ttttcacttttccggcgccccgtacctggctggtgcgggggcacatgctatcagtagagggctacccaagattcgctgaaaggtccgccggagtcacggcgccttcacattcactagcgacgctgggagcagtcggtcagctaacaccacctccgtgtatt

SEQ ID NO: 42822 - DNA, 881 bp, Zea mays
  Clone ID: MRT4577_139062C.1
tgcagagcaggtgagcggtgtgatccatgcgtgccgcgtgtgacacgtccggctcctcctgatcctgtcttaattggcacagcatactacagcatgtgctcactcttctcgaattcatcctcccgcaggacttcctgaacatgttcttcagggatcagtacaggccgatccccaacgtgtacaacctcgtgctggccatgctctggaggcaccccgagaacgtgcagctggagaaggtgaaggtcgcgcactactgcgcggcggggtccaagccgcggaggctcacgggcaaggaggcgaacatggacagggaggacatcaagacgctggtgaacaagtggtgggacatctacaacgacgaggcgctggacttcaaggccctgcccctctcgccccgccgacgccgacgacgaggtggaggcggtggccaagaagccgctccgcgcggcgctggcggaggccggcacggtcaagtacgtcaccgcgccctcggccgcgtgaccccgtgcttcggcttcccgccggtggccgcgctatggcttttgcgcggtcgtcacaagttcgtaaagaagaatctcactataaggcctttgttttgaattttgtttatgaattagggtgtctaattttggatcagttcctttcccttgtgtgtctaattagggtgtgagcttatatatagtaccaattcaaggtgcaagcgttcgtcaggaattgggctttatgaatacgcccttcggtcacagctagagtatttgtcctgtaccgagggattatgtgtattttgcttggtgaattaatatataaaatacgaagccgagaaaatatggacacatttctgtcaaacaaaaaaaaaaaaaaaaaagcggccggctcgcgat

SEQ ID NO: 42823 - DNA, 585 bp, Zea mays
  Clone ID: MRT4577_139063C.1
ctgcgatcaatagcctgccctagtcactccttgagcagaaatacgactcgcgttgcccaaaccgctctcagatgaaccccagatcccggacgccctctgctgctcaggtagaaccatagcctactgacccatgcgtcggactgacaaacctgctcgcatgcccgctgaaaccaaggctcctagaaagaaactggacgccaacgttgaccgtaaaaccgcaccctcaacatgtcccaccagacaagactcagtcctgaccgcgcccgttaactgcaagctcttcggtgaaataccgcaacgaactactaacaagcaactgaaccgagcctcatatacgagatcgatcctcttaccgaaagagcgtatgacagagtgacgattgcactcactgattgcaacgacatcgagcttagatgtccatagacgagcttggattgctctctagaggatgcgagaggcgcacccgacggcactaaacaaagacactaatctgtgccacctccatgacacccacgggaacatcgagcccaacgacattcatctgaataataggatccacggagcaacagccgaaatactctgcca

SEQ ID NO: 42824 - DNA, 309 bp, Zea mays
  Clone ID: MRT4577_139064C.1
agattaaaaaaaacgggtcattacgcgatcacacagagaagatcaatagcgaggatggagctgctcaaggagctggtccccggctgcagtaaggcatcaggaacagcgttggagctagatgagatcatcaattatgcccacgtctctacaaagtacttgacaatgattcttgcaggtggagacccgacgagccatcttggcgggctagatagctttctgaccacggagatcaatgtgtgattaagagtttcatcgtctgccccacctatgtactttcaagaagcttgttcgtaaatagctaacatatcc

SEQ ID NO: 42825 - DNA, 310 bp, Zea mays
  Clone ID: MRT4577_139065C.1
gactccttttttttttccattttttttttttagcttttttttttttgttttctgttttatttttttttttctttctcttttttctctcttcttatctatccggttgggttttgtgtattgcctggggtgccgcccgagtgagacaccctccattacgggcgatgccgcgcactgcccgctggcagtcgggaaacccgccgggcctgctgcgggaccgaatcggcctgcgcgcgccgagaggcggccggggcattgggcgctctcccgcctgcccggtccgtgcctcgggtggggcggtcgcccggccgcg

SEQ ID NO: 42826 - DNA, 203 bp, Zea mays
  Clone ID: MRT4577_139066C.1
aactgcccggtccacgcgttcgtttttttacgtacacggtctccctctttctgacactagctagtgagagtgaggcaatcaagagcagacaaggggtaattgagaagctaacccaatggcgccactcatttgagcactcccagaagcacaactaataccatggagaataaccgggagcccacagaagcccccggagaagggaa

SEQ ID NO: 42827 - DNA, 430 bp, Zea mays
  Clone ID: MRT4577_139067C.1
aacaagcccctaaaaagggaagggggaaaccggaaaaggcctgggaaaatggcccggggggggggaagcaaaaaaatttggaaccaaacggttggaccggggggaaccccccggagaaaaaaaaaccggggggtggcaacaaaagctggggataaaaactatcccaccataaacaaaaaaagggctaggggaaaaaaaagggggggccccaagaaggggggaagccaaccccaaccgaaaaagggaattacccaaacccatttaaaggaatgggagaaaaaccggaccgggggaacttttggctttcccagggaaagggacaaaacaaagaaaaggggggtcgggcaaaccaaaaggaaaacccaatttctggttttctggaaaaaaaaaacaaaatggctctttttccccaaaagggaaatcctttttc

SEQ ID NO: 42828 - DNA, 954 bp, Zea mays
  Clone ID: MRT4577_139068C.1
aattcggcacgaggttttttgcctaataaaaatgaaaaatgctcactgtagtggattcccctacaatttccccctaaaaacaatagtccgttgaattcataaatttacaggtccttgtgtggctactgcattccgtggacccgttgatggcaacgacaagaagggatcgaccttctgaggccaaatagtttgtacctacaactccaccatggaagtttctcgccaccgcaccctcaagcagttgaatggtcggtggtcgacaagcaaccgaaagattaccctcttcaatgacatctacaactgcatgtacgcagcccgaccgagtggagtagatgatgctatgttgcttgaaacggtcaaggagagctttcacaacatgcccggagaaaccgactttaagctagaagcacgtggtgcatgaggcacagtgatgatgacttcatcgatggaagcaaaagatattgtttcaacttggacgatgattatatctccgcgtcaccgaatagtgtgagcgccccgcaccctattggttgcgataaggcaagagttcaacgcaaggggaaggggctagcaacaagtacaacgagtctccagtcatagagaagaggaagaggatgttgaacaagctatacaaggctagccagatgatggcccaatctaaattgtttgagcaattcaataggttgttggatcacttcatcattgatatgggtgaagatacgaaaagggttactagttgtcctttaaaatgttgacaaagcaatttaaattaaatgagaaagaagatgcagaagaggtggaaaaggaagatgacgaagagtagtagcagtgtattggttatttttatgaattatgcattttttatttttttaaaagtttttacattttaattgtttttatgaattatgtaaattttatttgcttaattatataattggatgaatttttttcaat

SEQ ID NO: 42829 - DNA, 439 bp, Zea mays
  Clone ID: MRT4577_139069C.1
gcccaaaaaagggggccaaaagaccccaacgggcaaggggggaggtcaaacaggggaaaaacagggcgggaaacaaacaaccggggggggggggaacaaaaaaaaggggaagcaagcccaacatggggaaccggggcaccccccaaaaaaaaaaggggggggccggggggaaaaaaaaaaaagggggggccaaaaaaacctaaaaaaacttgttgaacgggcccctcagggggcccttgggggttgagaaaaccccccaaagggaggaccgccccaggggggacaccccgccccacaaggtaaaaacccacccgggcttgtcccggccggaaaaaaccaactggatgcccaccctgcaaaaaaaaggcccttgggttttgaaactttgggtccgggaaggggcaagtttgtttgccaaggcaaacaaaatttgatttgc

SEQ ID NO: 42830 - DNA, 291 bp, Zea mays
  Clone ID: MRT4577_13906C.1
atgattctgtatgttgtttcaactagatcaattgttacataataattgtacattagttaatctttaaactaaggggggacaaaaatcaaaaattggagggagaacaaaagactgccggttaaatgcggggcacaaaaaattgaaggggcaaaaaaaaagaaacttgtaaaagggggggaaagtccccaaaaaggattttggggggttgggggaactacaaagggggggaaaaaaaaggcaaggggacgggggggatttgcccccgggaacaagaaaaacacaagggggggg

SEQ ID NO: 42831 - DNA, 588 bp, Zea mays
  unsure (1)..(588): unsure at all n locations
  Clone ID: MRT4577_139070C.1
aagactatacttatgataataactgacacccacacaaatttaatctttaaaaatatctctgcatgtaacgtaggaaaggtgttanataaagtaagacgaaccttctcctctctttctcacactatgtctagctgagtgacttatcttaaaaatctacgtctcttctatgacgtcgcttctatcatctcccatggcggcttcttcttcttctggcagacggagatacgacgtttttccaagcttcagtggggatgatgttcgcaagacgttcctcagccatcttctcaaggctctcgacggcaaatcaatcaatacattcatctatcatggaatccatagaagccccacaatcgcccctgagcttatatcggccactagagaagctatgatctcaatcgtcatcttctctaagaactatgcttcttcaacgtggtgcttaaatgaatttgggtgaaatccacaagggcttttaatgatttacgccaaatggtgattccagctttcactacctttatccttcgaagttaaaaaacagaccggccaatttggaagggtctttaaaagacatgcaggtcaacaaggacaaac

SEQ ID NO: 42832 - DNA, 405 bp, Zea mays
  unsure (1)..(405): unsure at all n locations
  Clone ID: MRT4577_139071C.1
aaacgnaaacaacaaaacangngggggggggagagttgaatacaaaaagtggggtcctcgcaccacgaaaaaacacgggcacaggcccacccacacgtatacatacgagagaggacgtagccacgctgatgcgggcatcacacgagcgcatacatacggacgcgcgcacaacacggggggggctcgaaatcacaataacacaggcacgcgaagcacacggggagggaccacgagacgggaggggcaaccaccccaaaaaggggtgcgtgttctccccggcggcctcctgggggtccttggggcccttcttataaaaggggcgctcgcggaaagcaaagccgggggagccgacggacgccagcggggggacctattagggcaacgggggggggagcgcccgccccg

SEQ ID NO: 42833 - DNA, 850 bp, Zea mays
  unsure (1)..(850): unsure at all n locations
  Clone ID: MRT4577_139072C.1
ctcgaggccggccggggcgtagtaggcgctcatcgctcccaatatttttattggccgccatcctcatcctctcagcctctagctctgtctcctctcctctgcccgtcgcgtgaacttgctgagctccatccctggccgtgccttgcctaccacgcccaccgccgctccgctctcgcgtccacacggagcagctagagtctggcgcggcgaactaggaaagaagcagccgagcagctcgccctctcttcctcaagctcatccccatggtcgccgtagcccagctcggccgctcctcctgctccctggcgcgctcgcccatgccgcgtgctcctccatggccactcggcctggccgcggtggcgcagtcggcggccgacttggaccggccgcgcactggtggcgtttgggaagctgcgggcgcaggagctctggccgtgctccctactgccgttgccatggccgcggtgccactttccctcgccatggagctcccgtgcacgcgtgccccctggtggtttagcttgccgagtctcttccccagtctgagctctctctctacctgtcgtcgcgtcgttcaccgtcgagcctcgctgcccatcacggagttccctgctgtcagcctccgcacccgtcctagaccgtcgttgtcagttcgcctctgtttcgtggtggtgttgcgctgccgtcgagtcctaatgtcgatctggtggcgntcgatttgaagttctgcacggattcggccacgtccagcactatccatgtcattgtcgttcgccttcgcgctgttgcgaaagcatcgtcgnttcccttcatgtgctagtcctcaatctccgcctcggcatcaccctct

SEQ ID NO: 42834 - DNA, 284 bp, Zea mays
  Clone ID: MRT4577_139073C.1
tttttttcctaaagtcactccgctataattcatcggaccatctttttttcctaaagtcactccgctataattcatcggaccatcgcccaacggtcgactgtggtgaatagtgaacagtggacaacaccgaagtcagaagtcagaactgcaaagtcagaacacactggactgtccggtgtgccacctgactttctgttgtcgcaagaggacaaaggacttcaacggtcaactgctctgactttctgttgtcgcaagaggacaaaggacttcaacggtcaactgct

SEQ ID NO: 42835 - DNA, 378 bp, Zea mays
  Clone ID: MRT4577_139074C.1
gacgccggacgccccatgatttcgctctgtttttcccgtctagacccaaccgtaccagcggagccgcaatgctgacgatggagagcggacgtagacgtggtcaggacctaccttcgacaccatccactgcaatccattgggtatcctcacgctgattatatgcacaaaacgccgggccaccggtggaaagcataacacgcggggcaagaagcgaaagtatgagcttggccgccagcctggtgacaccaaactgtgtaactattacacaatcaggaaggtccctcttccttgatggaacgtgaaaaggaaggctttcctactggatacaagttactactcctggggaagtgggggtcttaaccccaagaaccaaattct

SEQ ID NO: 42836 - DNA, 284 bp, Zea mays
  Clone ID: MRT4577_139075C.1
ggctttcttacatttattcatttcatgggtgtacgtctgagacaagttgcccggagttggccggctcttgggagcccgaaactcctggagctcctcctacctctgcctcccaagtgctgggcccacagcatgttgccttggcatctgcatgaacttggggatgacctttgctcttctgaaaaagtcactgggactttagtgggacagcaggttctcacggactactgcagatagagccaaggttccatgctgatgaactggtttaaaggactggtcaggaatgc

SEQ ID NO: 42837 - DNA, 234 bp, Zea mays
  Clone ID: MRT4577_139076C.1
catcaaaattcttaaggaagatcaaatctaataccataccaacataaccacaaattctttcacactcaaaaaatcactgtattttacaccttcatctctcgtaatcttacatgcgcctgatcttaaactcactgccacaaaactaattgaacttttagtcttttcatacaccacaacacgctaattcacaacctatattatattgtgcacaacacattaccacacatcattctt

SEQ ID NO: 42838 - DNA, 453 bp, Zea mays
  Clone ID: MRT4577_139077C.1
aacgagcagcccgactccacgtctcctggctgggctctcgttctctgcctgatgccgttgtcgcctgtcgctccctgctcggtctcctgctcaccctatgattacagcctgcgactcgcggcttcccctctgctatagccgggattgccgcgcctttgttccctgactttccctacgcgcgagcttccttgtgtgctccccctgccggtcggcctggtgctcgtccggccaccaccctgctctgccctgtctcactctccgctgcttgttggcagctggctacccttcctgcccgtgggcgccggccgggccggtcctttctgtctctgtgttcgctctgctctcccttgctcttggttctgcccgtgcccctttgttgcctcggcgcccagctggtctctgttcatcctccgcccgctcctctgtgtgtgctgggtattggggctggtctgc

SEQ ID NO: 42839 - DNA, 254 bp, Zea mays
  unsure (1)..(254): unsure at all n locations
  Clone ID: MRT4577_139078C.1
tcttgatcgctttcctagagaaatgatcttttgaatcttcatcaaataggctggtcattagctgcaccaaagctagtaacttcccctatacctgttgatggtgtggcatctgctttcgtatttgtggattttgtttcttttatttactattaattcagctcttactgaaaacatggtgctcacatgtgcctgtacatcagtgcatctatgcaatgttttaagaattcttttccctgtgcacatcgnagatggtg

SEQ ID NO: 42840 - DNA, 368 bp, Zea mays
  Clone ID: MRT4577_139079C.1
aacccttcgactataacttcaggggtcatttttatcatccccaggctttatcttcatttgggatccccttgctatgaaacaaaacttattttttgaagcccaatttttttttgggaaccccttttttcctaaaaaccgatttttaatcttttttttaagggttttcggaagaaaaagggctccaaccctggccctggtttcatcccccaactgggggggtccccacatgcccaaaaaacaggacgacccccctttttttcacgagggggaacaaaaacgggcgggccgccccgaaaaccaccgggggggggtgcatttttgcccacaaaaacaataacttcgcccgggccccgggggaaacggggccc

SEQ ID NO: 42841 - DNA, 300 bp, Zea mays
  unsure (1)..(300): unsure at all n locations
  Clone ID: MRT4577_13907C.1
tggactaaaacaccgggagggtgatgaactgaatttttgtttttttttcccggggaaagctnaaagcatgctccaccatcagattcttgatggcgctaacacacgtgagtgacgtacgccctttcacaacatggttttgtttcaaagaaaggacttaaaatgctgcttccctggacccgctccttatacttaaaccaccacggagcacagttccgtcatccatgagcctttgagcacagatttgccatagactgtctcctgaattctaagggggacctgaacctgaccttcgaatgcgct

SEQ ID NO: 42842 - DNA, 283 bp, Zea mays
  Clone ID: MRT4577_139080C.1
aagatgtcgaagcgaggacgtggtgggtcctccggagcgaaattccggatttccctgggtcttccggtaggagctgtgatcaactgtgctgacaacacaggagccaagaacctgtatatcatctctgtgaagggaatcaagggacggctgaacagacttcctgctcctggtgtgggcgacatggtgatggccacagttaagaaaggcaaaccagaactaaggaaaaaggtacatcctgcagtggtgattcgacaacgaaagtcatatcgaagagaagacgggg

SEQ ID NO: 42843 - DNA, 571 bp, Zea mays
  Clone ID: MRT4577_139081C.1
ccggccggatagcaaaaaaccgccctaccttgctcctctattcatcaattgcaagaggagcaagagaccaccactggaacaccacatgcaagtactaacaaggggacaaacatgatcaggttgcacttgacaccggagacgattctgtgcctcctgttagcgacacggccgcacgtagtcatcaacgtcaatgacatgatgtcctttgacaattctatccgctgtaaagtactggaaaactgcgacaagaacctgatgacctcgatgcctcccgcccagggaaacacgccaactactacacccgcggttgtaaccctatctaccgcatggactcgctgatcatatctctctggttgatgtgagcgcaatgacaatgttccacacgcgtgcaagtaccatgcctcaaagcgtggtgtcacgcgtgagaatatattacacacatgcgttatacattggtcgtcaatcgtatactggatgcatggcaactgatgtttcttgcctcccatatctcaggagatactgatgtatgcgactctacttttgatgattaatgtatccgtctggcctctca

SEQ ID NO: 42844 - DNA, 732 bp, Zea mays
  Clone ID: MRT4577_139082C.1
gttgccgggacacgcacgggcgggaagatgttcccggtgggaagtgcattcagcatcggcgagctcgccgtgctcccacggtccccgctgccgccgcccctcccccggctgccgccgccagtgaatatcaactgtccagatccggaccgcttgtagccatcagccgcggcgggttgcactcgcccaccagctcgccggagtggctcctcccgcccgccatcccagcattcgacggagccggcgacttggccgacccggaggacgaggacgacgaacgtcgccacgctcgcccgcacccgcagcggcgacaccggcgagccgagatccgcgaagacgttcgccttggcgtctggcttgtctcttacctcatcgtcgtgcagcgccagcgctgctgtgcagtggcgtatccggtcggcttccgacatcgccggatctcccggcgccgcctcagcaatgccggtacctgcactcctcaactcccactactccgcctccttctcctcccctcggcaagcaagcaggcatagaaccacgcacacaagaacagcttgctcttgtgaactactgctcgcgccacccgccaccaccacccagcaagaaccctgagcaagtaaatcgcggagcaaaagcgagtgctgattcctcgtgaggtggatgggttaaaggatatcctcagccctcggggaggaggagagaagggaaggcccggcagactcggagggtacccaaagt

SEQ ID NO: 42845 - DNA, 124 bp, Zea mays
  unsure (1)..(124): unsure at all n locations
  Clone ID: MRT4577_139083C.1
gtgctgnaaatacanatctgaaattnctaagctaagcagnntttggatatgtgtcagcataaactgtcttttgttttacaaacagcacttatttgcaaccgagatacanatcaagttccacatt

SEQ ID NO: 42846 - DNA, 959 bp, Zea mays
  Clone ID: MRT4577_139084C.1
ctcgaggccggcaggtaccggtccggcgtccatccctctctccggcccggcccacaaactcacctcgtcatctctctccctcaaactgtcggataagccgcgcgccgtcgccgtggccatggcgtccctctcccccgcgctcctccccggcgccggcgtgaccctcctccgagcgccgcccgtgttccgcgtcaccgcctcttcctcgagctcggggagcaagaagggcaagaagcccaagagcggcagcaagggcaaggacaccaaggcgctggagcctccagcgcccgtggtccgccgcgcgccgccgggaagcgcctccatattccagcagcagaagaatgaggcggcgtccagggccgggggcgccggtgggaaggggcccacggaggaggagctacggcagcggcaggccaacgagaacgccttcctcctcgcctggcttgggctaggcatcatcatccttgtcgagggcatcgcactcgccgcctccggttttctgccagaggaatatgacagcttctttgttaagtacctttatccatcgttcactccaacagttgttctgtttttggctggtacggttgggtatggtgtcctcaaatactttgaaagcgagaaaagcaaaagctagatgacagcacgaagcatgtttggagcaatgatgagggtagagttagcaaatgtgcttgttatgtatgaagtagcttaaagcagcagatatgtgccagagaataggctggtgtttttatttatttttccttatatcctgcatcccaaattcctaattattcttttttgtttgtttgtaaattaacgatcaatggatactttcctgaatatgtattaagttgagttgtatattggtttttggcgatcaaaaaaaaaaaaaaaaaaaaaaaaaaaaaaaaaaaaaaaaaaaaaaaaaaaaaaaaagggcggccgccaccgcggtggag

SEQ ID NO: 42847 - DNA, 255 bp, Zea mays
  Clone ID: MRT4577_139085C.1
cggacgcgtgggctcggccctcgctcccacaacaagctcaagccagccttcgctctctctgtgctccaatggcgcgcttccagctcgcagccgtggccatggccatgctcttcgccgcggcggcagcgcaggccccgaccgccaccccgacgccggctcccaaggcgtccccaccgccggcgactccgacgccgacccgctcgccggcgtctccgcccgtgccgcccacgaccatgcctgctccagatcacgcgc

SEQ ID NO: 42848 - DNA, 826 bp, Zea mays
  Clone ID: MRT4577_139086C.1
ctttggggccctcgaggccggccgggagagccgatgaaatagaatggcagaaaacctaaacgtgaggttggcgaaaagagaaaagaactagagcatcccgtggagagaaggcggcggcagcgcctgtgggagatgtcaatcctgtgggagaagagcgcgggttggcgatggctggttcggcggacgcgtgactcgaagcccttctttttcacgttcgcggcgctgtgcggcgtcgtccccggcgtaatcggctacggcgtgatgcagctcaccggctcccgcaacgagcagctcgaggcccaccttcgctccacggcccgtcccgagaccacgatgatggggcaagtgaacagggagaggctggcggagtttctcggcgagctgcaacggaaagaggacacgaacgacaggtacgtggccgcgctgaggggggagaccctgaccaggaagcgctacgagcgcatccagcccttgcctgccgccaacgcgcaagcgagccaggagactgccggagccagcgcggaggaggagaggcccaaggcaaagtgagtcatcagcgagacgtgcctcagtcaatttttacttgctggacatacgcatgcttcggcataatgtaagcagtcagcgcctgtgaaacgtcattgcgcttggggtatttgactcccttttgttttaaacgctgctgatgtaaatcttttgtgcatttcccgtgagaaggcgtattccgacagaccgtacaaaaaaaaaaaaaaaaaagcagcctcctagggccaaaaaaaaaaaaaaaagaaatatgccccgacgctacgtgccaggtggagcccgt

SEQ ID NO: 42849 - DNA, 475 bp, Zea mays
  Clone ID: MRT4577_139087C.1
gcagcgctatgagctgaatggggacgatgatgaggtcgtagtcaaccatacctatggggctaatggacatattcggttggagaagcgaatggaggctcaaactatagttgtcccgagcccaattgatatttatagacgagggcatagagcgaaaaacagtgaaatccctaatgagctatgtagtcaggcgtccgctgagcgtctagagacttacaggcagaagatggttaggaagtatggagaaggctatgattggcgaggagcgcctaccatcgacgttgaagttatgcattctattagagaaaaggccaatgcagggtattctatgtttaccggtgtgaccgattcgacggagttgcggtctcgtggcggctcttcgtcgcaggcaagttgtgggatcgaaggtaatgggccactacatgcaatcaccggtgataccagcactagtgaaagtcgcctagaggggggtgaatag

SEQ ID NO: 42850 - DNA, 793 bp, Zea mays
  Clone ID: MRT4577_139088C.1
aatatgaatagagaaaaatgaaatagaatggcagaaaacctaaacgtgaggttggcgaaaagagaaaagaactagagcatcccgtggagagaaggcggcggcagcgcctgtgggagatgtcaatcctgtgggagaagagcgcgggttggcgatggctggttcggcggacgcgtgactcgaagcccttctttttcacgttcgcggcgctgtgcggcgtcgtccccggcgtaatcggctacggcgtgatgcagctcaccggctcccgcaacgagcagctcgaggcccaccttcgctccacggcccgtcccgagaccacgatgatggggcaagtgaacagggagaggctggcggagtttctcggcgagctgcaacggaaagaggacacgaacgacaggtacgtggccgcgctgaggggggagaccctgaccaggaagcgctacgagcgcatccagcccgtgcctgccgccaacgcgcaagcgagccaggagactgccggagccagcgcggaggaggagaggcccaaggcaaagtgagtcatcagcgagacgtgcctcagtcaatttttacttgcctgacatacgcaggcttcggcataatgtaagcagtcagcgcctgtgaaacgtcattgcgcttggggtatttgactcccttttgttttgaactctgctgatgtaaatctttggattcaatggatggatgctagtagagctctggacggttctgccgaaaaaaaagctgcaaaaaaaaaaaaaaaggccgtcctaaaaaaaaaaaaaaaaaggcccctagggcc

SEQ ID NO: 42851 - DNA, 645 bp, Zea mays
  Clone ID: MRT4577_139089C.1
gccctctctcgagtttttttttttttttttttttttttttttttttttttttttttttttttttttttccccttttttaaggggcccttaaaccaaaccttggtcccaattggggttaggggtggaaagagaaaaataccttattttttttgggttttttattttttcttttttaaaatttttttgggcccaaaagggtaggggtggaaaaaaaaaacaaaatttttttttgggggttgaaccaaaaaaacccccctcccccccttttctgggcccaaacccggtctttttaaccccccttttttttttggggtccccccccccatttttttgtatggccaggattggccggcccccaccaggtggccggaaacccctcccttaattgggaaaggggggtcccaccgggaccccggtttttggtaagttggcacaagtcccggggggggccttaaaatccaaaccccctcccccggaaagggaaaaaaaaccggcaaaaaaaaaaaaaaaaaaaatttggtggttggccgaacccttaacctccgggtttggaaaacaaattgggggttgaagggctttttaaacccaagggaaatcccagccggccccccttatttgacctttttttggccaacaatcggaaaa

SEQ ID NO: 42852 - DNA, 424 bp, Zea mays
  unsure (1)..(424): unsure at all n locations
  Clone ID: MRT4577_13908C.1
cntccttttttttgatcgtggtttattttttttttccggaaaagccaacaaccactacgtgcacatgttgggcacgaaggatacataagctgcccattgggacttaagaccaataatccagaaaaaacacacccctgacttctttgcaagcggaaccaagagcccccaaaaacagggggttaaaaaagggaccccctaccctggggaagaacctaggttttaacacctgcattctggttaggaatggaccccaagaaccaaaactttagtgctggacccttctaagggccgaacaaacttaaaaaaatagaagcagcgaggttcggtccccttctaggcaaaatgggatggtacaactcgcgggccacccgaaaaaaccccccatgttaccaaaacttttggaaaagaacccgtcgcaaaggca

SEQ ID NO: 42853 - DNA, 1784 bp, Zea mays
  unsure (1)..(1784): unsure at all n locations
  Clone ID: MRT4577_139090C.1
nnnnnnnnnnnnnnnnnnnnnnnnntcagtctccaaagacgctctgcttcgctgcccggggcgctgccgggaactgtggcccgcggccccgccgccagacccccggtgttctcctcgccggcgatgtcggcgccgcctgtgcgtacgctcgccgaccttgatggcgacgtgctggctcactgcgccggctacctcggcgcccgcgacgtcgccagcctcgccatggcctgccgccccctgcgcgccgccgcgtattgcgacgcggtctggtaccgcctcttcagggatcaatggccatttgagaaagtgccttgtgatgctttggggctaagagaactatacatccatagacacactgaaatacatcagatgaaatttggtgaccccatagggtctctttattacttagatcccacgcgtacaccaacgcgtccggtaatgatggataggaactccatctggttttgtcaaggtccagcagccaaaaaactgaatattgatttgccagaaactgaaattgtagaaacacacaggaaccatagtgcaaggatcacttgtctgaggctatttcctctgattgataccccactgtttcgaagtgatacacaaaaaaatgaaaaagcattagtcacttcaagcacagacagaacaatccgtctttgttggaagggttactcacgctgttacaagggccattcagcgcctgtgactgctctggctgacagattgcttatggatggtgaatctaaactacttgcaagtggaggggaagactgcaccattcgtctatggtctatgagtacgagggcgaaaaatcacccactaatagcaacatttcatgggcatgaaaaggcactgtcatttttatctgttgcgtggcataaatcgtccctgttggtgagctgttccaaagactcaaaggttaaagtttgggacacagtggctccttcgagtggttcatcatcatgtgtaggcagtgctcacctcaactcaaacggtccaccaattgctatgaaatgccatgaatccctttgctatatcgctgctggagctgaagtgacagcgattgacttgaggacaatgaagaaggcttctgtccttgcactccagaaccacagaatactttcttgtgagatgatgccttctgaatggttaatatgtactggcacgaaagacagggctcttctgtgggacatccgcaaggctcaggaactcccaaacacagtggcggagatgcaatcgaacggcccggtgacattgcttcacttggaccaatacaaggtggtgaccggagtgccgtcggacggccaggtccacgtctgggaaacacggacgggggactcgctgaacacgttgggctgtggcgaaccttcgagactgggcgtgcggagcagggtgtcggccatggccgtggacgggtgcaggatcgccatggcgggcagctctccggaaggctgcatgctgcactaccgtgacttcgcgacggcttctgcccctgtagtgtccttgccaggcaaggagaaggaggtctccaggttctggaggccccaggaattcgacgacagcgaggaagaggagtattgattaatcattacatccccagttccaaattataagtcactttgacttttttttacgtaaattttgccatgcatagtaaaattgatgtaccaaaaaaagagtcaaagctacatagtttggaactgaattagtattacgctatctcggtgagcttccagttctgctacatgcagacaagagaaaagcttgtatatataaaaaga

SEQ ID NO: 42854 - DNA, 274 bp, Zea mays
  Clone ID: MRT4577_139091C.1
aagttatgcgtcattgcattaattaatgcaatgtgataagtgatgcaaaaggaaatgaaacaccgcgggaaaaaaaacactagtaaccgaacagaaaaaccaagcatatcaggacacccggaaagatggaaaatggcctacactaaagaaaatacaaggacgatagaccctgtgcacgacggaacaaaaatcactggcctcctaaggaaacaagctgggtactcaaacacagtggccacgagcgaacaagaagcaaaacatgctgacacaaaac

SEQ ID NO: 42855 - DNA, 278 bp, Zea mays
  Clone ID: MRT4577_139092C.1
gtgatgttcaagaaccacctgaaccagaggatgaccgtgacattatgcttggcaataaaaagaagataaagaagaatgttaagttcccagatgaggatgatatactacagaaagatgaagctctagaagatgaagacatacaaaaaagatgatggtatctcattcagtaatcagacaggccctgcttgggcaggctcagaaagagactacacatacgaggagctgctgaatcgagtgtccaacatcatgagggaatagaatccagatatggttgctgg

SEQ ID NO: 42856 - DNA, 242 bp, Zea mays
  Clone ID: MRT4577_139093C.1
tttattcttttatactttctttttttttggggttttttttttttttttgagggcaaatgggactaaaccctttagggcagcagaccaatgggcttcccgggagataaccagacaccccccctgttggccccccaagtttcacgcgagacattcccatgcaaagtggcccccaaaaaagttacaaccattaggacaacataaagtgggacacctgttcacaactttcccacaccaataccatc

SEQ ID NO: 42857 - DNA, 578 bp, Zea mays
  Clone ID: MRT4577_139094C.1
gcaggtcgactctagatatttttcgagcattaaatacgattacagcgtttttttccgaaattattttaatcctaaaaattgatttatttcgaaaaataaaatatctttaaaccctagcaatatatatatggctggaaccctctcgtcgagcccgttccaaataacagatcgatttcgaaagtcgagatccgtagttgttggtccttattctcaaatgctacacatcaagaacaaagcaacacaattgttaacaataagataccttcgtccttcgaagcattatctcccttgggatataatgatctttagacgaaggtcatgaaggacataccttcatcattttggtaaacgagtataaataaaagcacataaaacacaaaagaatataaataatccttaccattcaatatattatttatattcttatcttataaacatggatggacataaatgatatttatattatatcaataccttcttcttgttagaagtgaaaatgtaagagtgacgcgagagaaattacgatacatcatgaatagtacgatgatacttgtcatctattataggcgccggacaca

SEQ ID NO: 42858 - DNA, 188 bp, Zea mays
  Clone ID: MRT4577_139095C.1
aacccccgtttttaccagcgtttttagacagtacagaaataccggcccgggcgcgcgcgcttaaccctaaccatttaacgggccgaaggtctcgagatgaaggcgagggcgaagtccattgggggtgattccagggtttcggtgaggaagggcaggggtcagatggacctatttaagcccaagaggcc

SEQ ID NO: 42859 - DNA, 1163 bp, Zea mays
  unsure (1)..(1163): unsure at all n locations
  Clone ID: MRT4577_139096C.1
cccgcttcctctccgcgccatatctttgtttatgagctcgaaggagaagcccactcttggaggcacgcggattaagacccgcaagcggaatattgcagctcctttggaccctgcatcattctctgatgcaattgttcagatctatttggataatggtggagacctggccaacattctgggtggtacaacatagcaggaacttgtcgccaaaagtatcgagtcttcagacctcaacttctcacgttacggtgacaccttttttgaggtggtttttgttggagggcgcactcagccaggcactgtaaaacctgaagaaggagaccgccacccttattcggtgttagattaaaggcaaaatggaggacaatctgttggacttcttcccatcagctaagagatcttctgaggctttatctgagcatttcaccaaagaaggtctgactagccttgttgagtacaacgaaaagaagatgtttgaggttaaacttaaggagataaagtcaacactgactgctatgataaatgatgaggctgcaatatctgaagtgattgagactgtcaagcagcaagttaaggatgctaaatttcctgatttagaggttattcgcatgttgtgggatgtgctcatggaggctgttcagtggtctgggaagaaccagcagcaaaattccaatgcagcacttaggcaggtgagagcttggactgagcttttgaatgctttttgcacgagtggcagactcgaactggaacttatacacaaagttcagacacagtgctatgaggatgctaagctcggacgcgtgggcggaggcgtgggaagaacactgtatgaccaagatgtcctagctgaagatactatagtcctttggttccgtaaaggttcaaacccgaagggcaggcaatcttttgtgaaagctctggagccgtttgtcaaatggctcgaggaggctgaggaggaagaataagctcttgatttggagattggccgaatgtgacgaattatggttctcgaaaatattaccttttcttatttcgaaagctatgaaaggttgaggagttatggttgctgctagttattgccgagtttgttactggcgatagatttatgttatgctngttangcacttggctctcagctgcagtatgttgctgttaaggtgttg

SEQ ID NO: 42860 - DNA, 411 bp, Zea mays
  Clone ID: MRT4577_139097C.1
ccgttgccgtcggtgagggagaccatcgcgcagctagtcgtatactctctagtggaggattacctcagctactggatgcaccgtctgctgcacacccagtggtgctacgagaagatccaccgcgtccaccacgagttcacaagctaaagcaagagaagctgaagagtctagcagaaaatagtgcggataaaggaggcaactactcattcgacgaagggaaaaagaacagatatttttgtgcctgagcgtacgaagaataatcaaggctattacttcgtcctgttcgaagggaagatttgcaaataaataattcgaatttactgcagaagctcttgattggtcgacgaacaaatatattgttgcaatccgtttcgtgtattctatatatctaatatgaaacttttttgtcgg

SEQ ID NO: 42861 - DNA, 388 bp, Zea mays
  Clone ID: MRT4577_139098C.1
acaaaaaaacatttttctttttaggtttaaactttttttttagggcccgcaatcccaaaattcaaaacttaatccaaaaaggaccgatgcgttttttaaagtttccaaaggggggcggccgtttccaacttaactctgtttttttttaaaaaacagaggttaattacctttttttttttgtttcccgcgccccccatttttttttttttggtggggggggggggggaaaaaagtcacctgcacctttttcgggtgaaatgtttgatggtgcattgtcagggattttaaatttgtattccttttccagggcccttgcaccccccactggatttaaactttttaggcgctgtttatttttgaaatgggcatcctgtgtcaccttggaggg

SEQ ID NO: 42862 - DNA, 1720 bp, Zea mays
  Clone ID: MRT4577_139099C.1
ggagggcccgacataatgctctcgagaaagagatcgttgtacaggtcattgattcttctttgccgagtgttacattaggtttgcaagctttcccgagtgctaattgcaagctttcccgagtgctttgcgccacccagtagtgatgtacaatacccatagtaaattgacgtcacattataaaccagttcagtaatgataacagaagtttcaacaccttaacagcaacatactgcagccgagagccaagtgcctaaacagcataacataaatctatcgccagtaacaaactcggcaataactagcagcaaccataactcctcaacctttcatagctttcgaaataagaaaaggtaatattttcgagaaccataattcgtcacattcggccaagctcggaattcggctagcgcttattcttcctcctcagcctcgtcggccctgccggtgccataagggccgaacagttgaagctactagcgtgtagctagggaagagaagcgcgcgagtagctagcagacgtacgtaggcagaagcctagctgggtttgaagggccccgatcgatgatcccctacgcgactgcggcggaggcggagggagcactggggcgcaccatgacgtgggctgagacagcatggtacgagtactcggcggtgatgccagattcctggctgcactgccacaccacatttatcctgttcgtcatctacagcatcgccccgctgcccctgctactcctagagcagttcgctccgtccgtcgtgctgccgtacaagctgcagccccgggtacggctgcccccggcagcctccctcagctgctacatggacgcggcctgcatctttccgctcgccgttggccttcagttcgtctcctatcctgcggtcgccaagatactaaggacccgaatgggactgccgttgccgtcggtgagggagaccatcgcgcagctagtcgtatactctctagtggaggattacctcagctactggatgcaccgtctgctgcacacccagtggtgctacgagaagatccaccgcgtccaccacgagttcacggctcctacaggcttcgccatgtcgtacagccactgggccgagaacgtcgtcctttctatcccggccttggccggcccagtgctcgtgccatgccatgtcaccacgcagtggctatggttctccatccgcctaattgagggcattaacacgcacagcggttaccatttcccgttcagcccttgcaggctgattccattctacggaggggctgcataccatgactaccatcactatgcaggaggccgtagccaaagcaactttgcacccctgttcacctactgtgattatttatataggacagacaaaggctacagataccacaagctaaagcaagagaagctgaagagtctagcagaaaatagtgcggataaaggaggcaactactcattcgacgaagggaaaaagaacagatatttttgtgcctgagcgtacgaagaataatcaaggctattacttcgtcctgttcgaagggaagatttgcaaataaataattcgaatttactgcagaagctcttgattggtcgacgaacaaatatattgttgcaatccgtttcgtgtattctatatatctaatatgaaacttttttgtcggaatatatggatcatcccgatacattactttataagtaatgaataccacataagtttttgttggaagatggtc

SEQ ID NO: 42863 - DNA, 315 bp, Zea mays
  Clone ID: MRT4577_13909C.1
atggactcgcactcgcatctcatggcaggagccgagccgcccctataccgcggggtcggccggccaatccgtggccacctccgggaacaggagtcgttcgcggctgggttcccgtccccgtaccgtcgtgctctggtccgctcccgaggaattcagcggcgaatccggatgcggagcacgtcctgggttggtcagcagccaaggcggccaccggcaccaatttccatgaaaacagtgaaaaaacatggtatttatgtcatggcaattttaaaccacagtattggaaaacatggtttccaaagacttcggttctaa

SEQ ID NO: 42864 - DNA, 440 bp, Zea mays
  unsure (1)..(440): unsure at all n locations
  Clone ID: MRT4577_1390C.1
ccattttcttctgcgggtggtcgattagggcaagcttcggggggctgccaaaaaaccaatnacatcgccccactccttatcaccggtgtcttcttggccgtgcggctctcctgcctcgtcttccgcctccgtctgcccactccgtctacgacctctttttttttctctacctactactactgggtttgtacgggggcctcnatcnncctccntntccannnagatgggggggggagaaaaactanatgagctatctaactaactcaggctcacatatgtatacttgtcacggggtcattttagtactagggccatttatctctgcgttctttcttgtggaatcaacctggtggcggtagctaccctaatatatctcttgttctactgctttacctatatacctctgtaatctgatgaattgatgccgaaaatgcccgcac

SEQ ID NO: 42865 - DNA, 371 bp, Zea mays
  Clone ID: MRT4577_139100C.1
cccacgcgtgcgcccacgcgtccgcgtatattctgacgactgccatgtatcttgctcatgtatgctcaaggctcattatcttgttcatgtattaagcatgtcatgaataactcaatacttattaaaaactgacttcattaatatttacaacaatcaagatgagcacgtggcggtagcgcaagtggtggtcaaagttcatctgggttacctctttggaagcggtgagccccccaaaccagcagtggcaccagctgtaaatgctccacctgctgctgcaagtgctccacctgctgagaaaccacctgctgcaaagcctgatggtaccagtcagatagctgctggagttaccagccattccaataactaccaca

SEQ ID NO: 42866 - DNA, 3866 bp, Zea mays
  Clone ID: MRT4577_139101C.1
actttcccctcaactctactcccgggacaccaactctccacttaggacagcgcccataaggtacgtcttagccgcaggataatctctttttcgcctcgggagtcgcagagctccaacctatctaccacgaggaagctccattataacgtagattcttgctcgtcgtcctgcctgagcgatccatctgcactgtcgaggaaatatcccagtcttgataggccctctaataagcatatcaaagctgatacactggaattccatgtaggagccgtgtcatgatgtctcctgaagattcctgtctatgatatatgcataggatattgtggtctatcatagaactagacctgagaacgatagggtctgaccgaactactctgtctccagtatacgattgacacctttattaatctgcgtgtagcgggaatattcttccgggattcccggcttggatttttgagaaaagagagaagaaactccctatagcgctcccttaagctgggttttagccgcagctttctcctttttcgccgcggcggccgcaagctccaaccttctcctcccatatattttttgtcttctcccgtgccaccgcctcgccctcgcccctcctaccgcacccggaagctaggtttagccgccgccttctcccttttcgccgcggcggccgcaagaaccgacttctccccggagaagccccaagcaagcgacccccgcttcctctccgcgccagatctttgtttatgagctcgaaggagaagcccactcttggaggcacgcggattaagacccgcaagcggaatattgcagctcctttggaccctgcatcattctctgatgcaattgttcagatctatttggataatggtggagacctggaacttgtcgccaaaagtatcgagtcttcagacctcaacttctcacgttacggtgacaccttttttgaggtggtttttgttggagggcgcactcagccaggcactgtaaaacctgaagaaggagaccgccacccttattcggtgttagattgtgcgtcacagcgtgaagcaattttgcctttcgtactctatatccagaaaacattgcgcaggaggccttttttaataaagaatcttgaaaatgttatgcgtaaattcctgcaatccttggagttctttgaggaaaatgagaggaagaaactcgccatattcacagcccttgcattttctcagaagctatcagggcttccctcctgagactgtgttccagccattgctcaaggataatcttgttgccaaagggatagtactttcattcattactgagtttttcaaggagtaccttgaggaaaacagcttggatgatttgattgcacttttgaagaaaggcaaaatggaggacaatctgttggacttcttcccatcagctaagagatcttctgaggctttatctgagcatttcaccaaagaaggtctgactagccttgttgagtacaacgaaaagaagatgtttgaggttaaacttaaggagataaagtcaacactgactgctatgataaatgatgaggctgcaatatctgaagtgattgaccccgccaaccagcaagttaagcctcgcccattcgttacttcagacgataagctcatttttagccgcagcattctcctttttcgccgcggcggccgcaagctccaaccttctccccgaagaagccccaagcaagcgacactcttgtcctctccgcgccagatcgttgtttatgagctcgaaggagaagcccactcttggaggcacgcggatcaagacccgcaagcggaacattgcagctcctttggaccctgcatcattctctgatgcaattgtccagatttatctggataatggtggagatctggaactcgtcgccaaaagtattgagtcttccgacctcaacttctcacgttacggtgacaccttttttgaggtggtttttgttggaggacgcactcagcctggcactgtaaaacctgaagaaggagaccgccacccttattctatgttagattgtgtggcacagcgtgaaacaattttgcctttcgtactctatatccagaaaacattgcgcaggtggaagcgatgtgtagcctttcttaataaaaaatcttgaaaatgttatgcgcaaattcctccaatccttggagttctttgaggaaaatgagaggaagaaactcgccatattcacagcccttgcattttctcaaaagctgtcagggcttcctccggagacagtgttccagccattgctcaaggataatctggttgccaaagggatagtactttcattcataactgagtttttcaaggagtacctgaaggaaaacaccttggatgatttgattgcgcttttgaagaaaggaaaaatggaggacaatctgttggacttttttccatcagctaagagatcctctgaggctttatctgagcatttcatcaaagaaggtctgactagccttgttgagtacaatgaaaagaagatgtttgaagttaaacttaaagagataaagtcaacactgaccactatgatcaatgatgaggctgcaatacctgaagtgattgagactgtcaaacagcaagttaaggatgctaaatttcctgatctagaggtcattcgcatgttgtgggatgtgctcatggaggctgttcagtggtctgggaagaaccagcaacagaattctaatgcagcacttcggcaggtgaaagcatgggctgagcttttgaatgctttttgcacgagtggcagactcgaactggaacttatatacaaagtacagacacagtgctatgaggatgctaagctgatgaagctgtttcctgaaatcataagaacactgtatgaccaagatgtcctagctgaagatactgtcctgctttggttccgtaaaggttcaaaccagaagggcaggcaatctttcgtgaaagctctggagccgtttgtcaaatggctcgaggaggctgaggaggaagaataagtttttgatttggagaacggccgaatgctggcctaagtgttactttatatttctgaagttagaagtttgtggaggaattattgctgctgcctcttactgccgagaactttatgttatgatgtttagccacatggatcccggctgcagagtgctataatatgttgctgttaaaactttgtgtcgagcatttgttgaaacttttgttatcattactgaaaggatttataatgggacgtcagtttactgtcggtattgtacaattactggattattcataagctgcagaatgctacaaatgtcatttctggcaagctatgaggatgctaagctgatgaagctgtttccggaaatcataagaacactgtatgaccaagatgtcctagctgaagatactatagtcctttggttccgtaaaggttcaaacccgaagggcaggcaatcttttgtgaaagctctggagccgtttgtcaaatggctcgaggaggctgaggaggaagaataagctcttgatttggagattggccgaatgtgacgaattatggttctcgaaaatattacctttttttttatttcgaaagctatgaaaggttgaggagttatggttgctgctagttattgccgagtttgttactggcgatagatttatgttatgctgtttaggcacttggctctcggctgcagtatgttgctgttaaggtgttgaaacttctgttatcattactgaactggtttataatgtgacgtcaatttactatgggtattgtacatcactactgggtggcgcaaagcactcgggaaagcttgcaaacctaatgtaacactcggcaaagaagaatcaatgaactgtacaacgatctctttctcgagagcattatgtcgggc

SEQ ID NO: 42867 - DNA, 293 bp, Zea mays
  Clone ID: MRT4577_139102C.1
gttctagatcgcgagcggtcgcccttttttttttacgcaaaactagaatccttatatccatgggcctctatggtacgcgtgcatacagacaaccctggttgttgccccggttgacaaactgacccctattggacccacatgtaaaacggaggcactagatggactagttggggagccataaacccggagggattgggggaaccaaaaagccacttattattcaaatttggaataagatgcgtattttggcctgtccattgtgctttagttctgcggctccaaactagcccgaa

SEQ ID NO: 42868 - DNA, 612 bp, Zea mays
  Clone ID: MRT4577_139103C.1
ccccgcgtccgccccgcgtccgccccgcgtccgcccacgcgtccgctgtttcctgcagtggtaacaacgctgtatgacgcgggcctagctgaagatactgtcctgctttggttccgtaaaggttcaaaccagaagggcaggcaatctttcgtgaaagctctggagccgtttgtcaaatggctcgaggaggctgaggaggaagaataagtttttgatttggagaacggccgaatgctggcctaagtgttgctttatatttctgaagttagaagtttgtggaggaattattgctgctgcctcttactcccgagaactttatgttatgatgtttagccacatggatcccggctgcagagtgctataatatgttgctgttaaaactttgtgtcgagcatttgttgaaacttttgttatcattactgagaggatttataatgggacgtcagtttactgtcggtattgtacaattactggattattgataagctgcagaatgctacaaaaaaaaaaaaaaaaaaaaaaaaaaaaaaaaaaaaaaaaaaaaaaaaaaaaaaaggaaaaaaaaaaaaaaaaaaaaaaaaaaaagtactctgcggttgttaccacttgctt

SEQ ID NO: 42869 - DNA, 165 bp, Zea mays
  Clone ID: MRT4577_139104C.1
aaataattttttacccaccaagaggaggcgggaaggggttatatcataatgggagggcccacccccggatgagcaaagtttcacacaggccacaatttagtcggttgaccggaaaagagctcatcacggccagacaggaaattcagaagggctgactgccaaatg

SEQ ID NO: 42870 - DNA, 1717 bp, Zea mays
  Clone ID: MRT4577_139105C.1
tgggaccctcgaggccggccgggccggggtgcacggcctcgccccttcgtaccgcacccataagctaggttttagccgcagcattctcctttttcgccgcggcggccgcaagctccaaccttctccccgaagaagccccaagcaagcgacactcttgtcctctccgcgccagatcgttgtttatgagctcgaaggagaagcccactcttggaggcacgcggattaagacccgcaagcggaacattgcagctcctttggaccctgcatcattctctgatgcaattgtccagatttatctggataatggtggagatctggaactcgtcgccaaaagtattgagtcttccgacctcaacttctcacgttacggtgacaccttttttgaggtggtttttgttggaggacgcactcagcctggcactgtaaaacctgaagaaggagaccgccacccttattctatgttagattgtgtggcacagcgtgaaacaattttgcctttcgtactctatatccagaaaacattgcgcaggaggcctttcttaataaaaaatcttgaaaatgttatgcgcaaattcctccaatccttggagttctttgaggaaaatgagaggaagaaactcgccatattcacagcccttgcattttctcaaaagctgtcagggcttcctccggagacagtgttccagccattgctcaaggataatctggttgccaaagggatagtactttcattcataactgagtttttcaaggagtacctgaaggaaaacaccttggatgatttgattgcgcttttgaagaaaggaaaaatggaggacaatctgttggacttttttccatcagctaagagatcctctgaggctttatctgagcatttcatcaaagaaggtctgactagccttgttgagtacaatgaaaagaagatgtttgaagttaaacttaaagagataaagtcaacactgactgctatgataaatgatgaggctgcaatatctgaagtgattgagactgtcaagcagcaagttaaggatgctaaatttcctgatttagaggttattcgcatgttgtgggatgtgctcatggaggctgttcagtggtctgggaagaaccagcagcaaaattccaatgcagcacttaggcaggtgaaagcttggactgagcttttgaatgctttttgcacgagtggcagactcgaactggaacttatacacaaagttcagacacagtgctatgaggatgctaagctgatgaagctgtttccggaaatcataagaacactgtatgaccaagatgtcctagctgaagatactatagtcctttggttccgtaaaggttcaaacccgaagggcaggcaatcttttgtgaaagctctggagccgtttgtcaaatggctcgaggaggctgaggaggaagaataagctcttgatttggagattggccgaatgtgacgaattatggttctcgaaaatattacctttttttttatttcgaaagctatgaaaggttgaggagttatggttgctgctagttattgccgagtttgttactggcgatagatttatgttatgctgtttaggcacttggctctcggctgcagtatgttgctgttaaggtgttgaaacttctgttatcattactgaactggtttataatgtgacgtcaatttactaaaaaaaaaaaaaaaaaaaaaaaacaagtacctgcccgggcggccgct

SEQ ID NO: 42871 - DNA, 260 bp, Zea mays
  Clone ID: MRT4577_139106C.1
agaaaaaaaaaaaaaaaaaaaaaaaaaaaaaaaaaaaaaaaaaaaaaaacaaaaaaaaaataaaaaaagaaaataaaagtggaggatacacaagaaagcacaacgtttaggtgagctctgaatgctccttcagtcctgcttctttaattctaattaaagttcaattcagtggccgtctgtttgacaaggcctttcctggcataacccctgcttatcccaatttagccgcctcttccatacacttccgctttcagcaactt

SEQ ID NO: 42872 - DNA, 3064 bp, Zea mays
  Clone ID: MRT4577_139107C.1
agcagtgggaacaacccagagtacccgggtattgctgctgccggataaatcaattatgctttgcatggggtatgtccagctgtgcatgcagaagaataaaagaaagtggtttaagcatatatgcttaatcaaaaagaataaaattgttgaaccaaatacctttaatttgcccatgtccagctccaatttggagctaaatgagcgccaaaaattggatctggagcttgcaaacagctcctcacatgtgtttgatagtaatagctaccaaactgaccgagaactatatttttcttttacattttcggatgatttgagcttttgttttgggtagattacggtggcttgatgtaggttttttgagaccctgggttaacaaactgttttgccagtagtgttggttcctcgatgccttgcaataagatctctcgaagctcatttccttttgctgacagtttgttgttttttacatcgatccgatgaagtgcatgatcttctaattttgcatggtttactggtctgctaataaaatgcaattcaatcttgaagaattggttaaaaagtggatgccattgaatatcattcaatttcttccaaaggatttggaatgttgagttgagagtatcatgtggcagtttgatgttacagattttcttcagtgtggtacaggaaaataaaaaagtttgttaaaacgcgatttgtaatgaactcatttgttagtcttataagtcgacaaacgaactgaattagttttgataacagtagcatatagttgtcattatttattagtaaaccgagttttctttttaggaggctgtccatggtatgtgttttaacttctattctcttgtttcctgtgcagctcgaaggagaagcccactcttggaggcacgcggattaagacccgcaagcggaacattgcagctcctttggaccctgcatcattctctgatgcaattgtccagatttatctggataatggtggagatctggaactcgtcgccaaaagtattgagtcttccgacctcaacttctcacgttacggtgacaccttttttgaggtggtttttgttggaggacgcactcagcctggcactgtaaaacctgaagaaggagaccgccacccttattctatgttagattgtgtggcacagcgtgaaacaattttgcctttcgtactctatatccagaaaacattgcgcaggaggcctttcttaataaaaaatcttgaaaatgttatgcgcaaattcctccaatccttggagttctttgaggaaaatgagaggaagaaactcgccatattcacagcccttgcattttctcaaaagctgtcagggcttcctccggagacagtgttccagccattgctcaaggataatctggttgccaaagggatagtactttcattcataactgagtttttcaaggagtacctgaaggaaaacaccttggatgatttgattgcgcttttgaagaaaggaaaaatggaggacaatctgttggacttttttccatcagctaagagatcctctgaggctttatctgagcatttcatcaaagaaggtctgactagccttgttgagtacaatgaaaagaagatgtttgaagttaaacttaaagagataaagtcaacactgaccactatgatcaatgatgaggctgcaatacctgaagtgattgagactgtcaaacagcaagttaaggatgctaaatttcctgatctagaggtcattcgcatgttgtgggatgtgctcatggaggctgttcagtggtctgggaagaaccagcaacagaattctaatgcagcacttcggcaggtgaaagcatgggctgagcttttgaatgctttttgcacgagtggcagactcgaactggaacttatatacaaagtacagacacagtgctatgaggatgctaagctgatgaagctgtttcctgaaatcataagaacactgtatgaccaagatgtcctagctgaagatactgtcctgctttggttccgtaaaggttcaaaccagaagggcaggcaatctttcgtgaaagctctggagccgtttgtcaaatggctcgaggaggctgaggaggaagaataagtttttgatttggagaacggccgaatgctggcctaagtgttactttatatttctgaagttagaagtttgtggaggaattattgctgctgcctcttactgccgagaactttatgttatgatgtttagccacatggatcccggctgcagagtgctataatatgttgctgttaaaactttgtgtcgagcatttgttgaaacttttgttatcattactgaaaggatttataatgggacgtcagtttactgtcggtattgtacaattactggattattcataagctgcagaatgctacaaatgtcatttctggcaaaaaaaaaaaaaaaaaaaaaaaaaaaaaaaaaaaaaaaaaaaaaaaaaaaataaaaaaaaaaaacaacgcacagctacaggatggttaagctgatgaagctgtttcctaaaatcataagaacgctgtatgaccaagatgtcctagctgaagatactgtcctgctttggttccgtaaaggttcaaaccagaagggcaggcaatctttcgtgaaagctctggagccgtttgtcaaatggctcgaggaggctgaggaggaagaataagtttttgatttggagaacggccgaatgctggcctaagtgttctttatatttctgaagttagaagtttgtggaggaattattgctgctgcctcttactgccgagaactttatgttatgatgtttagccacatggatcccggctgcagagtgctataatatgttgctgttaaaactttgtgtcgagcatttgttgaaacttttgttatcattactgaaaggatttataatgggacgtcagtttactgtcggtattgtacaattactggattattcataagctgcagaatgctacaaatgtcatttctggcaaatggaatattgaaatgttacgaatgtaaaaaaaaaaagaaaaaaaaaaaaaaaaaaaaaaaaaaaagtactctgcgttgttaccactgct

SEQ ID NO: 42873 - DNA, 414 bp, Zea mays
  Clone ID: MRT4577_139108C.1
gccaagcaaaagttcccctattgtatggcttcatccaaagccactactgccgagttggtttcgtgaggtacttacaagtgaagcagctgccaaactttctcttggcctcaccagcgctatctctttccgcaccgaatatcgttcagaacccaaaactgcttcaccagacatttacagacaactagcgtgcgcaggctaactatcactcctatatagaaaaggccatgtgtgtcgaatagaagatcagctcccgcgacaaattacagtgaacctcctgctggactcaccaagaaagcacactggatctctattgctgaacacagaaaatccagtgctaccgagatagctgctgcgacattccttgacagtaccacgccggcttaccaaaacatctaagaggagcaggacgcgtgc

SEQ ID NO: 42874 - DNA, 244 bp, Zea mays
  Clone ID: MRT4577_139109C.1
atattgccgggtcgacgagctttttttccagcgggcgcccgtgaacaatttggttagtgtcaaatatcaagaacatggtagacataggcttcatacttttctggggtggtgttggcccctccaattgagagcttagaagagctctcccacaaggttagacacaacaaaaatgaccactaaccatttcttattgatcctgtacataatatacaggaggcgctagccgaactttcatgataaaggg

SEQ ID NO: 42875 - DNA, 359 bp, Zea mays
  Clone ID: MRT4577_13910C.1
ctcttgacgtctttggacaacacagttgcagccgagatttttccgtataaaaaccacccccatcacttgcttaaaccgctcaaaccttgaattgcgacctaaaacttacgcgaaagaaacatgacacatttgatatcaaaggaaaggaacattctaactgggcgcaatgccttaaacttaaaaaaccacttggcaacatgctcacggcaaccgaaacaattaattcttagaaagcgaagcccaactgacattccccctgaacggacattaaaatgacgaagctaacaaccacttacaacattgttgaaacttcatttgccactagagcgagaactgaaccaaacccgggaattatcaga

SEQ ID NO: 42876 - DNA, 381 bp, Zea mays
  Clone ID: MRT4577_139110C.1
tttattctgtcgtgcacacattggcatatggagttgcttgtagagagagctgagaggcctcacctggaactcaatctatcattacaacagacacccatacagcaaaggaaaccaacccacacatctaccggatgttcatatgggtcaacaagcaggacttctagcatacctggtacatgctatgggaggaaccagccagactacactcatgatgattacaacaatcaaagactcgagtggaatccatgccacaagacaacatctgcaaatggtactacagcttattgatcacatgcgcttgtataaacagatactgaagcatgtcgagagcttcaggtacaactatgctgatagcggaacacacatgatcatgagaaagct

SEQ ID NO: 42877 - DNA, 477 bp, Zea mays
  Clone ID: MRT4577_139111C.1
atgacgctagaagaaaaaccacccactcccatgttcgaccagtccccactctcctctcccccactgcgcatggatagccatgccgagcacctcgccataaccgtcgcagcagccagggcctgccgtctccacgaatccggcggttccagcccccaggccgccaaccgcgctccacgctccctactgaatcgcgcgcgtcccccagccgcgtgccttgtgcgctcgggctccggcaagctcatcccggcgagctgccctccccgtccctgtgcgtgggcccggcgtcgcggcaaccagtcgcgggcgcggcgagccccatggcgcggctctagcccgcccatgcccctcggccggctcgccccctggccgtggctaccctcccccgcgcagggcgcgacgcggcggtcggccggcgtggcgacgcgccagctcgacggctcgcccacgcgccaggcatccggtccctgctcaccgtga

SEQ ID NO: 42878 - DNA, 132 bp, Zea mays
  Clone ID: MRT4577_139112C.1
gtcatgcgtacgcccacgcgtccgtatactttggaggattctttatcacctacgcgacttgtatatgaacatctaaaataatctctctagatgagcaatcaggaaatctcactcgaaaatgagttacggcat

SEQ ID NO: 42879 - DNA, 547 bp, Zea mays
  unsure (1)..(547): unsure at all n locations
  Clone ID: MRT4577_139113C.1
acacatattggttaataaattgttttgggagcacagacctgatacgggatgcattcaattggggttccaagatgctcaatatagagaaagcgcatgtcgttccttgccaaaggttcaatgaagctttacttgcttggcctattaaggatgaaataaaaccagttctttttgacaaattgggttatgcggttttatcttccataattagggttttaaagaatgctgactgcctaggctttattactggttgttcgggctcacagaggcgttgccaaattttgttctcatacgcacaatcagaggggatttgccctatatttaagctattaaataaccaattttgtaatactcgtgantatgatgagagcgactttttcaaaaccaaccaataccctattgttatatcactaaacacaagttttcttcatatgctatgacggccttaaaacatgtgattgattggcacacaccgagcgaaaatnactatactgagttttcttatctcagctaaaaagtgccccagagaatttcggtccggtaccatttt

SEQ ID NO: 42880 - DNA, 416 bp, Zea mays
  unsure (1)..(416): unsure at all n locations
  Clone ID: MRT4577_139114C.1
gggggnaccaaaccggaaaccccgggacgacccacgcgncctatatggagacaaacaagggagaaagcacggggcacgggaggacagacaggggaccacacacactggcccagatagcagggcggggaggcccgacccgcgggaaccagaaggagatgcgcgcgcgagcactccgacaagacccgcatagaacctgaaggccgaaaccccagagggctacgagcaaacccacacccaaaagacaaggctgaacggaaacccgccaggggcagagcaggcgcccaagccggagagcagcaaacccgccccggcccgaggaaggagcccccccgagaaaagaacaaaacaacggacccgcccaaaacaataaccccccaaaaccgcaccggaggaccaccacggagaggaaccggcgc

SEQ ID NO: 42881 - DNA, 424 bp, Zea mays
  unsure (1)..(424): unsure at all n locations
  Clone ID: MRT4577_139115C.1
gttctggccgtgctgcccgnagtccgacatcttgcgnctggctccgctctggggttttgggggagggttcaccgaagagcgaagtaccccccccccccccccccctcactcaaacataactgacttcctcacaaacnactgggaactaaacacaaacacacanatagggacaccaatcaccacagatcgatcgttcgatcgccaccaactttatggggggggaaagaaatatttttttttttacagcggggcgcgccacngnngcaaagagcgggggcgggccctcggccgcccctctgtcngggttgttcaaaggttcgtcttcctanttcggggtgccgctggtggaaatgcaggagagttattggtggtcggggctntgttntccgccttgttcctggtgtgggtgcttgttgctttgatt

SEQ ID NO: 42882 - DNA, 405 bp, Zea mays
  Clone ID: MRT4577_139116C.1
cttgccagcagctctctctatcgctccctcacgctctctctcctcaccatttttgctcctgccgagagctcgccaagctccgaaaggcgcaagttttcttgccatggggaagaacacatgcaagctctgctcccgccgcttcgccagttcccgcgcccttgccgggcacatgcgctctcattacatggccgcaactaaggagacagcggcgactgcaaccgcagcggctgcggcagccgcagcaacggcgcaacatcacatctcttcggcatcatccgcgtcaacctccatcgccatcgccgacgaggaagtcggctcgatgatgaccgcttccaccaacgggctccgggagaatacgaagcgcacccttggcgtggcggatgtacgtttctcggatcgcgagag

SEQ ID NO: 42883 - DNA, 469 bp, Zea mays
  unsure (1)..(469): unsure at all n locations
  Clone ID: MRT4577_139117C.1
cagccaagcgcggggggcggcgccagcggcaaacaaaaaggggggcgacgcagcgacccggggcgnggcgggggggccgcgccggcgaccagccagccggagagcgcgcaagcgcccacagcgncgcgcgccncccccgaaccgcggaccagcggngggggggggggggggggaacccagnnccccaaccccacaggagccaacaaaaaaacacagacggcagccgaccgcaaggacccacggggccgcggcaaacacgacccccagcacagcaacgacccngggggcanccaccggcacaaagcagggggcccaacaccnacaccagcgcgggcgcgcaaaccgcgccggcggcccgcagcaacagcaagggccgccaggcaaccaacnagccgcacggaaccccgcnccncaagcgcaacaacagcagcgaccaggcagccagcaaccagcaggcaacccgcagcaa

SEQ ID NO: 42884 - DNA, 841 bp, Zea mays
  Clone ID: MRT4577_139118C.1
cttcctcgaggtctaacccccatggcgggacgtttttatacacctcttgggggccttacataaacctcagtcaggcatcgtgaggagggagagttcatggacctttgcgtcttctttctagattaatcttaacgtcaagaccctcatgggcaccaacttctagatcgattcttgccccgatgcatctttttctgatttgttcagtatcactgataccacttatggttagatttcctacttttctatcctttattatgctgatatacctttttaaaattctttccgattaaccctttttttattgattcctatttgctgatatattgccaatttttttttctttttttaccttactttctttttttttctattataccttttttttttcattttttatataattttattttccttatttttataattttttacttcctttcttctttttttgttttattttttctaatatttttacatatatacttgatatttttataattttttacttattttaaattttttagtttttgttatatctttttttttttagattatgaatattattcctttttctatatttttcttttacttttttttctttttttctttaataatatttttttctttcttattttttcttttatactttttttttcctcttttttcttaacaattttattattttctttattttattctttatgttctttttaactactctatctatattccttttataattttcccttttttttctttttttatatctttatttcttttatttttttttttcctttttccttcttttctctttttttcctctcttatttttttttttttt

SEQ ID NO: 42885 - DNA, 360 bp, Zea mays
  Clone ID: MRT4577_139119C.1
acaagcaacatagaaagtggaatccagtagcaacaatagagcaaaaatgagaaaaaaaaaaaaataaaaaaaaaaaaaaaaaaaaaaaaaaaaaaaaaaccaaagcttccccggacgcgtgggctagttcaaatcccaatcggaagcgctagaaggattaagatttaggtacacgtgcatgcaaagtcaaagctcttcaacattgtcagtgaaattcaattcaaaggccttggttttacaatgtcgtgattgggaaaggcaagaccttacccaaattaatctccttggagcacatccccatttccctatcgggcgtaatagtaaaaaggcccacaccgatagccattcccaatagttgcg

SEQ ID NO: 42886 - DNA, 367 bp, Zea mays
  Clone ID: MRT4577_13911C.1
ccaaaaaaagcaaatcaacctttttttcacttattggttatctaaattaaaccccgatctccatttcctaggggcccggggcttaccatgaaaaaaccctttcaactcaaccccatagacccaaatttttttccccccaacaacaaggggggcccctccctccccatttaccagctaaaaaacccccggaacaaaaaacattccgcaactggaaaaaacaaacccaggcttacaaaaaaaatatttgtcccccgaaaaaaagccgtaaaaagggggcaaaaaagctttttcatggaatccccccagggaaaaccaaggcggggggaacactttacgatgcaaattttgatgacgggggccaccccca

SEQ ID NO: 42887 - DNA, 597 bp, Zea mays
  unsure (1)..(597): unsure at all n locations
  Clone ID: MRT4577_139120C.1
tgtaaagnatgnnttcctggtggnactttggttctatttggggtgnnctggcattcgcttttgggcttgtggcagnaaggnnaggctanannnatcctctnntccttgnggcctcgacaacccgccggcaagaacccaccctttcctccacatgncnttgaaggacnngagcggctttcgtacccagcaccagcnnncgacgcaattacncnnccacgtcagnaagaagnnttgagcatttcggcaggnattccccagttcaagnngcgttcngnnaccttgggngnngccaccagnannncgcccgccgcgttcttggaagggactatctacnngccaaggttgatgctttgttgtgtacccttggtggatgcntttgttgacaaggaaccgttttgctcgagtcgtaagaaggagcctcgatgcgctttcttgcagatgacttccctttgcaaaccgttccttttcctcatacttgtgcaacaagnattgacattcccatacgtcggcttcagtaggaggagctgnggtttctacctttcggcctgtgcaactttcacaaccgggtaaggggcaacgttgaacttgtgccgtact

SEQ ID NO: 42888 - DNA, 354 bp, Zea mays
  Clone ID: MRT4577_139121C.1
gatcgatcgaccaataattgcctaattgcctgagcgcgcacgtggacgcaagagaagctcgccgttggcggccaccgggaagagaagttagatacctcaccagcctgcgcgcacggaacaatggcgcacgcgaaggccgtcgccgtcctcggcgccgtggtgatcgcgtcgctcctcctcgcggctgagagccgccacattgcccgaaaagacctgggcgtcggccttggtgggggcggcagcggcggcggtggcggcagcctcggtgtcggcacgggtggtggcgtcggggttggtacaggcggcggacttggggttggcacgggtggcggtctgggtgtcggctcagggatc

SEQ ID NO: 42889 - DNA, 191 bp, Zea mays
  Clone ID: MRT4577_139122C.1
gagcaactgcgtggttttcgtgtaattttaatttccctctctcaccctacgaatgggagagtcgagcaattgatccctccagacagtggtgaatgtcacatcccaaaaaagaagcccatttcattcccatgaaccccctttcggtaactgtaaggaagcaaaccggaccctcaatcattttctgtaaaaac

SEQ ID NO: 42890 - DNA, 365 bp, Zea mays
  Clone ID: MRT4577_139123C.1
gctatctttgctcgcaggcaacgagacggaactccttgcaatttgaagatattgtattcacacatcgaggtaacgtggcaaagtaagatctgctgctggcataacatcacgacaatgtgccatcccggcgacagcgaattttggagcaggttacacagggacaggacgtgaacaagaatagactaccaacacatggcattttaagagcagagaaaagtgagactgaaccacatggtcacttctaggacagacttactgcaacaggacattagatgctactagggtacatgaacactttgaccttgcgccccatggactcacggggtaggttggacagaaacttggtacggacgacatgagagttt

SEQ ID NO: 42891 - DNA, 250 bp, Zea mays
  Clone ID: MRT4577_139124C.1
cggacacgtgggcggacgcgtgggcagacgcgtgggctgacgcgtgggcgaacgcgtgcatgcgcagacgctgaggtcgagggacacggtatatgtgagcttcatcagacagcgacccgccaccgccacacttggacggaagccgagaagagtgtctggcccggagaccggacgataattgattcgtagcacattcggttatggtggacacaggtgacatggagcggatcttcaagtcggtcgacaccaa

SEQ ID NO: 42892 - DNA, 1478 bp, Zea mays
  Clone ID: MRT4577_139125C.1
gcctcaaaagggcagacagccaaatgccccaccacagcgtagcccctcctcactgactcgcctgcaaaaaccacttgcaaaccacacaaaccgaaaacgccagctcccctgcctccatttttagcaacttttcccttctgtcttcccatcacagtcacccttcttgcccccacgcagccgagcgtgcctacccctcctcgacccttctctggggccgccgttggacgctcatggagaggagtcgtccgggcgccgcgccgaaaccatcgccagaggaggaggtggcggcggagggccatgcgcatggtgacgatgtgacggggcaggaggaggaggaggaggcgacgccagtggtgctcaagaagggcccgtggacggcctcggaggatgccatgctcatggaccacgtccggcaccacggcgaggggaactggaacgcagtacagaggatgaccggcctgctgcgctgcggcaagagctgccgcctgcgctggaccaaccacctccgccccaacctcaagaagggctccttctcccccgacgaggagctcctcatcgcccagctccacgcgcagctcggcaacaagtgggcgcgcatggccgcgcactggttggcttggtgcgcgcccgcagctgcccgggaggacggacaacgagatcaagaactactggaacacgaggaccaagcgccgccagcgcgccggcctgcccgtgtacccgccggaggtgcagctccaccttgccctctccaagcgctgccactacgacgactacgacttcccgccgctcgcgtcgtccccgcagctgtcggcgacgacgacgaccgatgtccaggcgctgggcgccgggcccgggtacgccagctcgcgcccggcgccgctcgacctggctcgcagccagctcgccgcgacgacgacccagcagacggcgcagttcctctcgccgccgcccttctcggcgccgtcgtccccgtgggccaagccgttcgcgcggaacgcgcagtacttccagctcgcgcactcgtcgcccgtgtccccgtcgacgccgaccgggccggtgcacccggccatgccggacctgtctctcggcggccacggcgcgcgcgccgccgccgctgccgaccagagcaggctcccaccgctctcgccgtcccccggccccagagtggagctcccttcaaaccaatacggccagccggcgccgccgacctcggccgccgccgtcgccgccggacttgcgctgccggatcatcagaacgcggcgagcctcgaacagatgctgcaggagctgcacgacgtcatcaaggtcgaaccgcaggcgctggtcccggccagcggcggcggcgctgcactggagcggcatgattgcggagtttcagtcccagagagcagaatcagcggcctgcagcgtcggggtgacgacatggacacgctgttcggcctggtgcacccagcgctcggcgcgccggagacggcgcc

SEQ ID NO: 42893 - DNA, 444 bp, Zea mays
  Clone ID: MRT4577_139126C.1
ccggccgggagctcatcaatccaacacacaaacatccatatcattccatcccatcagtaaacatgcagttcaccacctccttcatcgtcgccgctttcctcggcactgcctttgccatgccacaggccgcaccagttgactgccccgagacgtcagccattcccacctgcggtgccccttgtatcacctctgcagctgcagctgctggatgcaccgacattgcttgccagtgtgctagctctgaagtgattcaggcttcagctcttggctgtgttgtcggtaactgtggaattcccgtggctctatcagtgcaagctgccgccgctgccgtctgcactgcctgtgcttagatgtggtatatttattgggacatataagtgacattatatacctgaatacaagctatattagttgcgcaaaaaaaaaaaaaaaaaacccgcggcc

SEQ ID NO: 42894 - DNA, 1158 bp, Zea mays
  Clone ID: MRT4577_139127C.1
tttttttttttttttggtgaagttaaatgtcgcttacacttttagttcttgtcttttacacgtacaaacaacaaaaagaatcaatgaaaaattaccgggcctcacaatatacagaaaagaatcactcaataaaccaacatctcagtatcagtacaacatttcgtctgcctccgatctggtccctccaggccctgccgcctcctcaccggatgtggcttcttgagaatgacgagagcccaatatcacgcacaggagtctgtgttctaactgatggaaatatgttccagaaccgtagagtttcgtcacctgcccctgttactatggtctgtccatcaggcgacgacgcgaggtaaagcacacgcatcgtatgtccagttagagttgcaacctttgacatggatgggtatttccacaccatgatctgattttgggaatatccatgtgtgctcacaagctcattcacatttttgcaccaggcaaggttgcaaacctggctgcctgtgtcaattgagttcagaacatttccgttagccgtgttccaaaacctgatgcatctatcagctgttccacctcctgatgctaggagtccttgctgatgtggtgaccacgctattgctttaacagcagctgtatgttctgtcaaccgcaaaactggctgttgcgatcgttggttccagactaataactggttgtcatttccgcctgaggcaagctcgcggtcgtcatgcgaccattcgagtccacaaacctctgatctatgaccagaaaacttgctgatatagtcattggggacacggatgtcatgctgcagtatgttcttgtccctgctacccgatgacaagatgcatgagctccatgctaataccccagtccttgtttggtgacctcccatatttctaatccgcttacagcgagaactatcccaaatctggacatctccaaggccggtgccaatggaaagataagagccttcccgtgaccaatgcactgcgcatacgctgtccctaggccccaaatcgcagagcttggtgaccttgctattggacgcggaccagaggtagacgcaggtgccgaggccgacagcgagcacgttctgcgaggaccagtcgacgaggttgagatagaagtcgtcctgcagggagggcgcgtccaggacca

SEQ ID NO: 42895 - DNA, 391 bp, Zea mays
  Clone ID: MRT4577_139128C.1
gaagcctcctctccctcgcgcacggtaccgcggccggccggctccacctctgggtggcactcgcacacccaccgtcgcccgccacccccgctcttcctcactccctactctgcctcgcgcaaagcgcaccgctaccacaggcggttggaccgcacaacttgccccagatccagaacagtctcctatctcctcaactcacgcatgacgacctcctcagctcccccatccgcatctcgcgaagagaacagaagctggtgagcgatccataattcggtcgtgaactgaagtgtgatgttggccatgagtattcctttttgtactagtgttcaagcaaaacaatcacttacatgtctgtgaatttgtatctcgaaatcatgtcacacagcatgaa

SEQ ID NO: 42896 - DNA, 528 bp, Zea mays
  unsure (1)..(528): unsure at all n locations
  Clone ID: MRT4577_139129C.1
gtccgcccagacgttccgcccaggcgtggcggggtgattacactttattacagtgcgagctgtagcacatttnatttgnagcattggtggnatctgtttctctgggcaacatnntccagtaanctnnttgtctttgggtgctaatcagccagcagnaagtttaccattcaannacatctttggnacactttgggatcgtaagcgcttagnannnctttgccttttcgcatattagggcnntctaggttnntgggttttncnngttttcttgctttagctttctttctacttctttaccactgtanagnnttttcaaagtctgnatcggtncnncaaagtttnnggtgtgtatttgnngttacgcttgtcctttcaccagtcctttcacttttgccttttggcgttgaccttagnagaaagaaacgtgttcaagtatttttgtttgtcgctaaaaagcattggggaatagctttttttagncnctttgaggaggaagttctcccagttgaactttttgggtgtttgtta

SEQ ID NO: 42897 - DNA, 263 bp, Zea mays
  Clone ID: MRT4577_13912C.1
gtgaccgtgactgcgtacctgtgactgtgcagcgcccgtggtgatctggggtagggggcacccctacagtgtggacccctcccccattattctttctgtccagcccctccctcccactggagcagctccagagccattcctcacccccgtgacctctcccagccagggctgagaggattcgaggtggctgggagggtttccaggccccctgccccttccccacaaactgggtgatagggcggacttacctggcccagccctgc

SEQ ID NO: 42898 - DNA, 563 bp, Zea mays
  Clone ID: MRT4577_139130C.1
ccttggataatagatgatcatctcctcactttacatcctcaaccaacttgtatttacatgctaaaacgtttgtaccttgtttataaatccgaaactagcacatgaagacgaatcaacactcaataactcggtgtctggattaatggcactcacatttcacaggcaatagatttgatgcttgttgtcaccccatttcttcccttgctctatgtatgtctgattctcagtccaaatgagctgtgccaatgtctgaatattcatgttttttttcttgtttattccactttcaaatgtaatagatcttagttcttgtcttccgtataagcagggggtttatgaaatcgttgttttttttttctaaaacggaagagctttaacaagttaagcttgaatgacatttgttcttttattgttgcagctttaacccattgaattctttcatttggtttgagctctttggagaaccaacagatcgagatgttgacctgcttggtggtgtaaagtggcattgtacaatttcattggattctccttattcagaaaacaacatactgtcttgacgt

SEQ ID NO: 42899 - DNA, 323 bp, Zea mays
  Clone ID: MRT4577_139131C.1
aaccactactccttttttctgccaaaagaatggacgtcagaatattgttaaccgcatttcgcgggcgtggtctcatggaactgctaggtgcgcccggttgtacctagggtagcctgcaaacatagcagttcagccccttccacaaacatggtttttaaatacaactttccacatttaacttacttgttttaaaactaaacattggaaaggggatggttttggtaatcttaaaggttggaccaattcccaccctttttttttaccaatccatccttttgggagaagggaaccacttttgaccgcttttggggtttaattaacac

SEQ ID NO: 42900 - DNA, 221 bp, Zea mays
  Clone ID: MRT4577_139132C.1
aatggaaatcttttttttttttttgcttttatattttttctataggaggaaagtttctattttaattgagtgcccaatggctatatatattggaaaaaagaaacccaaatttagcatggtttaaaaccatatttataggcttccctaaacccgtgactttaaacgagcccttccataccaaggttttaaaaaatgggccactcccgtatgaggccacaccc

SEQ ID NO: 42901 - DNA, 491 bp, Zea mays
  Clone ID: MRT4577_139133C.1
tggcttggaacctttgggctgatttatgtgcttgggtaccctacccgtctaattaagtcttaacactagtacaagtgatactataggggagataagaggcggcctagggaccgttcccggaagcgagacgctaggcggtacactggaagcatgggtcgcgggttcttgtaccgctaatctttcctatgggactagaactaagatggttttggggtgtggagggcatgcggagaacgcgcatacagtagacgcgagtacggataacgccctgacggttactaggactatcggaaatcatggcgaatacttcgacgataaacacgatagtatcgtctctttcgcgacaagtaacaccataactaaggacgccgccggtgccaataccggggccgtcggcacaccggaagggtacctaggggataaccctagtaatacccgctcgcttaacgccctttctagcgcgtaactcgtatacttacggaaccgcctat

SEQ ID NO: 42902 - DNA, 249 bp, Zea mays
  Clone ID: MRT4577_139134C.1
ttttctggtgatcacgaggacaccaccaaggcggcgcaggttcactggttcagcgaccgctttccgcgatgtgccgcgccacggcgatagagggcggcttccttctcccgtccccgtcccggcgcctagacatccgcgctttctaccttcggctttactcctgctccgccacgacgcccgctgagcttacgctggcctaccacccggtcatcggttgcttcttttctttttttttttttttcttcttct

SEQ ID NO: 42903 - DNA, 736 bp, Zea mays
  unsure (1)..(736): unsure at all n locations
  Clone ID: MRT4577_139135C.1
ggacgcctgcggtaccggtccggaattcccgggtcgacccacgcgtccggaaaacttctgataccatgaatattttaaaaaagaaaaaggaccgcaaaaggcttctcgtgtaaagctgagcactctggctctgtctgacccgcccttctctcccctttctagtttggcttcattgcttctcattaggatagggtaggctaagttccctatgctgctagcatcctaagatgatacctttgtggaaataattgtgaatagcatgattcatttcaagcagaggctgagtttaggacagcagctaccattgagaagatttctgtgacatgcattttaatgacctcttggctcacataaacaatatagggacatatctgctaaaagaacccatgaatttttcagatagtgtcccacagacaattctacatgcctcactggtggctcttagggtttcttccctcacttgactttatcattgtttactagtaaaaagcagcattgccaaataacccctgattttccactatgaaaaatgcgatgtgtaagcttttaaagttgtaggttaaacctcctgttgttatctttgctgtttgtgttgcttccttctatctggaatgtggtagccacctctttaaactttttttaacccttaattcagtgacttaaggtttggagatacacactgggattntggctacagactgacagttntgntgnttgcataattataatcgacatt

SEQ ID NO: 42904 - DNA, 344 bp, Zea mays
  Clone ID: MRT4577_139136C.1
gcacgagatcaagtgtagtatctgttcttatcagtttaatatctgatatgtgaaccatgtgttcatttcgatattaaatttattttttacgggggagaacccatcataatagcttgctattggggtccttgagtgtcgctcggacgttgcactgctgcccgagcatggcgcaccccagccaagacaaaattaactttttatcaatggactaagtctatttgttgggcaaatttaaattttgctaaaacggattggggctaagtctattgatattttttactcatagagatgaaaaccgaattgtaaaacaataaaaaaaaaaaacaataaaaaaaaaaaaaaaa

SEQ ID NO: 42905 - DNA, 829 bp, Zea mays
  Clone ID: MRT4577_139137C.1
ccgggattctcaggcagttcaaccgcgagtgggagacttgaaacaccctcgtaactttcacgaactctgctcgctgggttattccccactcctcaggctcgacaactaaataatcactcgaccgtttaaggacatcgattttctccaggttcgagagtaaacgcaaggaaaacttattcatcatggccagccagacccaggctctctccgagtcatcggccccggccgccagtgaggccgtcgtccaaaagaacgctaaaaaattcaagtttattcccccgccaacgttcacagacaaggaagaagagcgcaagtataagctcggtaaacttgctgctgccttcagaatctttgccgagcatggcttcgatgagggcgtcgctggtcatttaacactgagagaccccatcctcaccgatcacttttgggtcaacccttttggccgagcattttctcaaatgaccgtttcggacctgctgctcatcaaccctgatggtgagattgtgatgggcggtaaaccagacaggcaggtttacaacgaggcagcctacgcaatccatcatgccatccatactgcccgtccggatgtcgaggcggcttgtcatagtcacagtacttatggacgtgccttttccacacttggtatcgacctcgatattaccactcaggacgcgtgtgcattttacaacgacctggccgtttaccgcggcttcggcggagttgttttggcggcagaggagggtaacaacattaccaaggcgcttggtcaaaagaaagctgtaatactgcaaaaccacggttttgttgacgacaagcaccagcattgaag

SEQ ID NO: 42906 - DNA, 144 bp, Zea mays
  Clone ID: MRT4577_139138C.1
aacaccatgccctacatgtatttgtgagcaactggcgtacaaactacaagctgatgatgaaaaatccaccgtgaacacagggccaatgagagtgatattaaatgaacggcggatccgaggcgtaacaaccaaaaaaacataacg

SEQ ID NO: 42907 - DNA, 340 bp, Zea mays
  Clone ID: MRT4577_139139C.1
caacaagaatacaacgaagttctttccacttttatgacgaaaagggcacatggtctcaacccttctcaaatgtacgcggcgcatgctgtaaattgactgctatacagccctcccgccatggcgaccaccacataaagaacagtcacgaccaccttgtatgagcacgctcacaccaacactacaagtgcttgttgattcaacaagctccacacacttttgccaggcacagtgacgatttgatagaccgacagatacccgcaccgcccgttcccaaaaaaaacgacgcttgagaagcacaaccagacccgatcggttggcattgccgggtgcctttacattc

SEQ ID NO: 42908 - DNA, 495 bp, Zea mays
  Clone ID: MRT4577_13913C.1
gcttggaacctttgggctgatttatgtgcttgggaatgaagacggtccgcccaccagcctagccgttcttagtctaaattcgcgggtcccaaccacggacgtcggtatcggccccatactctaagcacatgaatccctcagccatccctcctataaggaacggacaacggaatagcgggagagaaaccctcacactatcgtatcggtcggcgtgaacaacggaagtctcccggcgaccacgctaagaggaatataacacgtttagtagcttcataaagcaagcgacatacccttccctaaacggacaaataaaaaacggaaggagggtcctcacgctatcgtcacggtaatagtcggaagttgacgggtagccgctacgctttgtaacgtcggccctatcctctaggcagcggagtccgaccctccacacttaagcgagggtacttatacgtgccgggataacggtcactgtaccatggtaatggtcgttatacg

SEQ ID NO: 42909 - DNA, 153 bp, Zea mays
  Clone ID: MRT4577_139140C.1
ggccggggtgcgcttcggagggtcggatctgagacgagacgatcccccccctcccctcaaccggaacttgatttaccccatctcatcccactgactccaccgccgcacccgtacgtcccccgcaagttatcctcgccaacctcgtcatccact

SEQ ID NO: 42910 - DNA, 172 bp, Zea mays
  Clone ID: MRT4577_139141C.1
cccccacttaaaaaactatcttctccaatatacccgcttactaactatctacttgaatcatttatccccgatgattgaaaaataatatctcacccatcaccatacctttcaaaaacaaacctagcaaagacctaaatgaacaatttaaattaaaataaaaaagtattgatcc

SEQ ID NO: 42911 - DNA, 268 bp, Zea mays
  Clone ID: MRT4577_139142C.1
ccaacgacgaagcgcgcacaaagagcaggacctcggagctgtgatggcacaagccatggcgtcgatgacaggcctctcgcagcgcgtcgtgtgcagcatgcgcgccgacagcagaaccaggacggccgtcgtcgtcgtcagggcgttcgtagaggtcgacaccgttccgcatgcgaggctgccgcgccgtgatcaggcttgtagccactgggatcgtcagcggcgcgttgtcgcacgcggcgcgctcgagaccgtcaaaaccatcaat

SEQ ID NO: 42912 - DNA, 230 bp, Zea mays
  unsure (1)..(230): unsure at all n locations
  Clone ID: MRT4577_139143C.1
ctgccananacacaatattattatcagagaaacaggcacatgagacgaccaagaaagttctaactgaaattcagtcgagaaatgaagagttaatcaagnaaattcaggattgtgataaaaatattcntgagcttcagntaactgtgganangnntcnggaaaacacatctactacagggcnttactgttgagagnacgagaacnaaacnattcnaccntgnaggcacnag

SEQ ID NO: 42913 - DNA, 450 bp, Zea mays
  Clone ID: MRT4577_139144C.1
gggcagggaaaaataattcgatcccaaaaaaaaaagaggtgggttaaaagaacacaaaaacatgggcccgacaggaaatttattcgatcccaaaattgggaaacagggttaaaatccggacctatgggccccccaaaaacattagggaggaaaaacaacatcgggcgccgggagaaagccccttaaaaaaaccgggggaggccccaactccttttccaaaaaaaagagggggggcaccagcccaaccaaattgcccttaccgggaggaaaaaaaaaaaccccggggtccaaacacccgtaaaccaaaggaccagggggcacgtccagttcaaccccaaaaaaaaggcccaccccggggacccccctaacgggggggttcccgctaaactgggggcggagaaacggcttgaaactttcccctttcctcaaaacctgggccagaaaaccggg

SEQ ID NO: 42914 - DNA, 1030 bp, Zea mays
  Clone ID: MRT4577_139145C.1
accagtcgcatatcttccgtcgccgaattggactgctctaggggtcgacatcgccgccagcttctcttcttcctcttgcggctgcttgcggtctcctcttctcagcgaaaccctagccgatttttctctgctcctgtgcggatggattgtccaccgagcaaagtggttgcagatgctgtggaagctgctcgtgctgctgccgttgcggcctcggaggcgagatgcgcggtatttgttgctgagaaggaggccaaggctgcggttcagttcgccgccattgccgtggagaaggttgaagcagttaaggcctcatcgaatgtggatcttgtcgacttcaagtatcatgtgagcataaagaattcgttgagatatgctattcaagaaatgaggaggcaatctaaactgttgcattcggttcaaaaattgtgttcgactattccagaggtacaaggtggcaagataggtaaggttcgcgggtttctggaacatgtgtgcaaggagctagacaaaacttcaagtatctgtgaagaagatttagaaactaagaatccaacttgggatctttacgacaacccttccgtagatgatgaacatcctctagatgatgatgaacttggtgatgggtacagtacagaagatccagagctatgggaaatggtttttgacgacttcaagtgggaagagattaaagctaatgtctcattcgaagagcactatcgtgtcataaactacaggttcgaagagataaacgaccgtaacatgtagttgtggacttgaggttgcctttggtgggttggtttcattctggtgtcattttggtctgtctgggatatatttccgaaggacgcaactgatatttgttgtatgacctattatctgatgtaagaaccgtagtgtttgttgtcgtgttaaggcctgatgaatggcgtttgtaagaacattagtgttatctgttttctgtgttgttgagatgaggttgtaagaactaatggctcagtgttattcatgtgtgttatatgttatctgtttt

SEQ ID NO: 42915 - DNA, 783 bp, Zea mays
  Clone ID: MRT4577_139146C.1
cattgggtacctcgaggccggccgggcttccagtgccgagaagctcgtttccgcatacgcccaaccaaggcgaggcgtttcatcgaacgcaaaccgcgttgtggccctgaccccaaaccatgcggctcacgaagctccacccctccctcgccgccgcctccacgctgacccctaaacatagcctgaacgcaaaccgcgttgtggccctgaccccgtcggcgtcccacagcagcggcggtctccgggtctctgccgcctcggtggcggcggcgcagcccacaccggcgtcacctgcagcgggcgctgcggcggcactgagccgcgtggacgtgctgtcggaggcgctcccgttcatccagaggttcaagggcaagacggtggtggtcaagtacggcggcgcagcgatgaagtcgccggagctgcaggcgtcggtgatccgcgacctggtcctgctgtcctgcgtcggcctccgccccattctcgtccacggcggcgggcccgagatcaactcctggctggcgcgcgtcggcgtggagcctcagttccgcaacgggctccgcgtcaccgacgcggtcaccatggaggtcgtggagatggtgcttgtgggcaaggtcaacaagcagctcgtgtccctcatcagcctcgcgggtgccaccgccgtcgggctgtgcggtaaggacgcgcgccttctcaccgcgcgggcctgccctgacgccgcctccctcggcttcgtcggcgaagtgacgcgcgtggaccccgccgtactccacccatcatcgcgtc

SEQ ID NO: 42916 - DNA, 280 bp, Zea mays
  Clone ID: MRT4577_139147C.1
cccacgcgtccggtgactcggggcatgcatgttacgaacgcagactagattagtggattatgaagctgggtggcctaggtttatagtctgagaaggattctacttcggtgatcgttgcataggtgcaccttagatcatgactaccgtgcttacggttttgaatagggcatcgagagtctcttcatactggtgacctatgaaaagttatgtgtatataactgtccaaactgggctgttgctttcatagttggttaatctttgacatgtttatatggtctgt

SEQ ID NO: 42917 - DNA, 336 bp, Zea mays
  Clone ID: MRT4577_139148C.1
cgcgcctggattcacgcgtcgaggcacgcgtccgcggacgcgtgggcggactcctgggttgccgtctcccttttgcgtgagcagaggaaagagggggagaagagcagtcgccatgtctgtcatcatccacaagatcgaggagaagctccacatggggggcgaccacaagacggaggatgagcaccacaagaaggccgacgagcaccacaagaaggaggaggtggagcaccacatgaaggacggcgtagagcatatggaaggcatcgtggagaagatcaaggacaagatcaccggcgagcacggcgacaagtccggcgaccacattgcaaagaagga

SEQ ID NO: 42918 - DNA, 194 bp, Zea mays
  unsure (1)..(194): unsure at all n locations
  Clone ID: MRT4577_139149C.1
gttggttggacacatgntcgatgagctgtacgggcgtgtgtctggactgacgagtgcgcacgcgttgagagttgtcgatagaatntgccatcactcgcacgcgacacagagcccganactctcgcaccgttgtagtcacttnagngtatttacttcganaggcattnatngtntgaaacacaacntgaggagac

SEQ ID NO: 42919 - DNA, 1678 bp, Zea mays
  Clone ID: MRT4577_13914C.1
cattgggtacctcgaggccggccgggagtgagccggggtactgtactgatcactcctggcctctgcgaaggaaagaagaggtgggggaggctggtttggtggcctgtaccgatttgcagcagctgatggcggcgcctctgctcccctcttccgtctccgtgctcctctcgctccacatcgcgctgctgctggtcctctgctccagccaggtaggagattcctgctcctcagtgcgggactgcggcacgggcctctactgcggcaactgccccgccgcaggcaggaccaagctctcctgcatcagggacctagccatccagcccacctccattgtgaaggggctacctttcaacaggtactcatggctcgtcacccacaattccttttccatcctcggggagccgtcgcgcactggggttgagagggtcacgttctacaaccaggaggactccgtcaccaaccaattgaggaatggtgtcaggggattgatgcttgatatgtatgacttcaacgatgatgtatggctctgccactccctgcaagggcaatgctataacttcactgctttcgtaccagcagttgacacactaaaagaggtggaagcatttctctccgagaatcccacagagatcataacaatatttattgaggattatgttcattcaccgatgggactgagcaaggtctttactgctgctgacttgatgaagtattggtatccaatctcggaaatgccaactagtggcaaggactggccaagtgtcacagatatggttgcaaaaaaccgcaggttgctggtgtttacttctgatgcttcaaaggaggctagtgaaggaatagcttaccaatggagctacttgctagagaatgaacctggagatccagggattgtgcctggttcttgtccaaacaggaaggaatcgcagccactgaactcaaggccggcatctctatttctgcaaaattacttccccacgatccccgtgcagaacgaagcatgtaaagagaattctgggctaccacaaatggcccaggcttgttatgccgcagctgggaataggatcccgaacttcatagctgtgaatttctacatgcgaagcgacggtggtggtgttttcgatgttcaagacagaatcaatggccgcaccttatgtgggtgtgacaccattgctgcttgccaggctggagcaccaatgggtgcatgcaaggacacgggggcaccaaatcagactacatcgccctctgtaaatggaaatgtctattcaggaactatagaattcaagacgcattccactagtgctgctagcaataacaacatccggagtagatctgtttttctgctaaggctgcagttgactttgctgctctttttctctttcaggctctagttttcatatatctggacctttttcccacctactgtatagctgaaagtaacatcagcttttgttgtgagcttgctttctctattgggatgacggttagtgccttgctagctttataatctatagttgggagggggtgtggatcaatgttaatgaaagaatgggtagagatcttcctctgttctccgaggaggagtaatacggctacaacctacaaagaaactgatgagtggaagttcatgctggttatgtgattactagataaaaaaaaaaaaaaaaaaaaaaaaaaacaa

SEQ ID NO: 42920 - DNA, 565 bp, Zea mays
  Clone ID: MRT4577_139150C.1
gggaccctcgaggccggccgggagatctcttctaatcttcacagtcttcacttgggcagcatcgacttccaaccagaatcaaatatcatcacctctcaaaatcctcacacatcacaccacaaaaatatcttcaaaatgcaactcacagcaaccctcctctccctcatctccctcaccaccgccataaccgtctcctacgacaccggctacgacgacggctcccgctccctcagtaccgtctcctgctccgacggcaccaacggcctcctcaccaaaggctacaccactcaatcctcgctcccctccttcccgaacatcggcggcgcctcagtaatcgctggatggaatagtgcgagctgtggtacttgttgggcattgacgtataatgggaatacgattaatgttttagcgattgatacggcgactgaggggtttaatattgcagaggcggcgatgaatacgttgactggggggcaggcggtgcagttggggagggtggatgcgagttatgtgcaggttgatgatagtgtttgtgggctgtgagttggggatggagaggatgtat

SEQ ID NO: 42921 - DNA, 657 bp, Zea mays
  Clone ID: MRT4577_139151C.1
ttttttttttttttatagcaaggcctgtatatggtctttcgctcgttctctaacgtcacaagtaacacatttttcacgtaaaatacacagcaggcaggtaacgtacgtagccatgagctactatgaggatgctttacgaccaaccagcgacccttgacgcacgcaggtcaggtgggtgctgctgctgccgggtcgcgagaaaacaggggcggctcgcaacaaggggggtggccgaagacgacgcccgccagaacgtccagcagaggcaagctgattgattggaactcgacgtgaactgatgaaactgatggtggttcgcgcacatgcagcacaatacaatctgacacgcgcgccgggaacagcgtggcccgctgcgtcagggacgacgacgacggacgatcctgtgcctgaaatagcgagaaaggaggaagagtcgtcgtcgccgccgtcgccgttgttgggccgtagcttatgaaccggagccccttggctcacgcccccgatgcggtacatgcatgtgtgtcctggcctggctcgtgggcttttttgcttggctgcatcctgcgtgtgtgtgtcctcacgcggcgagcgggggacggggacgttgcttgtgcttccattattttggaaggggagcggactggagttcttgctaat

SEQ ID NO: 42922 - DNA, 957 bp, Zea mays
  Clone ID: MRT4577_139152C.1
tgtgaactagactattacaatggttctggtgattcaaatttcctggatcttgactggctttcagcttcagacaatgaaaggtcaaaagccataagcactcctgatgtgaatatttcaactgatgatggtgttcatgatgtaatctatgggataacggatgatcaagctgctgagatccaggctcagggattatctaaggattttgtgcagtgggttaatcaaggagagacattttggtactgatattccaagatgggcgtaccatgtaaattcaagccacataatggttgcacttgcaaaaaggggggaaaataagggagaagtctacatgatggcagtccagacctcatttcaaagcatattaactcttaaagaccattgcaaggagggaccatcaatgtgcatgagattgtttgtcaaccatcagcaattcagcattctcttttcggtatacgaatatgatgatgggcttagagtcacacgcactgttagaagacttgtctagggaagtgtaccattctgttcatttattgaagcttgctcaccaggctggtagatagtgcattgttattattttttcttaaaaggaatgaaagaatgtaggtagtttattctttttaagatgtaccattgtccaggcatgatccccatctctccatcgtgtaaatatatatgtcccaagtgttccacttttcccttttccttccatgagagttgaggtgggcatgaaagcaccatttttccctcagtctctttgtatgggttttctgaaatcatgtacatttatattttgtggcaagcggagagattgttgtgtaatttccattgtaccaaacgtccaaacccctcttaccaatagaagtctcttggactgtttgtcaaaaaaaaaaaaaaaaaaaaaaaaaattttttatttaaccccccccccccaaaaaaaaaaaaataaaaaggccccta

SEQ ID NO: 42923 - DNA, 182 bp, Zea mays
  Clone ID: MRT4577_139153C.1
cacactctttcgtcatctcttctcccactaataacttcctttcattcaccaaatcacctattacagatctgttcacattcctcgctgagccattccacaatgacccattctctcactctcttctatatcacacttatcctaatgaacttcccgacacataagtcatctatcacatctaccac

SEQ ID NO: 42924 - DNA, 438 bp, Zea mays
  Clone ID: MRT4577_139154C.1
gcttcaaaatgctgattcgtgtttctgtcagcgcttccacgacgagtggtcttccttgaactgaatcaacacttgcacaacatacgaggaggtatagattacaccctactgccagccagacctttaactttaatccgaagcggccaacttcctggtatacatttgaatgcagatttaactggcaggaaatttatttcggtcctatcattcttaaccgaacatggcctaaagtattgttagatgtatgtggctgcacatcacaactcatgggattggagacaatacaactggccataagctagctacgatttacttcattccagagggcttgctgaaccatggcacaccacggtggcggaggaccaaaggatgttatggctccctggaagtgcatgttttacagacaaataatcaggtggtacgatgccttcatatata

SEQ ID NO: 42925 - DNA, 377 bp, Zea mays
  Clone ID: MRT4577_139156C.1
tggcctttagatttgtgcaatggagttctgcaacatcaggattgatactggcaactctattgataagactgcaggcacaaataaaggttggatcatgaagtgagatcaagctcttatggacaggtagcgaacttcttatccaatcttagcttattcccaatcgagcacacgtgaagaagaatattttgtttgattactgtaaatgtttaaggccatgaaaatttacaaatctgaaatagtcgtggtatatgtatgctattcaaaggagacttcgtctgctgttaactatttccttccgttgcacacatgtgagcttgcaagtgccacacttatggttttgaccacacgagatgcaatgcgaaaattaatattgtgtc

SEQ ID NO: 42926 - DNA, 168 bp, Zea mays
  Clone ID: MRT4577_139157C.1
acaatttgtggtaggaaatgggcatgtatcactactctccatccattcataaatacaaccaagatgaaaatggtacacagcacttggttgtatttatgaatggatggagagaagtgatacatgccaattttgctggtaagcgaatatggagttgttgcgagagcccat

SEQ ID NO: 42927 - DNA, 679 bp, Zea mays
  Clone ID: MRT4577_139158C.1
caggagacccgggcaaagaagagaggctggcgagcaagaagcgaagaagccccgccccgccacgcgtccgcaagttcttgcgaaggaagtatcagtcctttccgaagggtggctcgcagcagacacattacaggttgaagaagcaggctcggtacatgccatccccattgggccatggtgcagggaccgaagtgccttctaccagcagaaacccaaaccttgacttaaatcaagattctgtcctgaacgatgtggggaatgattgccaggggcaacatggccatccagaagttgaaaagttagatcaggtcgaggtgaatgaagatacgatgacacctgatgtcaaattatcagtttgtagggatacaggagagtactctcctgtaagtgaaggtaagagggcggttccatggcaagaccggttgcgttgaagacctaggccctcagttgatgtggctaagaaataagctgcttctctgacagctagttttgctactgtatccctcaaatgctcagtagtgctctgtacagaaacaatgggacatgatacttatatgcatgttacattgcctgattgacaaactcagatgtttgtagcatgcttctaagcaagttagacaagtgagttgtgattctatgaatggttctgtccagaatttggattggcccctttgttttt

SEQ ID NO: 42928 - DNA, 816 bp, Zea mays
  Clone ID: MRT4577_139159C.1
cattgggtacctcgaggccggccaggatcctcagccgtcgtcgcggccttctacctcccctcagccgccgtcgcggccttctccctcctctcctcagccgccgtctcagccttccccctcctctcctcgtcgcggccttcccccacccacagccgctgcgccgtccgccgtccgccgccagccgctgcgccctgcgcagttgctgcaccgccccttctcggactccgcccgatctacttctgctcccgccggagcgtccgccgccagccgctgcgccctgcacagttgctgcaccgcccctgctcggacttcgcccgatctgcttctggtcccgccggacttcgcgcagggcggatcttcgtcgggatttgcgggcagtgctgcgggtctgcgcctcgcaactcgactccgcccgatctgcgcctcctgctcccgtcggactttgtgcagggcggatcttcgccgggatctgcgggcagccacccttctgtgctgttgcggcaccacccctgccctatctccgcccgatctgcgccctcctgctcctgccggacttcgcgcagggcggatcttcgccggaagctgtgggtctgcgcctcttgcgtccgttcgccgtcgtcgcgggcagtgccgcggatctgcgtcgctgtcccgcccttctgcgccgttgccggtatccgtcctcctgctccgtcgcacattagccctaccgcgccgtccgtcgctgcatcgcacctgtttgtgcggcgtgcagcacaggccagatctgctgctgtactgtgacttcgcacggtctcggactctcggtaccatcat

SEQ ID NO: 42929 - DNA, 371 bp, Zea mays
  unsure (1)..(371): unsure at all n locations
  Clone ID: MRT4577_13915C.1
acccgtacgcgacttgcgagtcgcgacccggtttcggcttcgcggtgagccgcgacggctccctaacgtaaacgccggcggcgcgcgcggaaagctgcacggcagcacgggcgcggcctcgtctccgcgcctgggctgcaagggcggcggctcggcgcggtgggaggcggggggcggccatccggtcaggtccagcccaggactccaggtgaccaggtcggcaggtccgcgctccgcaacggttctggcgttctgcggctgagtacagacgacagaggaattggggatttacattagcgatttacaaggcaacttggaagacaagcagggtttcatnccgcaatgtcagctccaacagcgatagcaacatg

SEQ ID NO: 42930 - DNA, 806 bp, Zea mays
  Clone ID: MRT4577_139160C.1
tgcatgacactacaaacaaacaatggtggcagaaatagcatgagcttggggttatatgttccagatcatgtttcagacaaatgcaggtgctgtgatgattacagatttggtgttctggtttattctgtaccctttacttgccgacaatgtgtataagattgcttttattctgattgggacacattcaatcaacgttgtcttcatagttggagatgcagctctaaacagactgcatttcccgtggtttaggatagcatacttcctactgtggacgggcatttttgttaatgttcagtggatcgtccactttttcgtgtcaatagggtggccttacccatttctagacttgacattccctggcgcccctgtctggtacctggtggtggcactgctgcacctcccatgctacggcatgttcgccctggtgctgaggctcaagcatatgttgctggaaagctggttccctcaaacttatgcgaagttaatcaaggacgacaatagatggagttggttgtctctatacgcttccttcagcaaaaaaattaagcggaggttctgcaaactgtatgcaccacggaatcacattgaaatagatcacacctgtctgtcgacgggtttctccggaagtggacatgtagattgacagagcatgttccaaaaatttcgagaccagcagcttatttaaaccagctgttgtctccagcatcatacccttttttttgtttacccccaatggagatatcagacatgtgtacagtccgctaatatattcaatcgtttccagcagaaaaaaaaaaaaagcggcc

SEQ ID NO: 42931 - DNA, 340 bp, Zea mays
  Clone ID: MRT4577_139161C.1
agagacaggtggctgctgagggtgcagttgtgggtgtctcagaggacgatggaacagagcatgtggttgcatgtccactccagccataaggagtgccctgtctgcaaaggagaggttactgaagggaacattactcctatctatgggagagggaattcaggttcgtctatggagaagaaggtcgcagaggatggtaacgcatctggtcccaagattccaccaaggccacatgggaatcggctagagagcttccggcagcagttccaccatttgcgacccatatctagacggcttggtgaggcacatggttttttgtctacttggaggcgcatttttgatc

SEQ ID NO: 42932 - DNA, 222 bp, Zea mays
  Clone ID: MRT4577_139162C.1
cagacgcatggtacgtcgggcttacccctttatctccagccgggtaacacttgccgcgctgggctcttccaccggcgggaggatgtcgttcaacaagatcgtcgacatcgggagccttgccctcgtgatctacagggactactatggccgcctcgacgtgatcggcgatgtggtggtccagtacaaggtacttcgcgtacgcattgatctgggcaagggcct

SEQ ID NO: 42933 - DNA, 226 bp, Zea mays
  Clone ID: MRT4577_139163C.1
gcacgagactgtgggaaggtgaaggctggtggtgcttacaccatgaacactgctaatgcggtcaccgtccagaacacgattcgccgcctgaaggaacagactgaagcatgatataactccttaaaataatggggtttcctggaattgctcctgtcaagcatgttgtgggggccttatctaatggaaatgtggaatcactgtactggctgttttgccgcgacaatac

SEQ ID NO: 42934 - DNA, 138 bp, Zea mays
  unsure (1)..(138): unsure at all n locations
  Clone ID: MRT4577_139164C.1
tcctcctcccaatgccccatgcgacgccgatgtgtcagacgacgaaggcaagggcgcggacagcccgtcgtgcgcgcatctcgtcgctgagttcatagtcgcgcgngattagaaggtggtggatcttgcagagctccg

SEQ ID NO: 42935 - DNA, 1178 bp, Zea mays
  unsure (1)..(1178): unsure at all n locations
  Clone ID: MRT4577_139165C.1
cattgggtacctcgaggccggccgggaaaaattacaaaaaaaaaaaaaaaaaaaaaaaaaaataaaaaaaaattaaaaaaaaaaaaaaaaaaaaaaaaaaaaaaggtttttcgttttccgccaccgcccgatccccacaccgccacccgccgcctctaaccccgttgtcccgtcttgtgctctgacctcaccgctggtcagggtcagaccgcatggaccccaccgaccagtcgccggaggaggtgtactccgtgtgggcccttccgccggagcccgtccgtgatcgtttccgccgcatcatggagggcctccgcgctgcatacgggggccccgcctttgagccgcacgttaccgtcgtcggtgacttccgcggacgccgctcggaagctgtcaaggtgttccgcgccgccgccgccagggtccaaccctacactgctcgtgtcacgggggttgcccgtggcagcttcttctaccagtgcgtctacatccttctcgaccccaccgccgaggtggtgggagctagcgatcactgctgcgccaacttcggttacaataaaaaaactccatacatgccgcatgtcagcctcttatatggagaccttacagatgaggaccgaggaggaggcaaggaagaaggcagaggagctgatcaaggatatctgtgtaatagagtttgatatcactgagcttgtgctttatagaacagatgccatagataaaagcttggagtcatgggaattggtggaggtgtgccatcttganaanaagtgattagtttcctctccaggtgattctgctgtaagttaattctgagaatttgtaatgctttatagcgtcttgttgactactttctaagcaactggggcacaatactttgaatgtgaataaggtataatgtgctcttctgattggagcaaggaataatatacactatgtgatgctgtgattgttttccatgaaaaaaaaaaaaaaaaaaaaaaanaaaaaaaaaaaaaaaaaaaaaaaaaaaaaaaaaannaaaaaaaaaaaaaaaaanaaaaaaaanaaaaaaaaaaaaaaaaaaaaaaaaaaaaaaaaaaaaaaaaaaaaaannannnaggggggggngcttttaaaaaaaacaaaatttaaaaaccccggttttgaaaaaaaaaaattttttttaaggggcccccaaa

SEQ ID NO: 42936 - DNA, 181 bp, Zea mays
  Clone ID: MRT4577_139166C.1
tgctgggtgcgccatcatgggtgagcggcacgcgagggcgtctacgaggggcgcgtaccgctgcaggcctagaagactctgctgggccacggacgaacactcctctgataactgctgcagcagctaaggggaggctacggattcgaacattatgactagatcagcagacacagaggtagcc

SEQ ID NO: 42937 - DNA, 460 bp, Zea mays
  Clone ID: MRT4577_139167C.1
gaggataaatataggatcaaaacatatcatcgggggccaattaatatatgggtcccgcagaggccatcgggtcaaccaacaggcggggggacccccctccctccatgagcccaaagaccggccccaaacatgcagagggggatagcaaaccgaaaaaccctggttctctctctctcacacaccccacacaatacctatggatggcagccagctcggccccccttattattggtcaaccccccccccaagctagatagataataatcatatccctgggcgccgatcgatgggaacaacaattgcagggggcccacttgcaattgccaccccaactgcagccgggggcggcctccccggacccccccgggggctcaacaaactcgggcgcggcctttttttccggggccacccccaggaccacgggggcccgcgcgggggggctcgtctcccccaggcaggg

SEQ ID NO: 42938 - DNA, 983 bp, Zea mays
  Clone ID: MRT4577_139168C.1
attgggtacctcgaggccggccgggggtgcttcatcggttccgcctcccgcgaaccgtgatgcttcttctcctcacagctgcaaagcatattcgctttccgccaccgcccgatccccacaccgccacccgccgcctctaaccccgctgtcccgtcttgtgctctgacctcaccgctggtcagtgtcagaccgcatggaccccaccgaccagtcgccggaggaggtgtactccgtgtgggcccttccgccggagcccgtccgtgatcgtttccgccgcatcatggagggcctccgcgctgcatacggcggccccgcctttgagccgcacgttaccgtcgtcggtgacttccgcggacgccgctcggaagctgtcaaggtgctccgcgccgccgccgccagcgtccaaccctacactgcccgtgtcacgggggttgcccgtggcagcttcttctaccagtgcgtctacatccttctcgaccccaccgccgaggtggtgggagctagcgatcactgctgcgccaacttcggttacaatagaaaaactccatacatgccgcatgtcagcctcttatatggagaccttacagatgaggagaaggaggaggcaaggaagaaggcagaggagctggacaaggatatctatgtattagagtttgagatatctgagcttgcgctctatagaacagataccacagataaaaccttggagtcatgggaattggtggaggtgtgccatcttggctcttgagaagaagttattagtttcctctccatggtgattctgctgtaagttaactcttggaatttataatgctttgtagtgtcttgttgactactttctaagaaactggtacgtaccactggcataatactttcaatgggaataaggaatgatgtgttgtgctcttctgattgtagtaaggaataatatacaatctgtgattctctgttagttttccatgaaatatactttgtattattcg

SEQ ID NO: 42939 - DNA, 637 bp, Zea mays
  Clone ID: MRT4577_139169C.1
ccggccggaacgtgacaccacgggagaaccgctctacctcagcataatgggcgatcgccgacgcctccacttctagagaagagcgagacgcgcgatgtctgggccagcgtacgatcgatgatcactcctgctagtgcggaatccatcgccatgacctcagatacgccggcgtcgacggcacgacagcgcagcctgcactcggttggagaacttcccctgagctcagatcctcgaacgacagtgaatggcatgatactctgttacgtgaacctagtacactcttgccctacactgcactttgtgctagaatcacggatctactatcgttcgactgatggcgctgctcgagatctcttcccacgctcgaaggtctctggatcgcgttacatatcatcactatctggtgtcgccctctcaatatgcgagatgtatgacgatgacacgactctcagctcaatagacataagcggattgatacatgcggcgagtacactgatccattcgggcttcattcattgaataatgctattatggccattgaggacttcaagatgcagctcatctatatcatgtagtatatacagcgatgtgcatgcgcatggcggaatgcatgatacgaatactatatcatcgcatc

SEQ ID NO: 42940 - DNA, 620 bp, Zea mays
  Clone ID: MRT4577_13916C.1
gggtacctcgaggccggccgggggtgggggtcctggtttggtggcctgtaccgatttgcagcagctgatggcggcgcctctgctcccctcttccgtctccgtgctcctctcgctccacatcgcgctgctgctggtcctctgctccagccaggtaggagattcctgctcctcagtgcgggactgcggcacgggcctctactgcggcaactgccccgccgcaggcaggaccaagctctcctgcatcagggacctagccatccagcccacctccattgtactcatggctcgtcacccacaattccttttccatcctcggggagccgtcgcgcactggggttgagagggtcacgttctacaaccaggaggactccgtcaccaaccaattgaggaatggtgtcaggggattgatgcttgatatgtatgacttcaacgatgatgtatggctctgccactccctgcaagggcaatgctataacttcactgctttcgtaccagcagttgacacactaaaagaggtggaagcatttctctccgagaatcccacagagatcataacaatatttattgaggattatgttcattcaccgatgggactgagcaaggtctttactgctgctgac

SEQ ID NO: 42941 - DNA, 345 bp, Zea mays
  Clone ID: MRT4577_139170C.1
aaaaccccaaagcattttttcatagagacgggaaaaaaaacgagaaaacggtttcaaccccccataaggggccctccttttttcccgtaaaacaagggggccatgcccacggggcttcaccatcgcagccattaatttcctcaaggggacaggggggaattacaaccaatcgacacagggttaatcgcctaaccacacacctgtttgttttgaacaaaaaaaatagggaaacagggctccgggcaaaaaaagcgtaagggcccaaggctttcccaaatgccgaaaggggggggggctttaacaggaacatccatcctttcaccaccaaatcagccgcctacaaaa

SEQ ID NO: 42942 - DNA, 569 bp, Zea mays
  unsure (1)..(569): unsure at all n locations
  Clone ID: MRT4577_139171C.1
aaattggtggcgaacctggggngatattcgataccgacggtaccagcccacccgcgtatgcaccttggcctccgggttttccaggcgcacgttgggaatgttgtaggccatgttggtaaagcccatgcccagttcaaaggcgccctcgttgttcatattgggcgcgaacagtgccgtgatactcggtgccacggtgcggtgcagccaaccggacggcgtgccatccttgttcaggctggcccgcaggtattccgccgacacggtgtggaaatatgaatagtggatatcgtcctcgcgggtccactgcacgcgcacggcctggcccggcattgccttggcgagaatggccgcctcaatgatgtagtcaggcttggacttgcgcccgaaaccgccgccgagcagggtcacgttgaccgtcacctggtcgaagccgatccccaggcgctcggcgatccgctcgcgggtcacctggggtgcctgggtcggcgcccaggcttcgcagtggccgtcgttgaaacgggcgatggcaaccatcggttccatcggcgactgggccaggtgcggcaggt

SEQ ID NO: 42943 - DNA, 430 bp, Zea mays
  Clone ID: MRT4577_139172C.1
ctccaaaaaaggggtcaaccacttatcgtttactcacgtatggacaccggagagcacacatgtaggtatgagcagcaccagcctacatcctcaccgcggcctccatgatcgcctggtcggctctctacacgagctcatcgaggctgacgcgcctgatgaagaggaaccccttgatcagcaggaacctgtacagaaatgacaggaacaccgagcatgacgactccactgtactggatggtgaggaacccgaacgacatcatgttcaaaaacctaaggtggatgggcgagaccagctgatcgaccattaccgagagaaggatcacggggaccgaccaatccagaatcagcatggatgtggtcccctcccccacgtccacgaccgtgaactcacatggctggatgtgctgtagcgacacggtacatgggacag

SEQ ID NO: 42944 - DNA, 193 bp, Zea mays
  Clone ID: MRT4577_139173C.1
gcctcgctttgactgggatactggtacgtgagcagagacaaaaggcggacgagggtgacacgtgagagagtcgagacacggtcacgataatctcccgttccttattataaacttatagtttatatttgaatcaagtcaagcttttctaaaagaaaatggaaaaaaagggcggcgcgcaattagttggctctga

SEQ ID NO: 42945 - DNA, 392 bp, Zea mays
  Clone ID: MRT4577_139174C.1
ttttttttttttttttttttttttttttttttttttttttttttttttttttttttttttttaaacattacggacccaagattcaggtccagtcaattaaaaaacttgattaagggggtccataaaatggacgacaactccacaactgataggtgggctttagcagtaaagcgcaaccccttgcaacgacgaaaccagaatttacacagttgcttggcaggttttatttacaggaggcatgggcaaggttaccccacccgattggggggggccatttaaagcagtccgaaggggttttcaccactgtaagtcatgtaaaggaacccatcctcggccttgttttttttttagattgaaaacattaaaaccacttgtggggggagggggttttt

SEQ ID NO: 42946 - DNA, 478 bp, Zea mays
  unsure (1)..(478): unsure at all n locations
  Clone ID: MRT4577_139175C.1
aagggaaagacnncggacggcaggggcnanngatatncgcccgacgccacaagaacnggaaacgcgacccgcaanaccaancacagaggaggccccaaagcgcagcacccgaangggcgggggnagagagcaaagaaagccagcccggcccacangggcnagggaggcnaancaagacanngccgnaggagaagaacnngcccangaccaccgacaaaagccncgcagcaggcgacggcnggcnacggccancgcgggggaaccaaccgccgaggccgagccaaaccgcacccgcaggaagacacgaacggcccaacgccaggccgcagaacccgaggcacccacagcaggcgnaggccgaccgagcgacccagcacagcaacnnaccagagccncgagagcaggacaaggaacccacaacaacaggcaacaaacagggaccggngacacaggacncacaggcaagcagcaggcaaca

SEQ ID NO: 42947 - DNA, 375 bp, Zea mays
  Clone ID: MRT4577_139176C.1
caacaagacgtagggacagcgccaaggaaccagatgggccgcgcgttctgttacgtgatactaggcggaggcgtggccgcgggctacgcggcgctccagttcatccgcctcggctgcgaaaccgccgcccaagccggagagttctgcatcatctccgacgaggccgttccaccttatgaacgtcctacgctgagcaaaggctatttgttcccagaaggtggtgctcgcctcccagcgtttcatacttgtgttggtgccaacgatcagttacttgatgcagattggtacagggaatatggtatcgagcttattctcggaacgaaggtgatttccgtcgatgtgcgccggaaaacactggatacttccgccggggaa

SEQ ID NO: 42948 - DNA, 365 bp, Zea mays
  Clone ID: MRT4577_139177C.1
cccacgcgtccgtccactcgtgttttgacgcgtgggatcacctcggggatggttacctatttgtgtgtgcggtggtgctcaccttcacgaagctcttcagccggttcttcttcaagaaagagatgaggatccttatggttggtctcgatgcagctggtaagaccaccatcctctacaagctcaagctcggagaaatagtgaccaccatccctacaatcgggtttaatgtgttgactgttgaatacaagaacattaactttactgtctgggatgttgcaggtaaggacaagatcaccgccattgtggaggtatcttttttcagaacacttcacagcctttatttttggttgttgaatagcaatgat

SEQ ID NO: 42949 - DNA, 715 bp, Zea mays
  Clone ID: MRT4577_139178C.1
ccggccgggactcttcaccgacctgcaacaatcctcgcccaaattgtataatttcactcacccccaagagcgagcgaatcaacctctgccggaacatacagagcaatcctcttgcactgccacgtacggtgcacgcaccatggctgtgtcccgcgccgtcctgctcctcgtcatcctcacgggggctgccgcgtcctcgcccacggattccactcctgaggatgccgataccaagccgagcatcctgacccccatcgcgcacagcccgctgggatctttcgaaggcgccgatgggcccgtcgccgacaacgccatcgacgacgatgacgcggcgcccgtgggctcacccatcggcaccaccatgacggagccggagccgcagctcgcgccccccgggctccccgatagcagcgccaccgctgcttccgtaggccacccagtcgctgctgctgctgttgccgcagctatggccaccgccagcgccatctttgccttgtgagaggagggtgcatgtgactgtgtgtgcagctgtgcgcacgctagctgttaagttagagcggtattgattcacacattatatgtgttggtgttatgcttccaagttgtgcttgcacgtcttatccttcttttgaatcttttttttttactgttttcattcaaaaaatatgttgttactgatgaaaaaacaaaaaaaaaagtggccgccgggaaattt

SEQ ID NO: 42950 - DNA, 423 bp, Zea mays
  unsure (1)..(423): unsure at all n locations
  Clone ID: MRT4577_139179C.1
gcgttcgcggncgcgtgggnaaaaaaaaaagggggggggggggaaaaaaaaaaaaaaaaaaaaaaaggggggaaaaaaaaaaaaaaaaaaaaaaaaaaaaaaaaaaaaaaaaaaaggggaggcggggctaagaggaccaaaggaacacgggcgcgggcaggcgaccaaagaacccaaaaaaaaaacccggggggggggggggacagaacccccggccaacaaagccaaaaacggggaaaaacggggaaaaccccccagacgaaaaggccaagcagcacaacccccctattcgccagcgggggaaaaaaggcaaaaaggcccgcacggcgagggccctaaccaaacagtcgcaacaaccggaaagggccgaaggggaacacgcgccagacgccggggcaaaaagcccgaaagggcggggggggg

SEQ ID NO: 42951 - DNA, 1037 bp, Zea mays
  Clone ID: MRT4577_13917C.1
gccaatagtggcaaggactggccaagtgtcacagatatggttgcaaaaaaccgcagttgctggtgtttacttctgatgcttcaaaggaggctagtgaaggaatagcttaccaatggagctacttgctagagaatgaacctggagatccagggattgtgcctggttcttgtccaaacaggaaggaatcgcagccactgaactcaaggccggcatctctatttctgcaaaattacttccccacgatccccgtgcagaacgaagcatgtaaagagaattctgggctaccacaaatggcccaggcttgttatgccgcagctgggaataggatcccgaacttcatagctgtgaatttctacatggtaatgttcggttcccacagttacaagcaagcttcccttgttgcatggaacagaaatttgctcactgcggcatgtgcagcgaagcgacggtggtggtgttttcgatgttcaagacagaatcaatggccgcaccttatgtgggtgtgacaccattgctgcttgccaggctggagcaccaatgggtgcatgcaaggacacgggggcaccaaatcagactacatcgccctctgtaaatggaaatgtctattcaggaactatagaattcaagacgcattccactagtgctgctagcaataacaacatccggagtagatctgtttttctgctaaggctgcagttgactttgctgctctttttctctttcaggctctagttttcatatatctggacctttttcccacctactgtatagctgaaagtaacatcagcttttgttgtgagcttgctttctctattgggatgacggttagtgccttgctagctttataatctatagttgggagggggtgtggatcaatgttaatgaaagaatgggtagagatcttcctctgttctccgaggaggagtaatacggctacaacctacaaagaaactgatgagtggaagttcatgctggttatgtgattactagatatatgcatgcgtgttgcaccgaaaaaaaaaaaaaaaaaagcggcc

SEQ ID NO: 42952 - DNA, 724 bp, Zea mays
  Clone ID: MRT4577_139180C.1
ctcgaggccggccggtttcttctcacacatcatgatttcatcaatgagtgatgtcaccggactaattctcattctcaggaaatatgatccttgctgatggtgattacactttgaggaaccaatgtagatgcgtgcagagagctgtcaccatctacaaaacataacggagacgacttttgtgtttcacaaattgactatggtcaaggttaagcagatactttgatgatattattgctcaaccgcaacaaattgaactaacaagagatactagtataggtgatgtgatcactacacaagaatatgatcgatattacaatgatgaatgtcactgctatgaaaaacacttaagcccatttcgtgacttgctgaagaatggagatagaaactctgacgtatatcttatttctcttatcttgttagatgagcactacaccctctactagatggcaattgagctcgccataaactcgatatacttgttgatgaaaaggttgattgagaaccacctctacagtacacttatactgttgaaactatctctgaccattactacactcagaactctacatgtacatcccttgccacactgagctgatactgttaaagagagtggatacttcgggagaaagatctaccaacggatagtattgctcagagtctatgaagatacaattgaccatcttagctctgaaaatatcctgtacaaagcaacacactaccatga

SEQ ID NO: 42953 - DNA, 837 bp, Zea mays
  unsure (1)..(837): unsure at all n locations
  Clone ID: MRT4577_139181C.1
ttgggtacctcgaggccggccgggaattccatggccatcctttattttactaagcagagagaataagcttaccaagtcatcagtcatggtcacggctagtgcgattcaggcttttgtgaacttggtcctcactccttgtgatgctggttatttcattgccaagtttgcaccaaattatttcatcacctacatgtcgttccagatgacaggtgttactgacatattggttggtggttgcgattccaggacacttaatcatgatgttgattggttggagaaggttctgaaagataaggagcatgtcactaaacttgttactgttttgaaaaaagtgaggaaccttcttgacttgtccaaagacaacctgcagatcaaggaaagtaaaatccaaggaatttacatctctcgagcaatagagatatttatcttcaacagttcagatgtcttagagaactttttccaggaattgacaacagtgctgttgggaaaacacatatgaacttggctagcagtagaaatcactgcttatgcattttctcagtacaatatgaatccacatcagatgagagggtaccatcagggaagattatacttattgatttggatggttctgagaaagttgagacaactggtgctaaaggacggggtcttgataaggtgaagacaatcaacattgtcattgactcactaagctttgtttcagtctcaatcttccagcttgaagggattgtattgngtctaatcgccagtgctgtcagattctctggtctgngtgctgtcagtagtggccaaggcaatttttctatctttgtttgggatcctggtaatcgcgctgtc

SEQ ID NO: 42954 - DNA, 997 bp, Zea mays
  unsure (1)..(997): unsure at all n locations
  Clone ID: MRT4577_139182C.1
aaaaaaaatcttctttttaagcagagcagctatgccaaattcggggcagctatttccatcagtctgaagtcggaacagtgaacactcattcagcgcattatcaggaggcgatatagaggggagaaaaggaaaatcgtccatccaaatccaacttggtataacaagatcccgctcctttcccatcaccacccatcgttttccgctttgcatccgtcaatctgcttgccatcagcccccacgggccacggcgccgacgactcagcatcccgccttggacttggacgggatcagcacgtcggtcggggaagcaagtgtccagtccatccatccgcgaccgcgagtaggaacagtaactgacggcggcaagggagtagaggagggacgggacacgggaagagaggaggagcttgcttggacagccggtggactggtgctggtatatagatagctactagaggtaggcgggcgggcgggcggccaatgctgtcaggcgcgtagggctaggagcatgggcggagggggcgcgatcgtccacggcttccgccgctggttccaccgccggagcggctccacctccaatcagtcgtccatcgccggcgacggcgagggggaggcggacggcggctcgccggatctcgagatcgtcgatgacccggatctcctcggcctccgcgccatccgcgtgcccaagcgcaagatgccgctccccgtcgagagccacaggaaggactcggtggaaatggagttcttcaccgagtacggagaggcaagccagtaccagatccaagaagtcattggtaaaggcagctacggggtagttgctgcagctgtagatacccgcaccggtgagcgggttgctatcaagaagatcaacgatgtgtttgagcatgtctcggacgccacacgcatactgcgggagatcaagctccttcggntgcttcgtcacccagacatagttgagaataagcacatcatgctccctccatctcggagggag

SEQ ID NO: 42955 - DNA, 454 bp, Zea mays
  Clone ID: MRT4577_139183C.1
ggcatcaaaattctatccctttttattcatcaaatatagatagggcccgggcatccaagtaaatggccccgctcccccaaaaggccggccggccacatgcccccagcagcttattcatggaccaaattattaggtaaatggatggagaaaaatgtattattcctccgaccccccactttaaattagttaaaccggatcgggaacccgggctgcttgttgccgaaaaaaaggccaaagttcttctccggggaacccccccccttctggttctcgttaaacatggcaaaaacaaaggtctccagcgggccggcccttttgggcgtcccccggccaacggggccaaaaagcccctggttgaatttccccccgttgtcaaccctggccccaaaacccccggccgagggccaaccgtttttggacacaaaaaccctgaagttgggccccccggcctttt

SEQ ID NO: 42956 - DNA, 426 bp, Zea mays
  Clone ID: MRT4577_139184C.1
gtcttagattgctccagataatatgcaagttgaggtgggctgaatttacaaatcagaggcgcaattcaagagataatgccgtatttgaagcagtcgctgaagcaccaagtactgcacacgatcatactgaggatgatactgggaatgaagttccagaagaggacatggtatcttctgagttacaagggcaaacccctggtgagaaactagtggggcaatctgcaactgaacagatggtgggatctgaagatccaaagccgcaagccgaaaattttgttgctgaacctgttgtgctgggtgcagtcgggcaagtagaaattgaactggaatccaaaactactgttgaagtgtcaggcgaacaaggctatagtattgagcagactgttcaaggggaagctttaattgaaggcgcagggggacaacttg

SEQ ID NO: 42957 - DNA, 2457 bp, Zea mays
  Clone ID: MRT4577_139185C.1
atccatccaactggtatacaagatcccgctacatcccggggagcgtatcgttttccgttctccagtccgtcaatccagtccccatccccacggcgccgacgactcgggggcttccccccttggacttggcccgggtgggagcagcacgtcggggaagggaagcaagcgtccgcgagtaaggacagaaaaccgaagggaggagtggagaggaggagcttgcttggagcgggtggacgggtggtgtgtatatagttaagcgggcgggcgggcagccaatgccgtcgggcgcgcagggctaggagcatgggcggagggggcgcgatcgtgcacggcttccgccgctggttccaccgccggagcgaaggctccacctccaactccaaccagtcgtccctcgccggcgagggggaagcggacgacggctcatccgatctcgaggtcatcgaggacccggatctcctcggcctccgcgccatccgcgtgcccaagcgcaagatgccgctgcccgtcgagagccacaggaagaactcagtagaaatggagttcttcacagagtacggagaggcaagccagtaccagatccaagaagtcattggtaaagggagctacggagtagttgctgcagctgtggacacccgcaccggtgagcgggttgctatcaagaagatcaatgatgtgtttgagcacgtctcggatgccacacgcatactgcgggagatcaagctcctccggttgcttcgtcacccagacatagtcgagattaagcacatcatgctccctccttctcggagggagttccaagacatctatgttgtttttgagctcatggagtcggatctccatcaagtgatcagggcgaatgatgacctcacccctgaacatcaccagtttttcctgtaccaacttcttcgagctctcaagtacatacatgccgctaatgtattccatcgtgatctaaagcccaagaatatactggctaactcggactgcaaactgaaaatatgtgactttggacttgcccgtgcatcattcaatgatgccccttcagctatattttggacagactatgtggcaacaaggtggtaccgggcacctgaactatgtggttcctttttctccaaatacactcctgcaattgatatttggagcattgggtgcatatttgctgaacttctcactggaaggccactatttcctggggaagaatgttgtacaccaattagatattataacagatcttcttgggactccatcatctgagaccttatcccggattcgaaatgagaaggccaggagatatttgagctgcatgcggaaaaaatatcccgtgccctttactcataaatttcgacatgctgatcctttggctcttcgtcttctagagcgtttgcttgcatttgatcctaaagaccggcctagtgcagaagaggctctagctgatccatactttgcatcccttgctaatgtggaacgtgagccatcaagacacccgatttctaaacttgagtttgaatttgaaagaaagaagctggccaaagatgatgttagagaactgatctatcgagagattttggagtatcatccacagatgctggaggagtacatgaaaggcggagaacagattagcttcctctatccaagcggagtcgaccgcttcaaacggcagttcgctcatcttgaggagcattacagcaaaggagaaagaggttccccactgcaaagaaagcatgcttccttaccaagggaaagagtggttgtatccaaggatggcaatactgaacaacaaattaatgaccaggagagaagcgcagattctgttgcccgcactaccgtgagccctccaaggtcagaggatgctgacatggatgatgtgaaacccacaagcttaagctctcggagctacctgaagagtgcaagcataagcgcttccaagtgcgtcgttgtcagaaataaacacccagagccagaggatgatggaatacctgaggagatggaaggcaccgtcgatggattgtctgaaaaggtctccaggatgcactcctaaggcaggactgtccatggcgacagcaatctcgacacaagatttctgtctggtgcactgtaatgccgacgacacactgtttggatcttgtgtacacccacagctagttcaactaagatgtagcactagttcgtccatggaggaagcagaatggacgatgaagtgtggtcagcctgtcgaccatgaggtgttttcttccaatggagtctagggtatgtttgagttctacaacggcttgtgccgtacgaagtgtcagcagtgtacgaggaggaggatatcgttgtcagtacacattttgcctgtctagaaaattatgagtactttctccgatcacaagtacatgtacatccatgtttgtcttaagataaaaaaagaaaattcacaaataaaaaaaaaaaaaagcggcaatcgatgat

SEQ ID NO: 42958 - DNA, 239 bp, Zea mays
  Clone ID: MRT4577_139186C.1
cttgcgcgagacccactcggtgaatccatctacgggctggaactggagatcgactgctacggcccgccgcaggccgacttcctctcggccgatgccggtgaagtggtggaagagaccctggtctcggcgcttctgaagtccaactgcccggtcaccggccagccggactgggccacggtcagcctgcgttaccgcgggccgaggatcgaccgtgccggcctgctgcgctatctggtcag

SEQ ID NO: 42959 - DNA, 176 bp, Zea mays
  unsure (1)..(176): unsure at all n locations
  Clone ID: MRT4577_139187C.1
tntngctaagngggcggaccagctccattccttactcgaataaacctaaacgggcaagttgcttcttgtaagaatggatatgtggcccgcatgtgcgtaacagacgggtggcctctgcatcttcagcctatacattgctcgatgctcaggaaaaaaaattcgtacatgaatggatc

SEQ ID NO: 42960 - DNA, 197 bp, Zea mays
  Clone ID: MRT4577_139188C.1
tttttattttttttttttttttttggtaaaactttattaaccctatactaaaactcttccacaaacgtgaataagacaaagtgaactaaactaacggtccgagcgggcaaaaaggaaaaaccatcattctttcaactgagctgaatggtaaagggcaactttactaacaaagacacgcgcaggggacaaaccatacg

SEQ ID NO: 42961 - DNA, 358 bp, Zea mays
  Clone ID: MRT4577_139189C.1
cccacaggacggcagcatatgggtcaggttacattaagacaaccgtgtccaaaaccagcatggatccagcgtccagggtcaccgtttacatttattctcaacatacacaagcagtaaagttggtctgctaccaaaggccattgggacgacccttttttgggaggcagaaatctatttgtctcctagccttctgggtcttgaacatttgccggaatatgtttcaaccgcgggtgttgtatctctaatcgtttgacgcactacgacacgatcttgttcaagttatacgcgttgattgagccgggttttcacaccctttacctgtcaccttacctactttccctatagggaggccttttta

SEQ ID NO: 42962 - DNA, 508 bp, Zea mays
  unsure (1)..(508): unsure at all n locations
  Clone ID: MRT4577_13918C.1
gagcggccgcccgggggggggggggggggagaagcaacgccacgangaccaagcanggngccccggaggaggacccgcacgggacgggacagagagagcacaggcggggcacgccgagggcgcgggggnggcgcnangaacacgacacacgacagcgaggcaaannaagaaggggaacaacaaaaatcttttttttccaagggaangcgancganccancaccgaacaggggggggggnaagacaacaccccgcgggcgccganccnccccgcggcgggccgcacccaggcggccacgaccncggcggccccggacgcaagcaccaacgccgcgcgcaacggcggcgacacgggcccgnccacggcgcggggccggcccagggccgggagcgccaggggcgccgcccncnggccggagaacagcagggcgccgaacggggggcccacccggggggcgccgncaagcgcggcgaccgccacgccggggacgagcacgccgggaacgacc

SEQ ID NO: 42963 - DNA, 112 bp, Zea mays
  Clone ID: MRT4577_139190C.1
gttccgctgaaagacaaacgagatgccattgctgtctgaatgagtggtgtaagattagtaaatcatattcgttacctcggctgatatttcacttgcttgggcttgccatgat

SEQ ID NO: 42964 - DNA, 571 bp, Zea mays
  Clone ID: MRT4577_139191C.1
gccacacggcctgccaaaggcatcaccgtcgcgacgcacgatggcaagcctcggtcacaagtcgtggacaccctgatagcacgcgggcaagatcggctgtcggtcgctctttgcctggctgccgtcccaactgtcgtgcaagactggtctgcaggggagttcggcgtcgacaccagcacctgctggatcacgtactccctgcacgacgtcgtcaacacgtgcgaagacgccgggaagctgctcggcttctcgctcgtcatcttggcgctcctcagctcgggcgcgacccccaagaggacgcccaacaagctgacctacaacaagatccacatcaaagcgtacatgaaggtgaagggcacagacacggcgaaccagtaccggaccatcgactgcggcgtggagaagttcccgttcaacgacgagaagaaccagatgaagaagctgtgcctgtagaccacgtacttcaccggcatagcggagggcatcgccaagaacgtccagaccgaattccagaagaccaagctcatgacccgcctgacatacacgctggaccagatcgagggcccgttcg

SEQ ID NO: 42965 - DNA, 188 bp, Zea mays
  unsure (1)..(188): unsure at all n locations
  Clone ID: MRT4577_139192C.1
gtttttgcggtcggagctggtgctccagcgcccttcgcggctgcccacgggtggggcgaggctgacgcgcaccgggcgggcgagcgattgcaatggcgtcgctagggcggatcaaatccgtcatcttcgatagggaggagaggaagatgcantaccaatcgcacatgccgcggctcaatgcctatgat

SEQ ID NO: 42966 - DNA, 288 bp, Zea mays
  Clone ID: MRT4577_139193C.1
gtactgattcaaatgtgtgtcgagtatgcaaggagagtttctctaccaatatgcttctgatagaacatgccaaactgcatgaagaggatccctacatttgtaaatactgtgattataagacagtaatttttgagaacctcagccagcacattgcagacacccattttagtgatcacctctattggtgtgaacagtgtgatgtacagttctcctcaagcagtgaactctacctacatttccaggagcacagctgtgatgaacagtacttgtgtcagttctgtgaacatg

SEQ ID NO: 42967 - DNA, 351 bp, Zea mays
  Clone ID: MRT4577_139194C.1
cggcgcctaggcacagacttcctcaggggggtgttggcacagccgtccttgtgccacagacgtcgcagctcctacctcggagaaccttgcgctcactgtatgactacctgctctgctctgtaccggactagaagcctgccgtgctgctagtaaacgatgatgttgagggggtcgcatgggtgtagtaaaatctgtgttcctcgacctgtgcgtgaccttgtaccgcacaacccgcgcgtgagattggaaactgctatctgatcgtctcacgagaattcagtcgcgttctgtttcttgtggcagctattgtgttcatacttcagtagtgtaacgtctgcccgatatttttct

SEQ ID NO: 42968 - DNA, 464 bp, Zea mays
  unsure (1)..(464): unsure at all n locations
  Clone ID: MRT4577_139195C.1
gcctgcaggtaccggtccccaatgccggggggggcgccgcgtcctaantgactctagtgtgccaaagcgcacctgtaaacggggcataggaatcacggggaaacggggatggatctgagaggggattcanacnatnacttngcccctctctagaagaatatgaaccacctggacctctactaatatgaataaagggagggatagaggggaagggaggaaaattgggggctggaagggctggcatgggaactttacgactggtttacaactgaatttcangtggcttggctggtacgaagcaaccggtggagggggttcantggctaatanccacaataaggttcantgggcttttccgccacatggttaatgcgtgggtctgaaagaaatccttctgcgccttantaggggggatctatagcactatctttggagataaatgagtgattggacacatttggatc

SEQ ID NO: 42969 - DNA, 252 bp, Zea mays
  unsure (1)..(252): unsure at all n locations
  Clone ID: MRT4577_139196C.1
nccnttcncttnnnnnananaaaganannnccaggnganatataaggaganaaagccagaaccaccgcgggaaacnnnannnngncgnggggacagggacgacagggacggggagccaaaacccgacagggaannccccgnaggcacccccaccaanaaccaaaggagangaaaaacgcgcgcacccccagcgagagccccggaagcacgcaagacaaggaaaaaacanangaaacccaaagcaaagaaaaa

SEQ ID NO: 42970 - DNA, 516 bp, Zea mays
  Clone ID: MRT4577_139197C.1
gataaatattgacgtgatgaggatgaccaaaaggggagaaggttgatccccttgctgggggacgggctcaggaaaagctgagcgccactctcgaggacatgctctaggtcatgctttgacgatgttcctacacgccgtgaccaatggacatgaccacaaagctgcaggtgctgttaaaggctaagaccaccttcaacccaacaacgcaagggctaaacaggatgcccaccagaaaaagctaaacctgcccatgctaggacctactacagttgcgtccctgacacaaaccgccaatctaaagacgttccattcatgagtacaaggcagcaaaatatctctccagaagaatacggctctgccatctacgaagacaacatcatggccagtaaacttcaagaagagctagacattgatgagatcatacactgccagccctaaagaaactatatctgagagacatctacctaccaggagtcatgctttgcgatactgccaacgtctgcacgcaaccatatg

SEQ ID NO: 42971 - DNA, 414 bp, Zea mays
  Clone ID: MRT4577_139198C.1
gacccacacgtttcggtttttacaatgacaaacacaccaaccaaaatttcctatcaacaatttatccaccatttgcgccaatgtattattccaacttgcgcttcttgcaccatttttcaccacaacaaatacgctcattaatccacaacttcttactcccttctatttacactataccacaattccttctaacaactcctttaattgacctttaacaactcaacatgcaaacccacatggtataacaaactctttaccctagcgtcttacaacaaccaaataaccaatttctacaacaactcttgtgccattttaccctacaaaccattgggcacaaaacaacaaaattttatcaaaattttctatctatttgaacctttttcttttttaaacaattcttatataacccttttt

SEQ ID NO: 42972 - DNA, 204 bp, Zea mays
  Clone ID: MRT4577_139199C.1
ttaaacttaaatgcaggtgtaggcatacgtgggtggggcgtacaacagaggacaggccacccaatatcatctggcacgcactgatgtcgctttcaagcttgacaattagaccatacatcacatgcgtcggctgtctccagtcattgatagactaacctatactaatctcaacaggattttgatccaggtgatgatatacctaac

SEQ ID NO: 42973 - DNA, 163 bp, Zea mays
  Clone ID: MRT4577_13919C.1
ggatgggaaaaacattattcttcgtatcgatttataagtgcctcatgttaacaagatgcatcatgcggacgattcacggctgcaaatgcagggaaaattggtggaacattgggtgtacgcggtgggaatgtgctacaaggttaggcaggcaccaggaactaag

SEQ ID NO: 42974 - DNA, 173 bp, Zea mays
  unsure (1)..(173): unsure at all n locations
  Clone ID: MRT4577_1391C.1
cacgacaccatcacagccctggaaatttnctccccgcctatccttattttttggtaaaaccaaaaaaacaanccntataaactcaaaaacacgaccacaggagagacagtacctaagtacctaaacccatctcattaggctcaccaaagcaacaacactgacaagccaacatc

SEQ ID NO: 42975 - DNA, 210 bp, Zea mays
  unsure (1)..(210): unsure at all n locations
  Clone ID: MRT4577_139200C.1
ttgcgactatcaccgaggagncagaccagggctcagggttcgaagaggaccgttccctaacgccgatgccggcgccaggcatggtgccgataacgcccggctcccttcaggtcccgccacacatactcatnaggctgagaacaattnagccggatgcccaaactactgtggcggggtccagaacgaccgaattcctggtccctatgccgg

SEQ ID NO: 42976 - DNA, 1241 bp, Zea mays
  Clone ID: MRT4577_139201C.1
ggagaaggcagatccatccgcgagcaatagacttaaggtctatggaggggctgaaactactgctgatgtgaagaagggctggaaccgtcttgcgttagacagtcttcagaaacaaagtactagtcgtgtaaacacagacgagaagaagaacgctgcgcaaggactcgtcactagttcttgtggtactaatgatacagctaatacccctgccaagttagcttcgctgtatcaggacaacattgcctccattccaagtcttggcgccccaggaatccttggtgaccctcaggaccagcctagtcctgtatctgtgctagatggaccgtttattatacgtgataacagcaggaatgtactgtactcatctccatccccacaggctttgtcgaggtctcccttgatcggatcgtttccacggtccctgccagtgtcgtgggaggaccccccgccggaagccacgtcgccgaattccctgagactctcgaggcttttctccaaggccgacgaggatctagactcgctgacgttcatccagaagctggtccgctcctgtggcatggaccgagcaagctgcgtgttggctggccctctggacccggacctgctcgagaaggtttcagagcacgaagacgacggaaccaggttcgggagaaggcggcttcttttcgacgccgtaaacgaagcgctcgccgagctcgcctggacggcggaactggccgcgtacccctggggcggcggcagatcacgcctggactgcaactgcaagaacggttccggtggtgactcggcggccgaggagatctggcgcgttatcaggaactggtcgacacttgacaagtaccctccctgcgaaactatcgaaggaaacgtcttgctggagatgatactcaggcgggaggcggacagcggcgagacggctcggttggaggtgtttggtctcggcgcctcggtttgcgtcgtggtgttggaggagctggttgaagagacggttgtggatctcctgactgactgctagtgagtgatacttgctgctgctgttaacactgctccgttaatccacccctcaagctggaatgggtctctttgccttgttcacatctttgttttgaccggcatttgctctagccgttgactggtaatggatcatgccatttgtttcgccgtttaattacacacacgagacaaaaaaaaaaactgtaagtaattgcatcttaaaaaaaaaaaaaaaaaaaaaaaaccta

SEQ ID NO: 42977 - DNA, 298 bp, Zea mays
  Clone ID: MRT4577_139202C.1
agaagagagagctctccacccctcttctaccgacttagaagcgacggaggcgccggagctagagaccgtaccgggcggcgtagagacctggcgcccggccgccggccccctcttttgctcccgcaccttacacaacctctaagccgccctgcgcaccggcggcgccacagcgccgccgcaccaccggcaaggtgacgccgcacgatgaccgcgcagcggcctactggctgaacgacacggacgcctacacggtggacggaaagaagaggtttgagacagctcctgctgcagcaagcca

SEQ ID NO: 42978 - DNA, 536 bp, Zea mays
  Clone ID: MRT4577_139203C.1
caaaacctattattatcttgttaaagctggtgcttatggttttcaaaagtcacaaaaacatgatagttagcttcgctgtatcaggacaacattgcctccccaggaatccttggtgaccctcaggagcagcctagtcctgtatctgtgctagatggaccgtttaatatacgtgataacagcaggaatgtactgtactcatctccatccccacgtaaggctgagagcccatctcatcaatcttgagcagtctagagcgagacggtctcatctcaaatgcctttttgtttttacatacatgtgcagaggctttgtcgaggtctcccttgatcggatcgtttccacggtccctgtcagtgtcgtgggaggaccccccgccggaagccacgtcgtcgccgaattccctgagactctcgaggcttttctccaaggccgacgaggagctagactcgctgacgttcatccagaagctggtccgctcctgtggcatggaccgagcaagctgcgtgttggctggccctctggacccggacctgctc

SEQ ID NO: 42979 - DNA, 244 bp, Zea mays
  Clone ID: MRT4577_139204C.1
gccagcgccacttgaggaggtctatgcggaactgtgcctgatacaccaaatcaaagtaaacagcagggttttgaagaaggttttaaagaccaatgtggaatgcaccaacggcctgcgggggctgtccgttatatggcttaacacggacagggtgcttaaatacgtgggcgcaaataataaccggcttgagatgctcctccattgccattaagacgcaacagatacttgggcccctaatacatca

SEQ ID NO: 42980 - DNA, 112 bp, Zea mays
  Clone ID: MRT4577_139205C.1
gcggactccttcatacaatgcagactagtatcattcgcagttgtatctaggggtggctggctggctcttctggagatgcatagcctttactccaggttggatgcatgaggag

SEQ ID NO: 42981 - DNA, 303 bp, Zea mays
  Clone ID: MRT4577_139206C.1
gggacccaaaacccttggaaacccattaactttagacaaaaaaaccttagccccggtgtttttaaaataaatgttttttgaaaaaaacgggcccccctcaacaataaactcagaccaagggggttttaatagacccagctccgaacaacatttttgtaatagaccagagggggtaaacgggcgtcccaccacaaacttgtcgaggtgagccgtttccgttgcccaaactcaaaaacggaactttagattttgttgaaagccacaatggcgcaactttggacccacccattggggggcctttgg

SEQ ID NO: 42982 - DNA, 409 bp, Zea mays
  Clone ID: MRT4577_139207C.1
ggacctttgggctgatttatgtgcttgagtctagctaaatagtatacgagcatctcggccaggattgataattgtccgtgacgtacgacggggatggctacagggtagttagaggctgctatttagtcgccgtcgtggaagtcgatggtcgagtcgtagtcgttagcgtctgtgtcggcggacctcgacgtacattgctctaagactccgttggcgcatacgcgcggccttaataatacgacgcacgatagcgttgactcgatgatgttgtatactaaccggactggcgcttgcatgagtgattcgcataagcagtagacgttcgagtagtgttgctcctttacgattgactatgacactaacgcggattaaagagtcgtcacgatgaggatcctcacgaagtagaacg

SEQ ID NO: 42983 - DNA, 330 bp, Zea mays
  Clone ID: MRT4577_139208C.1
cccacgcgtgcgcgtacgccaacccaagcaccatgcaccctgattcccaaaacgggctccttgcaatagctacgtacgggataaatatctatttggtcgtgtccgcagtcatcacgcttgtcacatccggcgccatatgtgcttaggttaatgtcggcttctaccacaagacatgcctgtcggatgccttcctagtgcaagcaaccgctgccacataaaagcacaacagcggcatagtcgcctgtctgatgcatctacactgtcattactgcttccacacgggctaaacacgcctcggtgctcatcgactgcgaaatataacaacactgg

SEQ ID NO: 42984 - DNA, 584 bp, Zea mays
  Clone ID: MRT4577_139209C.1
atacatgatacacagaacagaagatacaagctaaaaaaaaattaaaaaaaaattttaaaaaaaaaaaaaattttaaaaatttttttttttcctagaaaaaaaaaaaatttttttttttttgaaaaaaaaatattatccttttaaaaagggttttgtccttggcccgctccccccttggggggtttttttggggttttcctccccctggggggccgttgggctttttttttgggggccccttttcccctttttgggggggtttttccttttccggggcggggtttttccccctttgggttggggaaacccttgggtttccccctttttttccttttggaacatttccctttttggcgggtggggttattgggggggggccccccccggttcccctttcccaccggtggcccccctttttggggaagggccccccccttttgggggccttttaggcccggggggggggggggttccccccggggggccctttacttttgccgggcctttaggcccggtttttttggttttttccctttcttttttgccccggtttgcggttttccccgggaatcttttaatggggg

SEQ ID NO: 42985 - DNA, 120 bp, Zea mays
  Clone ID: MRT4577_13920C.1
cctctgcagagagcatggcgagcaggacggcggagacccgaggcaatgtagaagccaggaagcaggcccaacgtgggtggtccaacgtcatggccatgtttgaacaagcccagatacagg

SEQ ID NO: 42986 - DNA, 346 bp, Zea mays
  Clone ID: MRT4577_139210C.1
cttgtctgctggcaccacttccaagccagtgccctcagttttacgagctgtcggacgaagtgataagagacaaaacggtcgacatggttcgcacgcattttgccgtagcggtcgccgaggtggccgcggtgctgctgctggcaacggcggcgacaaccttagaggccgtcatcacctgcgggcaggtgagctccgccattgcgccctgcctcttctacgcccgcggaacggggtccggcccctgcgcgttctgctgtagcggtgtcaggaacctcaagagcgccgtcagcaccaccgtcgacaggcgcgctcgactgtaactgcctaaagaacgccggcagggggg

SEQ ID NO: 42987 - DNA, 689 bp, Zea mays
  unsure (1)..(689): unsure at all n locations
  Clone ID: MRT4577_139211C.1
tcnnctcgaggnnccgccggccgggaactcaagcacgcaattctctaccattcccaattcataccacacaaacccaaatcgcccatcatgagctacactctctacgacgccgccatcctccacaccaaggaggctctccagtccctctctgccatcctcaagaaggcctctacccacgccaatgcctcttctttccccgaggccaagctggcccccgacatgctcgacctgaacttccaagtcttcttcatgaccgacctctcccagaagctcgttgcccgcaccaccggcgtcgagcccctcaccctctcccgcgacgactgcaccaactttgagcagtaccaggcccgcatcgcccaggtcctcgagattgtcgaaaaggctgacaaggccaccgttgacaagcgcgccgacgagatcgtcaccattggtctcggacccggaaagagcgctgacatgaagtcccgcgactttgttcagggtttcgctattcccaacatcttcttccacctcaccactgcctacgctattctgcgaaaggagggtgttgagattggcaagcaggacttccttggtcctttcattggccagtacctccagtaaattagggactatgggataaataaaagaaatgatttatggttgaactgcaaaaaaaaaaaaaaaaaaacccgagccgcggccctcgn

SEQ ID NO: 42988 - DNA, 342 bp, Zea mays
  Clone ID: MRT4577_139212C.1
cagctctatcctcttaagtacactacgattatctcgcgttgttgctcagtgccggtgtcccaatccccattttttccaagatcacaaccttattacacaaatccacatctaccttctcatacatcaggaatttggagtcacagtccacgttcgcatgaattctaacttttaactgtcaaaacatacaattatatgcattttcgcgttatagtccacgttctaaaaaattggtactttcaactgccaaaacatacataatagtcctcaaactgaacacaatctttaaaatgaagaccagaacatactggcttttgaatcaccaccataaagcaactggagcaa

SEQ ID NO: 42989 - DNA, 346 bp, Zea mays
  unsure (1)..(346): unsure at all n locations
  Clone ID: MRT4577_139213C.1
tttntttatttttttacattttaattttggtgtggttgtattttttttttttagttcgacccggtccaattttaatattttaaaagtaaattttcagaaccgcagctccaaactaacagaaacacctttgttgggtttggcaaacttaaacaaaatggctttttcgtcgactacaggtagtgataaatgccatagtacaaaatccgttcgccgcttatgattgccctatttggatggggcgatattttactcgttatcctcgttgtcgtcatttgttccgtccggggagttgaggtggctgagcctttcaacgaaactggtcttcccttgttcgttttgtagttct

SEQ ID NO: 42990 - DNA, 652 bp, Zea mays
  unsure (1)..(652): unsure at all n locations
  Clone ID: MRT4577_139214C.1
ccggccggngatctcgccggcgatgggtgggtgggggatgtccgatcgcctgcttcgatgattgagccccccttcctcgtntgctctccgtccccccaccctcccgccccgatcggcttccccagtggatctctcgtcgttcagggggttggttccatgtgttccgccggatctggaagtggggctaccctgggatcctggctaaccgaaacgaactggaattcgttttagagcaccctaccgcacgtaacagtatatttcttccttcccatggcaggtaagcaggttgaccgtccgcgaattcaccgtatcccgggatacgtatgggttccaaagcgtccttccgcgtcacgctcctcttgctgctcctcgccgccgcctggggacctgctgcacaggccgacgacgctgctgagctcccggatcatattgctattaccttgaaggagcaggtttcttcgaccaagattcctgtccgtctcaagagtggcagcccgctgtgctcagcctgtgaaaacttcacgggcaaagctgtcagttatatcagtgagaaacagacgcaagataaggtcatgggattccttcatgacgcttgctctcagtcattctcgtttgaacagaagtgtgatgaattgatggactcttacgcaac

SEQ ID NO: 42991 - DNA, 337 bp, Zea mays
  Clone ID: MRT4577_139215C.1
gaatagaatatagtgtagtgctttttcatgcagacacgactatactttatggtttttaatatttttatacaaacaaacccaactagaaaatggtaatacaaatacagacaggggagaaaacccgaaacttaatgtattcagggggggtggaaaaaacgggactgggggtgaatattacaactagccaaataaggtcaaatggtaatggacaaaaaattaaagagagccctcctccgggatattcaacctcccgagtatgatccaaagaaaacaccgaatctgatggatataaaagaagaaggcccaatggattaagctttcatatacccaatcccat

SEQ ID NO: 42992 - DNA, 860 bp, Zea mays
  unsure (1)..(860): unsure at all n locations
  Clone ID: MRT4577_139216C.1
cattgggtacctcgaggccggccgggtatttcttccttccatggcaggtaagcaggttgaccgtccgcgaattcaccgtatcccgggatacgtatgggttccaaagcgtccttccgcgtcacgctcctcttgctgctcctcgccgccgcctggggacctgctgcacaggccgacgacgctggtattggtaacaggctttgccatccttttggttgtcttctaatcacatcttggactccactccattatctgctgctagctgctgcaccttttttttgactacttagttaaaacccggtttccaaaccgttattagcggctaaaacttagctgagagatctagagccggtggtctatttgagaggtttggaacgggtgatctaataggccatctaattgtttgcctatatctctcaaatagctgttacttgttatctgctccaacccaattcttccttactattagttgttgttggaccatacccaattcactgccctctcactttttctccatcttgcacagctgagctcccggatcatagagctattaccttgaaggagcaggtttcttcgaccaagattcctgtccgtctcaagagtggcagcccgctgtgctcagcctgtgaaaacttcacgggcaaagctgtcagttatatcagtgagaaacagacgcaagataaggtcatgggattccttcatgacgcttgctctcagtcattctcgtttgaacagaaggtgatcatcttgagcatgttttgtatgttcttataaccagntgtgtgtgtgtattgtagagagtaaaatactgccgtggttgcagatatgttaaataaattcataaacatttggttccatactgc

SEQ ID NO: 42993 - DNA, 625 bp, Zea mays
  unsure (1)..(625): unsure at all n locations
  Clone ID: MRT4577_139217C.1
tgncgcggtgggttttttctcaagtacacccacattccagcgtcgagagcagcaagttggctgtccacgatatgggaggccgatgcaggcggtactgcatctcacgaattggagccccgtccactctcttggacagccgagtcatggtcctcgttgacgggcgtcgtcctagatctactgccgtcatcgacgatgtctggaccaccaccacctcaagcaccgtcgtcgccgtcgaggaacctcagccggagcatcagcgtcatcggagttaggataaggcaagcgcacgccaccccgtcctagatctggtcttctccaccactccccttgagccaccaccgcttggtgaaactagtgtccgctgccctggaaaatgttcaagttttagtgtgatgatttattggttagggctgcgtggtaatctcaaatctgtgtgctccgatctgcttgttgctcagacctggttcgctagtatctgacgaagcacagatcaaataatctaacatgtgaagtcgattgttttgtgaaaaagaaagaatgataggtagttgtgttcggtaatgaagcaaaatctttgaaatctttgctacctttactttaaattggaggacggctctaccatttt

SEQ ID NO: 42994 - DNA, 430 bp, Zea mays
  unsure (1)..(430): unsure at all n locations
  Clone ID: MRT4577_139218C.1
gtgaaagagctagacgtcttcaggctaaaatgatgactaatttagttatggccaaggaccgtttacaactattagaaagtggagctgttccaaaaagaaaagatccgttaacacatgctagtaattcactgcctcgttcaaaaacagttatgaaaactggacccacaggtctttcaggccaccatagagcacctagttgcagtggtttatccatggtttctggcgtgagacaaggacctggttctgcagctgccactcataagagtacaccaaaaacaaatagaacaaataagccttctacccctacaactgctgctcgtaaaaagaaagacttgaagaattttaggaatgtggacagcaaccttgctaaccttataatgaatgaaattgtggacaatgggacagctgttaaatntgatgatatagctgg

SEQ ID NO: 42995 - DNA, 1496 bp, Zea mays
  Clone ID: MRT4577_139219C.1
ctcgaggccggccggcacgcaccttcccctctttgcaatccgtatcatcatcttggcctcgtcaatccaccaccaccgtcgtcgctgagctcctcctccggcttcgcttcgctgtcttgcctcctcctcggtcgaagaagaagaagaagaaaacatgtgtccgggatccgtggagtcgtcgtcggcggcggcggcgggcaagagcgtgtgcgtgatggacgccgcggggccgctgggccacgcgctcgtggaccgcctcctccggcgcgggtacaccgtccacgccgccacgtacgcccgcgacggggaggagggcgcggctgccgccgcgctgctcggccacctgtcgtgcgccgccgacgcgtgcaggcaccggctgaagctgttccgcgccgacccgttcgactaccacgccatcgccgatgccgtgcggggctgcgccggcgtcttctgcatgttcaacacgcccgacgaccaggcccaatgcgatgagtcgacggtggagacggaggtgcgcgcggcgcacaacgtgctggaggcgtgcgcgcagacggacgccatggagcgggtcgtcttcacctcctccgtcaccgccgtcgtctggagcggcgccggcgccggcgcccacagggaggaggtcgccgacgagaggagctggagcgacctcgccttctgcaggaagttcaagctgtggcacgccctggccaagacgctgtcggagaagacggcgtgggcgctggccatggacaggggcgtcgacatggtggccatcaacgccggcctgctgctggccgcccccgggctcgggctcaccgccgcgcacccctacctaaagggcgcccccgacatgtacgacggcggcgtcctcgccaccgtcgacgtcggcttcctggccgacgcgcacgtcgccgcctacgagtcccccaccgcctacggccgctacctctgcttcagcaacgccgtctgccgtcccgaggacgccgtcaagctcgcccagatgctctcgccggccgcgccacgctcgccgccgccaagcgacgaactgaaggtgataccacagaggatccagggcaagaagctgaacaagctcatgctggagttcgccagcggggtatacggggagctggactaggaaggaactgccaggccacagatgatgcgatgcgactagggctgttgtattcttttgtacgtagtactatttgtagttttcgcccccctcacaaaaaaaaaaggagggaaatctgtttggttggccaaaatgtgccatacgctcgctgtacatggccaaacacgccacgtgtgtagcccctgccagcagcaggggtgggtggggagagcatttcagtgatcggttgccaaagaaataccatatcgtatctaggttcgtgagttacatcccatgcatgtgttacgtgacgcttatattgaactctgacaaacttgtagcgcacaattacaaacatgattacggaagaatcgtttcagggccggcc

SEQ ID NO: 42996 - DNA, 291 bp, Zea mays
  Clone ID: MRT4577_13921C.1
ctcgagtattgcttgctatccacaagaaacaaagcagaggaccaacaatggtcgacgcctcctcgtgctcggtcctcctgctgctcctggacgacgtcgccgccttgtctgctatgagcgtcaacgacgccaccttcatcatcaccaacaactgcgggatcaccgtgtggtccgcggacaccccggtgggcgtgggcacgcagctgaacccggacggaacgtggaccgccaacgtgtcggccgacaacaactcctgacgcatgtgggaccgcaacgaatgctccttcaatg

SEQ ID NO: 42997 - DNA, 272 bp, Zea mays
  Clone ID: MRT4577_139220C.1
tttaaccttatcaatgaataccatgcgaagggcgaatctgaactgagcaatatctctgatggcatcctgaatctgcttgactcccacctagtgccttcttctactgctgcttaatcaaaagtcttctaccttaagattaatggtgactatcataggtatcttgctgaatttaatactgttcctgaaattaaggaatcttcttataactctattatttattactttgcttctcatgacattacccttacttatctattacctacccatcctat

SEQ ID NO: 42998 - DNA, 603 bp, Zea mays
  Clone ID: MRT4577_139221C.1
gccggccgtgccggacttcgcttatgtgcctgctgccacctctactactactagctaacacagctcctctacctcgctcatagccgccgaacgatacttcaatgtagggcatgtggcctacccaccgcatcctgacctgtacagcgctacctgctcttcttctaagaaggcgcggtctaccagacagactacaagcgcaggataccgttgattaaccaacaccgacctgctcctccacccccaaataccgatcccgtgcgccattgaccaacgaggacatgctctacaccaatctatctgccgtctatccatcagacacggtgatatgatgcttgcttctgcttactcgcatgagctgccactgtctgtgcctgaacgtcgtctgaccaactatgtcgctgcctaatgcactggacttctgttggctctacgatgcgctcaaaacccgagttgttagatcaaggatatgaatgcttagtttaccacactgcatgctatttctctgatgagccctgtgatgataaccggactttcatggctctcttggatgtagagcatattatgactaccactgcgaaccacgtcattagagccctcaacgga

SEQ ID NO: 42999 - DNA, 484 bp, Zea mays
  Clone ID: MRT4577_139222C.1
tttttaacgacgtcgcccgcggcactgcacatcggctcagtcgaggcacccaatgcccaccgacaccagtgagatgaggcttcaaatttgggtcggctccgccactgcccgggtgtgactacgagcactggctcatcgtgattaacaagctcggcgggagggcgccagcaagcaacatatgatcgactgatacatccagatcctcgtcaaggtccttggaagatacctgactatcatgatattataaagcatccaatggattttcaacaataagaaagaagctcgataagggggtattccaacttggagcgacttgagatatccgcgttaaggaattgacttgggaatttttagccaggaacatcttgtgaggacgagatgtggttctgtgaccgttgccatgtacggagacgaggacaagccatcgcttataacatacccggatgtagctctaactgatttttcttctgccggtagtggcgtc

SEQ ID NO: 43000 - DNA, 959 bp, Zea mays
  Clone ID: MRT4577_139223C.1
gggaaaatagaaacaccagatggcgttagactagccagtcgctgcctcggcccccaccagagcagaggccgccacgcgctctcgtcccttcccggcttcaaccctcctcctccttctcctccgctccccccgcgcggcgcggaagagagaccaaaggggacggcagccaggaaggaagaggaggcttcgagatttttgcggaacccccacgccacccccctctgcacaccaccacaaccttctcctcatagcctgcctctcgcgtagggtttgcgcgcgccaccgtctccactccaatcccagcaccacccgtcctaccgccgccgcattcggagctctgcatctgcctgcagcccgattcgccaatcgccaccgagcctcgagaagcctcgccgtaccggtttggggatttctggtttccctttctcactgttactgttgctgggatctgaggagtgtttgtattggtgctaattgtttctgccgatttgggcgtgattatccaggctgagtggtattggtgatgtcggctgattagatttgggggtgtattggtagaggggattcgttttttttaggagggggacgtctggacgtctaccttctctgctattggattgggctccgtgatcgagactgctccgtgaagtttttggtcctagggattgtgtttttttgatcggcccggaccaggaatagagggttcttctcttgagaagatctagggccgcgtgttctatcgtcgtctgtagataaaatcaaaagaaaaaagaaaaaaagaaaatagagagggagaaaaaaaagagagagcgagagatatagagaggtagtggaagggaggctggaggttatggcgctgaattactcgtcacgctcgctcctggtgaccgatgaatgtgccaacatgatgcttggttgtgggggctggtcagatgaggcctctcctgtatcatcctccg

SEQ ID NO: 43001 - DNA, 440 bp, Zea mays
  unsure (1)..(440): unsure at all n locations
  Clone ID: MRT4577_139224C.1
acaatctcactacatttccataaccattttcncccccccaactctacctactcagtcccattctaatcggggtaagcatccaatcttttcctccaatctactcncatctatccttaactcctactatatcaactccatctaggaagctcctcattatttatcttaatcgcctgcatcaaaaccccccatcttatatcatcttctccccaatgtataacaacatcattctgtgtaactcagtcatattctttccctatgatacaccttagcatttattcactttcaatctaacacttcatttcacagaggactatccttacaatctctctactatccatattaattctcacattttccattcaaacatttattcattatttagcactctctttgatattctacataatcaattatttcctatttattcctttcttcattac

SEQ ID NO: 43002 - DNA, 290 bp, Zea mays
  Clone ID: MRT4577_139225C.1
ttttgacagcttttaagggcccaaaggcaattctttgaaacggaaccgttttgttcctccctttacaagggtttaagccggggtgggcccaggggaaccccaaaacacgggcaaaatttaagccgggaccctataagttgcccccccccccaggggcaaaacatggggggccccttagcattttccagcttttttttgggcagttaaatttttcccagggctaatttggcatatggggcctccccctgggccttcttttcttggggatctgtttttgtttttttttggaa

SEQ ID NO: 43003 - DNA, 303 bp, Zea mays
  Clone ID: MRT4577_139226C.1
gcggtacacgctgcaggcgcagacggagagcaggggggactctgagagacctgagggccgatcggagagcgaccaagacaccgcagcgcttgaccgcatgccgagaagagcgtcgggccgggagaccggaccattattgatccctgtcagatccggtaacggctgataccgatgacatggaggggatcttcaatcgagccgacagcgtcggcgacagccagagcgctgtgtgcgattgggttgatgcgcgacagacggtgacgtacatcggtgccgacaaggtgcaccgcatgctggcccaaa

SEQ ID NO: 43004 - DNA, 421 bp, Zea mays
  unsure (1)..(421): unsure at all n locations
  Clone ID: MRT4577_139227C.1
agcagtggtaacaacgcagagtactttttttttttttttttttttttttttttttttttttttttttttttttttttttttttttttttttaaaaagacaattttttataaattattgaaaaaaattgagctaaaacaaaacaaaacacacaggttctaaagaacccccccaggggggggggggggcccaaaaaaaaaaacaggcccgggccccactagggaaggggaatttaaacagggaaaaacaaccaggggggggttcctgaaaccaaaggcttcctaaaaggctccacacggaaaaccgaacaccaagcctaaagtccccgggtactcggggggggtaccacgggtaaggggggaattttggagaaattcataaaantgggggggggtggggcgtgcgtttagggggccaaatttt

SEQ ID NO: 43005 - DNA, 534 bp, Zea mays
  Clone ID: MRT4577_139228C.1
catagatgaagccttcaggtgtataagatagctcaaccttccatcctcccatcatgaggatgggcagcgggctctcacctcaggtatagacaacgtatgctaggaaccatcaatccttacgttattgaaggccgcacctgactgttcgcttgatcacactctaatcaaatctcaaagggtcatctctagactcaactgctgctgttgacgactcgtgtcttgatcttgcttatgataacttctgttcgacactctggacataacagccacatatgaacacataatggatgcttctccaggggaagctgctgaccgtactgaagagatacgaagtacacacccagccaagctgtgtcgccagatacacatactgtccaaactaatccagggactttgggtttcagatgatcagatcatcctggtcttacttgccacagacctagcctgtgcacatctgagtgatagttatcagaccatgctcgaaacactcgctctgcatgaccaaaacgctgatgtcgttatggtcttacatct

SEQ ID NO: 43006 - DNA, 461 bp, Zea mays
  Clone ID: MRT4577_139229C.1
tctttttttttttttttttttttttttttttttttttttttttttttttttttttttttttttttttttttatttttttttttttaaaccgcaggacgggcatgttattgaaggcgttaataaaagcttaagcaggacatcataatcatcataacgacagtcaatttgctctagggtaggctagaagggggcggccgggtggctcttttcctgcctgccagagatgaaagaaagagagagagcgccctatccaggtcgatccaattaacccaccaaaaatcgcccaggaatcaaaaaactgctggtgggagctatactaaagggggggggataagcttgcttaggctctagggctataccctactacccagggaagcttagcgcaaaaaccataatgcatacctgggcgggtaaagggggggctaggacatttttatacggagctagccacatgatcttaa

SEQ ID NO: 43007 - DNA, 498 bp, Zea mays
  Clone ID: MRT4577_13922C.1
ccggccgggatcaaccgaccaagtcaatttttcgagatacctcatttccccgtctcgacttgagaatctcctcaaaacaccgcaaaaatggtccgcacttcagttctccacgatgcgcttaatgccatgaacaacgccgagaaggctggcaagcgtcaggtcttgatccgaccttcttccaaggtcatcatcaagttcctcactgtcatgcagcgacacggttacattggagagttcgaggagattgatgaccaccgatccggcaagatcgttgtccagctcaacggccgcctcaacaaggtcggcgtcatctctccccgctacaacgtccgtctcgccgagctcgagaagtgggttgtcaagctgctccctgctcgtcagttcggctacgtcatcctcaccacctctgccggtatcatggaccacgaagaggcccgccgcaagcacgtctccggcaagaatattggcttcttctactaaaacgggaccgggaagcca

SEQ ID NO: 43008 - DNA, 229 bp, Zea mays
  Clone ID: MRT4577_139230C.1
cttttctttgttcttttggttgaagtgggacatcgagacttggcataaatgtcaaatgcggggagaaaaacagaaccaactaaatgatatttattcaaaaaaagaaaggcgccgagatctaaaacaaaactgggtgaaagtggataccttacacttcggaaaaaatttataccgaagtcttctatggacagaaatgtttctataggaatggaaaccgatttactagaaa

SEQ ID NO: 43009 - DNA, 170 bp, Zea mays
  Clone ID: MRT4577_139231C.1
taaacctcatggctgtccgtggctgtgatcaataaggtgtatatgacgacataggagtgagctcaggtaccagggactgagattatgcgcttctgccacatggccgtgttgtgatgtttcattctgctggctatgccattaggagtattaaggatggttgtgtgtgatgg

SEQ ID NO: 43010 - DNA, 163 bp, Zea mays
  Clone ID: MRT4577_139232C.1
gccgccgagtagagagatcgtcgagacgcgaattatttctggagaggtatatgtaggcgtataagatttctctatagagagtcgcattagagctcgtcgtaatcacggtcatagatgtgtctcgtgtgagatagtgatcggcgcacaattctacacaacatat

SEQ ID NO: 43011 - DNA, 554 bp, Zea mays
  Clone ID: MRT4577_139233C.1
attaccatcagatagagagagatatccgatcatgaagggaggcaagaaggaaatggccggtgcggtggtggtcatactgatggatctgcagctcatggcagctccaccgacggccatgggcgcccgctcgccgcgcgaagccgtgccggatggctccctcgccacaacacccaaggggacgatggtgtcaggcacgctgtgctacacggtcgagacatgtaaatacactccctgcttcactcctgcttgctcctgaagatatagtgatcgcctctgctacggcatattgactcctgatgcttgagttgaggccattccagcgaagccacaactcttacatgcatgcgacggctcgacgacgactacgctgcctctcgtgagattctgttcaagtgaagcatggatcaaggcatccatgtatgctatacgcatatggggattaattacacgggtcacgaaaccggacagaacgatgtgatgatttatttacgtcatcaggagatcaaataaaggggaaatatatgttgtatgtgtgtggacgcatgctgagaacg

SEQ ID NO: 43012 - DNA, 190 bp, Zea mays
  Clone ID: MRT4577_139234C.1
gcggggaagatgaatgcatttctcggatcgttcatccggaacaatacttaacaaaaatagacttgaatcatatgctttttgcaacatcttgtgtccttgtgtctatgtctgcatctgtcgtactgcacaacaattacgcacattagtatgtgttggttctcgctctgtatcgcttattatgcacggtgtc

SEQ ID NO: 43013 - DNA, 413 bp, Zea mays
  unsure (1)..(413): unsure at all n locations
  Clone ID: MRT4577_139236C.1
gcgccttatgcgtccctcgtgcggcgttggagtggggcgagcctcttacattagcagggtggagtggtatgggaatnncctgcatttacgtctgcgtaagaacccatatatgaacagnnagcgaggcgtggcaccaactctgntnngtagcannatccaggtgccctagtncttctgtnnntcctctnattttgnatnnggcatacaaataatgtgggtgtgagtgcgctagagcggnagnaaaatgttacccaaatagcaaggnaccagnnatgtgaaatgcaagggagnnctggtccttttaagaataacnntttttatttaatctnnataaatctnntaatatgnntatatgtgagcnnnttcgaacattaggaacacccaaatagnatggagtggtnntatgctatnna

SEQ ID NO: 43014 - DNA, 609 bp, Zea mays
  unsure (1)..(609): unsure at all n locations
  Clone ID: MRT4577_139237C.1
ctggnagtgaagagggagatggagcctctgggtatgatgcctacttggaagaacctttcttctgataaatatggtgatagcagctatcatgatgaagaggaagatgaagatgaagcagaggatgatgaagatgaagacgatgaagtcggaaaggattcagacgctgagtcatcagatttatttactaatttgaatttaggaaggacctatgccagtggctatgctcactatgaggaacaagacaactaggagtgctgcttacccatgggtgaccgggtctgagaggagccacagaaggtgtgcttgatgaatcaggtgtgggtgttcagaagtactgtcacttagccttgtgcaaaacactagtcagtcacgcttccggaggcaaggagtagggcatagcatttttatagggattgataatcaagctgatagcataagaaaaaatgagttccaaatgtaagatgcttattgatccaagcagttgaagcatcatggattggagttttactgatttcagtgatcactaggttttgccaattagatacatatacaggataaaagaataggatggtaatatatttgtttgaaattaaattgctttttttaatt

SEQ ID NO: 43015 - DNA, 463 bp, Zea mays
  unsure (1)..(463): unsure at all n locations
  Clone ID: MRT4577_139238C.1
cgggcgggacttggtgctgttgccatatcgtccaactcagttaggtctcatccccaggatggcccaggtcggatggcttaagaagcagagctggtcaaatatcctttcccatatctttacgatgaggtctggccgcaccgtgccttggattcagagatttttcagcgaccatgaagatgcttttttaggccgagtgatatcctatcctttttcagcattgaagttcttcctcgtgactaattttgnttatttttttgttaccaccgcaacctacagtctcaagaggtagccaaggcttttggagcggtctgcacgccagagttctacttgttcaaaaaggatggccggaggccttttgaacttttctaccatggacagttcgatgactcaagacccagtaacaacgtgcctgtaaccggaagttttgcagggacctaagccgcgcgattgactgtgcgctcag

SEQ ID NO: 43016 - DNA, 376 bp, Zea mays
  Clone ID: MRT4577_139239C.1
ctacgaccactacctcaccatgtttgtggatctttagccgtaggagtcgttttttcttttttttttagactgaagcatagtgttggtcgggactaccttctcttattaccgggcaccaccggcacctcatgcgcttggactaggaagctgccactgccactgtcaccctttgcggttgcagaccaaatgcacgaacgtaaaaagactgccacctaacgcatacatcggaaacagaacatcttacttgggggagacaacccactgcacgacgtgaaatacctccgggggcgcaccactgggaatagtgcacggcgagatatgctgcaaatccagaaatgctactgtggcgcaccgggagtaagcccaatcgctggat

SEQ ID NO: 43017 - DNA, 282 bp, Zea mays
  Clone ID: MRT4577_13923C.1
ccggatggccccggatgcattcatgcactggtcggttctgaaaccctgctttggtaactgctccgtcgcggtcgctgtcatcaggctccaaagaatcctcctatgcatccgtatcggcgtaggtaccatcatcatcaatcttcgcgacgacgcacaattcacccctgtaatcggcatcatccgcttccctactcgcagttggtctgctgcaggaagtcatgcgccaatccagctcggcggcttcctacctcaatagatttctgcgccacatcgcgtcagatg
